United States Patent Application Publication US 2026/0058010 A1 - sequence listing, part 18

SEQ ID NO: 206 - DNA, 130686 bp, Homo sapiens
  source 1..130686: mol_type = genomic DNA
gggtcggttgcctcctcgcgacggctgcgccgggatgttccggggcggtggggtcgcctgcccaatgtcgggtgcgcgagtgacgggtggaagctggatttgtgcgcgttcttcaatgctccaaagggaggagggagcctccgagagtccacgtggggccggtgggattcgcagggtccgttttctaaacattgggtgtcctcgaacctgggggcgcgggctgtgtccgcccccagcagggatgaccatgcctgggtcagtggctgcataaataaataaacgaatggggaggaaattgataaaatattaaaagagtgttgtttcagagtttttactatgtcacctcttacagatttatgagagtttgttgttttttggagaagaggggtctccctatgttacccaggctggtctcaaactcctgggctcaatccatccgtccgcctcagcctcctgaagtgctaggattacaggcgtgagccatggtgcccggcctgttgatgagattctacgtgaaatatattgggcgttacctaagcactcagtcagtggtagttcttatagttgttgcttaaaaacagaaagaaatgtcataccgtgttctaaaaggatttgagaaaggtttgcaaagactaaaaagcaagtggcagggaaaaataacatacgcaaacttcctcctgactttttctgccattttatagcaaaggctcagaattgcattgccattgtcggttgtttcggtaaaattagtgttcctcaagttatctactccagggacattttttttttcttgagacagggtcttactctgttgcccaggctcgagtgcagtggcacagccatgactcactgcagcctcagcctccggggtcaagtgattctcctgcttcagtctcccgagtagccgggattacaggcgcgagcctccatgcccagctaatttttgtattaatgtactttataggagacagggttttgccatgttacccaggctggtttcgaactcctggcttcaagtaatcctcccaccttagcctcccaaagtgctgagattacaggcatgagtcaccacacccagctcagcaatatcctttattattttattttttatttttgtagaaacgagtctcactgtattgcgcaggctggtttcaaacgcctggcctcaagcaatcctcccacctcagcctcccaaagtgctcggattacaggtctgagccaccgctgccagcgcatcttaaatacagtcatgcatcgcttgggaaaggggataccttctgagaaatacattgttaggcaatttcatccttgtgtgaacatcatagtgtgtaattccacaaacctggatggtacagcctgttgctcttaagctacaaacctttaacagcatgttaatgtgctgaatactatgagcaattgtaacacaatggtaagtatttacgtatctaaacgtagaaaagagaaggtaggccgggcgcggtggctcacgcctgtaatcccagcactttgggaggccgaggctggcggatcacgaggtcaggagatcgagaccatcctggctaacacggtgaaacccccgtctctactaaaaatacaaaaaaaatagccgggcgtggtggcgggcgcctgtagtcccagctactcgggaggctgaggcaggagaatggcatgaacccaggaggcggagcttgcagtgagctgagatcacgccactgcactccagcctgggcaacagagtgagactccatctcaaaaaaaaaaaacgtaaagatatagtattataatcttacggtattataatcttagaggaccactatcatatatggcgtggatggttggcttattgcatgattgtaaatacctactatgtgccagatactgctctggactctgaggtgcctgggtaacctctatttaggtcaacggaaaatctaaacgtggttacattataaagcaaagccaggaagtacatatcctaatggtcaggctgatggtacatgtttaacaatcggcttgggaaggactgcatatatacacacacatttattataaatgttactggtatgaagcgtgtgtatcgtatcaattgcaaataatgataaaacacacaatgctctttttgtttgtaaattccatagtcagttgattctcagagaatgctttcctttagcattgctgaactcccgtgtccatagccaacctgtgcttgaaactgaattgtaatatgcagggttgagttgctacccaacccaccattttcccagtaaataatgtttggtttggtggggtggctcatgcctacaatcccagcactttgagattgtatgggaagccaaggcaggagggtcacttgagcccaggagtttttgttgttcttgtttttgtttgtttgtttgttttgaaacggagtttcgctcttattgcccaggcaggagtgcagatgtgatctcggcacaccgcaacctctgcctcttggattcaagcaattctcctgcctcagcctcccaagtggctgggattacaggcatgcgccaccacgcccaggtaattttgtatttttagtagagaaggggtttctccatgttggtcaggctggtctcaaactcccgacctcaggtgatcctcccgcctcagcctcccaaagtgctgggattacaggcatgagccatcacacccggccaagcccaggagtttgagaccagcctgggcaacatagcaagatcctgtctctacaaaaaataaaacaattggcaaagcatggtagcatgcacctgtggtctcagctatttgggatgctgaggctgaaggattgcttgagcccaggagttggaggctgtggtgagccatgatcacaccactgtgcttcatcctgggcaacagtgagaccctgtctcaaaaaaaaaaaaaagtaaaataaatgtaatgtttgacaggagtgttgatattttcacttatattaacaagtaagaaatgaagcaaaacacatatagatccgaactttatttgttcctcaatgatgtcagcaacttctttgctgtattggagcatggttttctattactgggtgaatagttcctcaacattttgtgctattcacaatataatggctgcagacatcacagaatttgaagtttaaccacattgttaattttctgtattacttatgtctagggtttggcaaatggattctgcagagtcagatggtaagtattttccacttttccagacacgtacagtctttggcacagtctcttttgttttgctttgttttgttttaaccaccctttaacaatgtaaaaaaaaattttttagctcaagcaagagccagattttgcctccaagccctgaattgtagcattttcagattttcacagtgtaaatatctctgcaatagttgttgcaagctgcaaagtggagtatctgaaccaatgcggagtatctgaacttggagttgggaagataatttccagtatacagatggagtagagtaaccttaaaagcatagattacagtaaaataattagaacatgataagtgttgagaccctttcaatagaatttatttcactgcaagtttaatgtagggtaatttttttttttttttttttgagatgaaatctctctctgttgcccaggctggagtgcagtggcatgatctcggcttattgcaacctccacctcctgggttcaagcagttctcctgcctcagcctccctagtagctgagagtacaggcatgcaccactatgcctggctaatttttgtatttttgtagaaatgaggttttgccatgtcacccaggctgctcgcaaactcctgagctcaagtgatccacccgcctcagcctcccaaagtgctgagattacaagtgtgagccactgtggccagcttaatgtaatttaatttttaataatgactgtgtttaacagccaattaaccgaaatcctgaaagttcaacaatcggctctcgtgaacagctccaactcagcattagtcttatctgtaagtggagatgggctttggggatggtagacagagttccatttcttagcatgggtcacccttagatacacctgaaagtgacctcccccaaggagccacacccctgtatcaccccctcccttgagcgtgtgcagggcttgtgatgggcttctaaccagtggaacatggcagagggggcaggtgccattgctcagatctggttatgttatatggaaggggcaaggggctcctattcccatcgctcccatgatcacatgacattataggagaccccatcttggtccactggagacagagacgctcctgctggccttgcagaagcaaacagcatgttgtgaacagtccctggagaggaccccatggcaggggactatgagtagcctccaggacctgagggtggcctccagcagaaggccagaaagaagctgaggccatcagtcatatggccacaaggaaatgcgtgctgccagcaggctgagtgaccttgggagaggattcttgcccagttgagcctccggatgagaatgcagcccaactcaccctggattacagccatgagaggctctgagcagaggacccagctgagctgtgcccagactcctgccccagggagaccatgtggtgctagatagatgttggtttaagctgctgaacctgtggtcatttgttacacaggaatagcaaacaaatacataattattcaacatatggatgcacctttctgtatgtgtattacatttcccttttttttttttttttttttgagacagagtcttactctgtcgcccagggtggagtgcaatggcatgatctcatctcactgcaacctccgcctcccaggttcaagtgattctcctgcctcagcctccggagtagctggaattacaggcacccaccaccacacctggctaatttttgtatttttagtggagagagggtttcattatgttggtcaggctggtcttgaactcctgacatcaagcaatcaacctgcttcagcctcccaaagtgctgggattacaggcatgagtcactgcacccagcccatttcccaatttttaaaggttaagagacaaaacagaaacattaaaaagggcagagaactgtaccagcatgttggcaagagtgccctcagatggtctaacaatggggaaagaactggtgggttttggtgggcttgtttgcccctaaagagcttactgtcccaactccatctccacggccttgggactgaaatggttgtgaagttgggagctagaatctagtgcctgagttgtgacctcagctccgacacttcctaactatctatgtgtctccatgaccctctatccgcttatctttaaaatgagatgatgatagtacctgactcatggaatagctgtcacgatttggtgagccaattattttcactgtagccttcatccactatggggccatcaggggcaggggctgactccagcttctggtggacctggatatttctacaccatgggtgatgagcccgtccctttgccagtgagtggttcaagaatcaaagtcaggcctggcgtggtggctcatgcctgtaatcccagcactttgggaggccaagatgggcagattgcttgaggccaggagtttgagaccagcctggcaaacatggtgaaaccccgtctgtactaataatacaaaaattagctgggcatgttggcatgcacctgtaatcccagctacttgggaggctgaggcatgagacttgcctgaacccaggaggcagaggttgcagtaagcctaggtcgtgccactgcactccagcctgggcaacagagcaagactctgtcttcaaaaaaaaaagagtcaaagtcagtcaatatccgccattccctgagccatttgaggaggaccaggcatccaatttgcaggggcctatggtcagagattccagaaaagggttcctatcttccaagaggcatctgtgggaagagatggcctttccctctctggacaccatgggagaggatgacctatggacagcgtggggcgatgcggagcctgcttctgcaggagagcagcacagaccccaccgtccatggagggagctggagccccaggtcaactcacctcaaaactgctccaacatccagatcccagtgatgatatggacagaaacatttcagcattgtttggaccgttttcagttgggttttctggtacttgatgaactaaacttgcatcccttccaccagggctctccactgtggggacgggataagggacgattgacattggatctggtgtccccctggagttgggcaaggtgagagtggcacagcagctggcatttgatcacagccaaacgccacggaggctccctgtgggctcctgcagttgccttcatgatggcattagttccccccactagtagatcattgtattagttccctgataagacaaagcaccaaagaactcgctctcccctctcagccatgtgaggacccagcaagaaaggagctgtctgcaaaccaggaagtggggcccactggacatcagatcttggacttcctaactgcagaaccgtgagaaataaatgtttgagctcctgcctggattcccagcactttgggagaccaaggtgggaggatcacttgagcccaggagttcaagaccagcctgagcaaaaagaccccttctctacaaaaaaaaaaaaaaaaaaaaaagatagatagaaaaaattagctgggtgtggttgcttgtgcctacagtcccagctactcaggaggctgaggcgggaggatcatttgagcctgggagatggaggctgcagtgagctatgatcatgccacggcactccagcctgggtgatagagtgagaccatgtctcaaaaaaattttttaatggttaggctgtccagtctatggtatttttgttatagtagcccaggctgactgaggcagtcctccacatgaactgctgaatgctactgcctctgataacttgtcatgaaacagttatgtgctggtgtgaaattgctgttagccatgttacttgctctccatattgtaactaatgatatatttggagctgagcaaaggctccataagtcctgctgagcatctgactttttaatttgcatcagatgctaccatcatagacaggcactcagcaagcaattgttcttactatttctttttttagagacagggtcttgctctgctgcccaggctggagtgtggtggtgtgatcatggctcactgcagcctcgacctcctgggttcaagcaatccttgaacctcagcctcccaagtagctgagactacaggtgcacatcaccagctatattttaaaaaattttttcttttttttttttatttttgagatggcatttcactcttgttgcccaggctggagtgcaatggtgcaatcttggctcactgcaacctccacctccgcctctgcctcctggtttcaagtgattctcctgcctcagcctcctgtgtagctgggatttttattttttattttattttatttttatttttttgggagacagagtctcgctctgtcgccaggttagagtgcagtggtgtgatctgggctcaccgcaacctccgcctcctgggttcaagcaattcttctgcctcagcctcccaagtagctgggattacaggcacgcaccatcacgcctggctactttttgtatttttaatagagacggggtttcaccatgttggccgggatggtctcgatctcttgacctcgtgatccacccacctcagtctcccgaagtgctgggattacaggtgtgagccaccgcacccggccattttttaaaaaatttttgtagagattggggtgggggggagtctccctgtgttgcccaggctggtcttgaactcctggcctcaagtgatcctcccacctcaaccttctaaagcattgggattacaggcaggagccattgtgcttggcctccagtgattgttaaatgaatgaaggaaaggcacctgggctctgagaaagagaagcaccctgatttgatcctcagtctaatgcgaccaaaacaacatgatcattcccgccatccaacctccgggacaaacgcaagccaaggaagcaccaagccagcatgagatccacaccagcgagggtttccaggcctgggcctgctgaccgctgccttcctccctctttaactctgctgtaccttgtcaccctcctctcacttccagagctccccctcgcttctgctgtgatattaagaggcccacagagcctgctcaaagctcagtcaaggctaaccaaaagccatcttcccgttcacaaacccgcatcttctctccaccaccccagcctcagagtctcctgtcccgtcccccttccctggaagccaaaacatcacggccctgccattgcacatttgctctcatctgcagaatttcacaaaagaaaccaagggcctctgggcccccactccagccccaagcgctctgccaaggagggaggcccctgctgttcatgctgccccgtgtgcaggcagacggatcttcccaggccggcttaggtcatgaggttggcctggcagggatgaaacggggccggatgaggactggattgcagcaggcagcccgtgaggctttatcgccgttttctgcggaacaaaggcccggctggccctgggagctgatgctgctgctctattgaaatctcgaggtggttctctattaatcactccccctggcgcctcagaggcccaaaaaggagtcaaacaaaacctcttttctaagcaggatgaggtttgcagaggcctgagcagaaagattcccctggcgcctctcaccagcttaacacacaagaaaagcctgcctgggtgcattgaggaggggaggttggaacgtgaccaattccactggggaccccaaagagctccgtgcagggagcagggtgggtgagcgagaggtctcgccttcctgcagcccctcccttgttttattttagaaactgcaaagacccgatcaaatgattttttttttagtagacattcactaggagcagggtagaaaaaaaacaaaacctccattttctttcctccttagacataaccttgaatcacaacttcttggtttctctttttttttaacctgatgttgctgttctgcattaaccaataactgatcctgcattattcattaacccataaatatgaagtgtggcctctctttttaaacagactaaaacaccaagcaatcttttcccctgataaggcctcacagcccctggggaccaggcctgctgctcctgggtgtgcgtttgtctgttactgagaaacagctccctaatttttttttttttttttgagacagagtctcactctgttgcccagactgaagagcacgatcactggcatgatcacagctcaaactcctaggttcaagcaattctcccacctcagcctcccaagtaactgggactacgggtgcatgccaccatgcccaactaattttcctttttttttttttcttgagatggagtcttgctctgttgcccaggctggagtgcaatggcgtgatctcagctcactgcaacctccgcctccagggttcaagtgattctcctgcctcagtctcctgggtagctgggattacaggcacgggccaccacacgcagctaattttttgtatttttagtagaaatggggtttcaccgtgttagtcaggctggtcttgaactcccgacctcaagtgattcccccaacctcagcctcccaaagtgttgggattataggcatgagccaccggacccagcctaaagtttttttgtttgtttgttttgttttgttttgttttgttaatagatagagacagtgtctcgctatgttgcccaagctgctctcaaactcttggcttcaagtaatcctcccacctcagcctcccaaagtactgtgattacaggcgtgagccaccacacccagctgcaaccaagttttctttcataacttacttgatgacactttgctgtctccttccctccctcctgctcattcctttcctcccttcctttacttctcattctgtgttcttctgcttttgtttcatttttggcttgaaacaacagatgtttgttctctcacggttctgcaggcctgaattctgaaatcacggtgttagcagggccacgattcccctcacggcccttgggaggaatctgtttcaggcctctgtcccagctcctggcagccatgggcgtttcttggcccacagatgcatcatttcttcaatccttggatccttccatcctttacctttacaaggccatcttctccctgtcttttcatgtcatcttccctatatgcgtatctgtttctatgtccaaatttcctttgtattttcatttatttacttatttttagagacgggatcactctgttgcccaggctggagggcagtggtgcaatcacagctcacagcagcctcaaactcctgggctcaagcaatcctcctacctcagcccccttagcagctgggactacaggtgtgcaccaccatgcctggctaatttttttttttatttttttgtagagatggtggtcttgctatgttgccccaggctggcctcaaactccctcgctcaagagatcctcccccctcagcctcccaaaagtgctggaattacaaggcgtgagccacagtgcccagcgagaaaaggatttatcatgcgagattggctcccatgatcatggaggtcgtgaagacctgcagtcggccatctgcaaggtggtggcccaggaaagcagtggtgcaaatcccagtctgagtcagaaggcctgagaaccaggagcaccaatgtccaagggccagcaaaggtggatgtctctgcccagagagtgccaagtttgctgttgctccacctgtttgctctatctgggccctcaaggaattgaacgatgcccatccacatccacactggtgaggacggatcttctttttttttttttttttttttgtttttgagactgagtctcactctgtcaccatgctgtagtgcagtggagccatctcggctcaccacaacctctgcgtcccgggatcaagcgattctcctgcctcagcctcccgagtagctgggactacaggcgtgtgccaccacacccagctaattttcaaattttcagtagagacggggttttaccatgttggccaggatggtctcgatctcttgacctcgtgatccgcccacctcggcctcccaaagtgctgggattacaggcgtgagccaccgcgcctgcagaggaggggtcttctttaatcagacctactgattcaaatgctaatcactcctgaaaacaccctcacagacacacccagaaataatgttttactagttacctgagtagcccttagctcagacaagttaatacatgaaattaaccatcacaggtgcatggatagtctagcccgccatgtgctgtgatcagatcacagagggaaatcttaccatggttgtcaaaaccacttctactattgtgagattttttttttaactaaaaaaaaaaaaaaaaaagacactctaattagagagatgattatagtaatgcctttacggtgctgcctaaggattagacctacaaaagtgaaaaatttacagtacacctgtgggtctacgctgttatttgtcaggaagaattcaaagaactctcagctgatctttctggtttgtttttgtttgttttagacagagtctcgctcttttgtccaggctggagtgtggcagcacgatcatagctcactgcaacctggaactcctggcctcaagcaatcctcccacctcagcttcccaagtagctcagaccacaggtgcataccaccatgctcggctaagttttttatttttttgtagagatggagtctcactatgtttcacaggctggtcccaaactcctggcctcaattgatcctccagccttggacttccaaaatgctgggattgcaggtgtgagccactgtacccagccctcagctgatttttttttaatgccagtaatgattggaaaatttcatattttgctttatggtttgcagcacaaatcaatgcacaggattttacaaaaaaaaaaaattcagatatgccgggcgcggtggctcacgcctgtaatcccagcactttgggaggccgaggcaggtggatcacctgaggtcgggagttcgagaccagtctgaccaacgtggagaaaccccatctctactaaaaatacaaaattagccaggcgtggtggcgcatgcctgtaatcccagctacttgggaggctgaggcaggagaatcgcttgaacccgggaagcggaggttgctgtgagctgagatcgcgccattgcactccagcctgggcgacaagagcaaaaccccgtctcaaaaaaaaaaaaattcagagatgtttctcttgctccatcctccacacaggcttttgttttccccagagtgaagaagacattagaaaaatgctaaacctttgcctaacttcaaagttcaacaaataagaatagtgaggcaaaggtttagcattcttctaatgtctccttcactctggggaaaacaaaagcctgtgttgaggatggagcaagagaaacatctctgagtttttttttttttctttttttcttttttttttgaggcggagttttgttcttgtcgcccagactggagtgcaagggtgcgatctcggctcaccgcaacctccgccttctgggttcaagccattctcccacctcagcctcccgagtagctgggattacaggcacccaccatcatgcccggctaatttggtatttttagtagagaggggtttctccatgttggtcaggctggtctcgaactcccaacctcaggtgatccgcctgcctcggcctcccaaagtgctgggattacaggcgtgagccatcgcacccggcctatgtgaatttttttttttttgtaagatcctgttcattgatttgtgctgcagaccataaagcaaaatatgaaactttccaatctttactggcatttttttacagatcagctgagggctgggtacagtggctcacacctgcaatcccagcactttgggaggctttgttctctttttccccttcggtattcctcccaaagcacaaatttgtagtgttttgcagagtacttgattaatgcatgtactatacagttatttaaaatgatgttggcccggtgcagtgactcacacctgtaatcccaacactttgcaggggggtgggggtgtggggcccaaggcaggaggatcatttgaggccaggagtttgaaacaagtctgggcaagatagcaaggccctgtccctacaaagaataaaaaaattaaccaggcatggtgatgcacacctgtgtcccaattcctcaggaggctgaggccagaggatcacttgagcccacaaaattgaggctgcaagtgagccatgatcctgccagacaaggtgacagagcgagcccttgtctattaaaaaaaaaaaattaattctgtcaactaagaatttttaagaacatggggaaataccacataaagtgaaagaaaaaaaaaggaagaaaagctgaaaatagccagctgtaaggttaggcataagatttgtttcttttatgtatatatttcctaattccctacaatgaatgcatgctgcagttctaattgagagaaatatcattttttaaacgagatgtaacagaaacgggaacaacgctctaatatccttttctcccagatgctacctttttctgacgattgacttttgtagtccatttaagttccttgtatgcaattcttgagatgctagcttgttgcttggtaacagtcatttctaatgaggcctttttctcactggtccccttcagcagggctgagctgcagagcaatctgctgtgaaatgatttcaggacagggccacagtgaaactacctggccttctcaattaccaagtggacattggtaccattggcaatttcccaaaacattacattgaacaaatgtactggaaagaataacaccttcaagattcatggttccctgtttttgcttcaacttgcaggtgtgcaaatctctccttctatctgtccctcgcatactgctggtccccagagttctgtctctgtcctgctgcagcacataccttttggttgcctacctatccgtcccttcccccttttcctatccagagaacccagattttgtccagatactcattttccatcagcttcaggggagatgaaccccagttcctaagagagaatcatggcagagccaagaaaagcaaggtgatcccagacacctctccaggaattgggtccaagcatggacacatgatgtcactgtggcaagtgagactaggggaaacatgctaggggagaggagcacctgaaaaaaagggtgtttgttcctaaaaagagatgaataaagcaaaaatggtatctggatcctgcattgtggatggaaggcctgcagtccctgcagccatcttgaaataatcagagccaacgtaccaggatagaggggatgaatggcagaaagaaatggaatccttggccgggcacagtggctcacgcctataaccccagcactttgggaggccgaggcaggcagatcatgaggtcaagagattgataccatcctggccaatatggtgaaaccctgtctctaccaaaaacacaaaaaattagctggatgtggtggcgtgcacctgtaatcccagctactcaggaggctgaggcaggaggatcgcttgaccctgggagacagaagttgcagtgagccgagatcacgccactgcactccagcctggcgacagagcaagactccgtctcaaaaaaaaaaaaagagagagagagaatttgggctcatgcttgtaatcccagcactttgagaggctgaggtgggtagattgcttgagcccaggagttcaagaccagcctgggcaacatggcaaaacccccatctctaccaaaaaaatccaaaaaaaattagccaggtgtggtggtgcacacctgtaataccagctacttgggaggcagaggtgggagcattgcttgagcccgggaggtagaggttgcagtgagcctcaatctctcaggctcaagcaatcctcctaactcagcctccctgagtagctgaggctacaggtgggtgccaccaagcccggctaatttttttcatttttttaagagatggggtcccactatgttgcccagtttggtctcaaactcctgggctcaagtgatcctcttgcctcggtctcccaaagttttgagattacaggcatgagccaccatgcccagccattaaacaagttattaaaaacattaatctcaaaggaaaatagtgatatatttgactgaattaaaattaagaagatgttcatcaatgtacagccacaaaaagaaaatgaaaatcaaaagaccagtcaccgagagtagtaggagatacctgcaacacatatagccaaccaggaccagtaattttcctactgttcaaagaacttcaaaccaataaggacaaaacagatgaccctattagaaaatgggcaaaagactggaataggcacttcacaaaatagaaatatcatttcttaaatgagatgtaacagaaacgggaacagtgctctaatattccttttctcccatatgctttcttgatgattgacttttgtagtccattgaagttccttgtattcacaaaggggggcagtccaaatggccaataaacatttgaaaaggcactcaatctcattagacgtcattcaagtgcctattaaaacagtagtgagatacatttatactctttaggctggcagaaattttaaagccaagtgataacaaagatgtaaagcaatgggaactcttagacactacaggtgggagtgtagattggtgcaatcgctttggaaaatagtttggcattacctaaaacatttgaactttgcatatcctatgactcagcaaatctgcttctagactcaaaacctagaacaatcattctcaaaccttagcctgcatcagaatctcatggaagactttaagctcccctcccagagtttgaatcagtggatcaggggtgggacctgagaatgtgtatttctgacaagttcctaggtgatgctgatgctgctggtgtgaggatcacactttgagaaacatgcacaccacccagatatacacacaagacctgctaatggagtaacaactgaaaatgtccaacaccagttgaatgaataaagtatggcagtggtccccaacctttttggtaccagggaccagtttcatggaagacaatttttccacagaccagagtgggggggatggttttgggatgattcaagcacattccatttattgtgcaccttacttctattattattacactgtaatatagaatgaaataattatacaactcatcataatgcagaatcagtaggcacttgttttcctgcaacgagacagtcccatctgggggtgatgggagatcatcaggcattagattctcatgaggagttgtgcaacctggatctctcgaatgtgcagtttgcaatagggttcaccctcctatgagaatctgatactgccgctgatctgacaggaggcggagctcaggtagtaatgtgagtgagggggagcagctgtaaatacagatgaagcttcacttgctagtctgcctcttacctcctgctgtgtggcctgattcccggtccggggcgtggggattggggacccttgaagaatgggatatttctgtaatggagtactgcaaagcattggaaatgaatggactgtagctaggatcaaaatatagatgcatctccaaacaattcccaaagcccaaagataaaagaccatacacaataggaacccaatcataaaaacaaaaagagctggctgggggcagtagctcacgcctgtaatcccagcactttgggaggccgaggcgggtggatcacgaggtcaggagttcgagatcagccctgaccaacatggtgaaaccctgtctctactaaaaatacaaaaattagctgggcgtggtggcacgtgcctgtaatcccagctactcaggaggctgaggcaggagaatcacttgaacctgaaagacggaggttgcagtgagccaagattgtgccactgcactccagcctgggcaacagagtgagaacatgtctcaaaataataataaataaaaataaaaagagctcaaatcaaaccacattatttagggttgcatgcgtgtgtgctaaaagtctaaggaaaggcaaggaaacgataatcaaagtcattggcatagcattttcctctcagggaaaagggagagaacacatgccagttattaagttgtgacccttttgggaataggctttgtgatgttggggctgggatcttcagcacccttttccctttacccagcaggctccttctcaggctcttgccataggtggcgccagagaaagacttcaaggctggaacaggaaggaagaatttcctccttcctgtttctcccctttgggtctccacctgtttcctgcccctttttaaggttcccagcaaaacttcttcacccttgcaccatcatttcctttggcagcagcagctaaatcctgcctgccatttttccaacacttcacaaaaatagcctcattgtgacccttcaccatcaccagcacctgccagcccactcttcagaaatcagagtttcagcttccctaagttcctaaatttcaataattccaacctcttcacatggtgccttccctccactcatccctaccaggtaatagctacttcatccagttgctacctccaagatacatttagaattctgtttttactgtgtcagttacagaggtcacaattttatacctagctaatggttctttagatcaagttctttctgttaaaataacttggtggctcttgagttcatgcttgttgcttcatagtcacctccagcattaagccgacatcccatgcagtaagagagggaaatggtgtttgagagccacatatgcccctttcaaagagctttccgctgggatgaccagttgtccctgattgtgcaggactgaagagttccccaggatgcaggacttttgtggctgaaaccaagaaagtctgggcaaacagggatgagttggtcaccctaaactctgtgacttctgcttaaacacattgactgtagctatttctatggtcactttgctcacctctggcttcaaggaaggctgggatacgtagatgtaggtttttagcagggctcattatcaccccagtcaaaaacagagtcctgttaattagaaggaagggcagaatggatattggaaaggcagctggtggtcctgccctttaactccagatagcaatcattaaccaccccgcaacattgcctgagatcacatggctatcattagagatgtgacaagaagccaggtcttctgctggtggcccccataggatacactgcctgtttctctctttcaaactcatttctggcacccaagaaataaaaccatttccatatgttagcattttcaatcttcaatgactaattatattccaaaggtgagaggtttatgcaggaaaccttcccaccatgtcttggccagttactgggtgaaaatggtcaccaaatagaaccatggctattttacatatgcactatttttatttctgtgtttgcagtcatgtttggctctttcttagtgggaattttggttgtaagattttagttttgggccgggggcggtggcttgcgcctgtaatcccagcattttgggaggccggggtgggtagattgcttgagctcaggagtttgagaccagcctgggcaacatggcaaaactctgcctctaaaaccaatacaaaaattggcagagcatggtggaatgtgcctgtagtcccacttgcttgagcccaggaggcaaaggttgcggtgagccgagatcgtgtcactgaactccatcctgggtaacagagtgagactctgtctcacacacacacacacacacacacacacacacacacacacacacacactttagcgcagattttagttttggctgggcatggtggctcacacctgtaatcccatcattttgagaggccacggtgggcagatcacttgagctcaggagtttgagaccagcctggacaacgtagcaagaccccatctcaatttaaaaaacaaaacaagaccagcctggaaaacatagcaagaccccattgcaatttttaaaaattgttttagttttgtgatgggttcaagaatcctgtgtcctgtactctttttttatttggtgtttatctggtttttttttctcaagcattaagtattgttttatcctagatgtctttattctaggttccctttggtacctgcatttactcttattgacttggtaagaaaatgcttgtttgggaggattccaaatctgttaaatccatatgctggctcactttcatttcaacagccaggtgcttcggcagtatggcattaatatacataaaaagagggaggcaaacttatgtctcacagattgaatcttttttactaactttggaagactctcttggccagcttggtttgttcctttgaatcatgaatacgataaactgcagagggaaaaatatgatcaataggtatcagccaagggctgctcggccttgtagatttcacgtatattttgtgacctccccataacacatcatcattggaggctgcatatctgcaaggtacacacaaaataggctgcatctcatctgctttcagtcaccacagcaccgtgtatgtttagtacagccacaatttttataaacggccgaacaacgggctggaagccagggcttctcaaattccatttccttctctaggatacgaatttcctcatagatgttggaagctacgtttcctctttcctttcctctcacttcaaaacagtgaacatgtgaatatatatatttagagtagcatgagaaacaagcagttcctacatcttgcatgtaattcactaatgtccaatttcattgtctctccttgtctccatgtaattccttctttcctgttcagagctctgaagatttgtaattaaactcccacacttggttttttttttacttcagctttgattataattttaggttgagccatatgaaagtaatgacaattaaccacatgtgaccttttttttttttttttttttttttgagatggagtctcgctctgttgcccaggctggagtgcagtggttccatctcggcccactgcaacctccacctcccagttcaagcgattctcctgcctcagcctaccgagtagctgggattacaggtgcccgccaccatacccggctaattttttttgtaattttagtagagacaaggtttcaccacgttggcctgtctggtctccatctcctgacttcaggtgatccactcgcctcaacctcccaaagtgctgagattacaggtgtgagccaccatgcccggccctcacatttgaccatatttgaatggcagttgtatctggttcaacctaattataagctgcatacattgagactgtgcttatattcacagcactgcaccaagtttttacacatataactcccagttagactgcagattcacataaagtggggaaactgaggcacgcgtggagatgaagtgacttgaccagggtttgcagttagtaagtgttggagctacagttaaaactcaggggtctggccgggcgcggtggctcacacctgtatcccagcactttgggaggccaaggcaggcgaatcacttgaggtcaggggtatgagaacagtctggccaacatggcaaaaccccatctctactaaaaatacaaaaattagctgggaggggtggcatgcacctgtaatcccagctactcaggaggctgaggcacaagagtcatttgaacccgggaggcagaggttgcagtgagccgagatcacaccactgcacttcagcctgggcaacagagtgagactctgtctccaaaaacaaaacaaaacaaaagagacggagctctccctatgttgcccaggctgatcttgaactcctggcctcaagcaatcctatggcttcggccgcccaaagtgctgggattacaggtgtgagccaccatgcgtggaaactggtttctttggagaagggtctgacttccttatcactgttctcacacctctcaaacacgtggctatttgtcacttcagggtaagaggatgtgacaaacggcaggaccttacgatctacattaaaaagctgcttaccatgaatccacttaaaatggaaaccaaaacgttttaattctgtgaaattttgtgagatttgtgggggaaaaaaaaaacatatgaatcagactttacctagaaagatgattccaataagttggtttaacttatgcttcactgaatttagttcctacaaaatttttgctaacttttaacagctgagacaacatgcgcatatcatgtaaatcacccattttaaatatacaatgcattggcttttggtatattcacagatctgcgcatccatcaacacagtttattttagaacattttcttttttgttgttgttgagacagagtctcactctgtcgcccaagctggagtgcggcggtatgatcatggctcactgcaacctccgcctcctgggctgaagcgatcctcctgcttcagcgtcccaagtaaataggactacaggtgagcaccaccaggctcggctaatttttctagagatgagggtctcgccatgtcacccgggctggtctcgaactcctcgactcaagcaatctgcccgcctcagccccgtaaagtgctggattacaggcgtgagccaccatgcctagccttacaacgttttcattataccaaaaggaaattcctcgctctttagttatcaccttcgtctcccacatccccatcccagccagccctaagaaaccactaatctgctgtctctatggatttgcctgttctggacatttcacataaatggaaccacacactaggtggtcctttgtgattggcttacttcacttagcataatattttcaaggttcattcatactgtagcatgcatcagaacttcaatcctgttaattgccaaataatatgccactgtagccaggtgcagtggctcacgcctgtaatcccagcactttgggaggccgaggcgggtggatcccttaaggttagcagttcgagaccagcctggccaacatggtgaaactttgtctctactaaaaatacaaaaattggccaagtgtggaggtgggtgcctgtaatcccagctacttgggaggctgaggcaggagaatctcttgaatccaggaggcaggggttgcagtgagccaagatcgtgccactgcactccagcctgggtgacagagcaagactccatctcaaaaaataaataaaatacaataaataaaattgccttctttgacgtggaatcggaagcccgactttttaggttctttcatcagatcccaaagaaaccaactgccatttccactgctgaagtctctcaacaaacatcactgtgcattggtctggtcaccaatgggggtgtctttcccatgagttcctcccacatcctcaataaagaagcaggaataatgattcaaatttttcttttggccaggcacggtggctcatccctgtaatcccagcactttggcaggttcagaggggaaaattgcttgagccaaggagttcaagaccagcatgggcaacatagcaagaccctgcctctattattaaaaattaaattaggtcaggtgaggtggctcatgcctgtaatcccagcactctgggaggccaagtcaggtggatcacaaagtcaggagtttgagaccagcctggccaacatagtgaaaccccgtctgtagtaaaaatacaaaaattagccgggcgtggtggtgcgtgcctgtaatcccagctactcgaaaggctgatgcaggagaatcacttgaacctgggaggtggaagttgcggtgagccgagatcgctccactgtactccagcctaggcaacagagcgagacttctacctcaaaaaaaaaattaattaattaactaattaaaattaaaaaaggaaaaacaaatttttatttggtctctgccaggaaaaaaaagtagcttccacttagcaatcagcttgtttttatcttacggagagttaacctcataagtgagcatgtatccttccttgtttgggctgctagttagctcagaaccaaaactggaatccgtctctcccaactacattaaactttacggtttgtattttgtgtactcactatatgcatggcttagtcttacgtttttgatcagtatttctctgtttttctgttttctcatttactgatctacttttatattgttgtatgtatatatctgagtaagcagtcagaaatccattttttaaaatttgagttcagatgaacttaaccaccatgatgcaatcagcaaaagtcagactgtgggaaactctaatgagcaaatgacccagtttcttgaaaggggaagaaaaggaaatggacagggaagcctagactaaaagcaattacaagaaccctcatacattgttcttgggaatgtcaaattccacagccgcttgggaaagcagtctggtaatttcttcaaaaggtaaacatatacttagtatgtaacccagcaattccatccctaggaatctaactggagagaaatgaaaacacacgtcaaagactagtctatgaatgttcatagcaactgcattattcatagggccaaaaactggaagcaatccatgtgtccatcgagtcgtggatttattcttttttttttattttttactatttaaaaaaaaattttttttgagacagattctcactctgttgcccaggctggagtgcaatggcatgatctcagctcactgcaacctccgcgtcccaggttcaagcaattctcctgcctcagcctcctgagtagctgggattacaggcatgtgctactacacccagctaatttttgtatttttagtagagatggggtttcaccatgttggtcaggctagtcctgaactcctgacctcaagcaatccacctatctcggcctcctgaagtgctgtgattacaggcatgagacacctgaagtgctgggattacaggcatgagcctggcccatttctacttttctaccaatttaccaaaatttctaccaattctaccaaaatttgctgggcgtgacggtgggcgcctgtaatctcagctactcgggaggctggagaatggcttgaacctggaagatggcggttgcagtgagctgagatccagccattgcactctaccctggggacagagtgagattccatctcaaaaaaaaaaagtagaaatagtcaaggagaaagcagatgctggagtgaggattgacttcaattgaagaaaatttttaggatgatggaggtatcctttttttctttccttttttctttttttttttttttttttttttggtgagacagggtctccacccaggctagagtgcagtggtgcgatcataactcactgcagccttgaactccagggctccactgatcctcccacctcagcctcccaagtagctgggactacaggcacacaccaccagacccaactaatttttttaaattttatttatttatttattttgagctggagtctcactctgttccccaggctggagtgcagtggcacaatcctggctcactgcagcctccgcctcccaggttcaagccattctcctgcctcagcctccccaggagctgagattataggcacttgatatcaccccctgccgatttttgtatttttagtagaaacagggtttcaccatgttggccaggaaggtctcgaactcctaacttcaggtgatccgccccctacactagcctctcaaagttctgggattataggcataagccaccacacccagcttaatttttttattttttgtagagaggcagaggttgcagtgagcagagattgcaccactgcactccagcctgggcaacagagtaagactctgtctcaaaaagaaaaaaaaaaaaaaaaaagttttaaaagacaaactgccagacatggtggctcacacctataatctcaccatttggggaggccaaggaaggattgattgcttgaggccagaggttcgagaccagcctgggcaacatagggagacgccctatctctacaaaaaatacaaaaattaggccaggcacggtggcttacgcctgttaatcccagcactttgggaaggccgaggcaggcaggtcacctgaggtcaggagttcaagaccagcctggccaacatggcaaaacctcgtctctactaaaaatacaaaaattagccgggcatggtggtgcatgcctataattccagctactagggaggctgaggcaggagaatcacttgaactcagcaggcagaggttgcagtgagccgagttcgtgccactgcactccagcctgggcaacagagtgaaacgccgtctcaaaaaacgaaacaaaacaaaacaaattagcgggcctggtggcacgtgcctgtagtcaggaggaccactagcacccaggagttcaaggctgcagtgagctatgatcgcagcactgtgctccagcctgggtgagagagtgggaccccatctctaaaataaataaataaagataaactaaagagtcttttaaaaaacaaaaatgaagctcgggagcacaggtcactgacgacatctggctggaatgaggcagtgaacatctagttttcgcctgctcagcattcattgccccttctgctaacaggagtcaggctttgctttaaggagcggccagcccttctcatgcagccttccagagtctgcccctcaaggtaatagacactggtccacccttagcccaggcctgggcacagaacctctgctaagccgatcgctgcttggggtccctcggggattccagattccagtctcgtatagaatgatgcaagaagggaagagctcagagcggattgatccccgtggggcatcctgagacaccagcgttgggtttttgttgctgaatcccacagcagccctgactcctgtcttttctgaagcctgaatcttggcattcttctgttatgtgaactacaggctaatacattccctttttgtttaagttggctggggttggtttctgtggctcaaaaccacagcaccccatggcagagcctctgcggatcgtcagctattctttgtgtttcttttcctggcctgtcttgggctgatacagctacactcccagaaccccttggacattaagacttacacaagccatgagcagggcatggtggagtgagcctgtggtcccagctactcaggaggctgagatgggaggatcatttgggcccaggaggtggaggctgcagtgagttatcattgcaccactgcactacaacctgggcgacagagcaagaccctgtctcaaaaaaaaaaaaaaaatttcagctgggcgtagtggctcacgcctataatcccagcattttgggaggccaaggtgggtggatgggtggattatttgtggtcaggagttcaagaccagcctggctaacacggggaaactccgtctctactaaaaatacaaaaattaggccaggtggggtggcgcacgcctgtaattccagcattttgggaggctgaggcaggcggatgacaaggtcaagagttcaagaccagcctgaccaacatggtgaaacccccgtctctactaaaaatacaaaaattagctggacgtggtggtgcatgcctgtagtacatctacttgggaggctgaggcaggagaatcgcttgaacccggaaggcggaggttgcagtgagccaagatcgcgccactgcactccagcctgggtgacagagtgagactccatctcaaaatatatatatagatatatagatatatatctatatatatattggccgagtgtggaggcgggtgcctctaatctcagctgcttgggaggctgaggcaggagaatcgcttgaacctgggagcgggaggttgcagtgagccgagatctcgccactgcactccagcttgtgtgacagaccaagactctgtctggaaaaaaacaaaaaaaaattccatgggaaccagtagcagggtaggaaaacgtaagcagtaacgaatgaattcctggaggctccggatggacaagtctgagtgttaaaatctccaaggggacccagccctagagggctctcatacttttgtgtttttctcttgaagccctaccagattttcacagtaaagatcagagaaaaacaaagccaaaccctcatgcttcagcagagggaagcggaacacagacattttgaaatacaccagagcgctctgctattctttccaaggcctgccctcaaggaaaactatcttaccagagctggctggatggactgggggcgtaccagagactaaccaattattaatcttgaatatgccttattgtcctcatttataaaaccggggtaatagctataacctcataacggtgttgtgaggatgaaatgatgaatgcttgcaaaatgctctgagccgtgccttggtacacagcacctgcttgatatacgcgtgtctgccatcatcattattatcatcatcccctgcccccagacagggcagagatgtggacatcggagcaactctggatcccgatggacgtccagtcctcaaactcagtccagtcctagggttcccagttgagcagcttttgggagcttctgtgaatctggtgtttgggctacgatgattcttgcttttcttgtctccaaatccattcttgccaaataagctgcatgtcttgaggtaacatgagtgagtttctaagtgtctcacaccctcactgacattctctctctctctctccctcccccccgcccctctctcccctctctctgatacagcatttgtctctgtcatccaggctggagtgtactggtgctgtcacaactcatggcagcctcgactgcctgggctcaactgatcctcctgccttagcctccagagtacctgggcccacaggcacacaccaccacacctggccaatttttaaaattatttgtagagacgagatctccttatgttgcccacgatggtctcaaactcctgggttcaaacaatccccctgccacagcctcccaaagtgctgggattacaagcatgagccactgcacccagccaacatcatccattttagtcctcattttatagtaagggaaactgaagcccagagaggccaataacttgtctgaggtcacacagcttgttaatcatgaagctgcctccaaaatttacacccctcccatggcaccatcatgctgctttgatttaagatagtgatgcaagcatctcagtctgctttgcttaacttctccatccaggttagggatggactgactcaaattgcttccattgttatcactagtattttgtatggctgttgaataaatgtatggaacatcaactgccctcattaactcccctgctggtatccacacccctgtgtagtcccctcccatactgaattaggctgacttgtgtaaacactaggcagaactagacttccggggccagatcataaaagaccctgtggcttctctttgctctttcacgaagtccttgctgcaagggaagccatgttgtgaggatgctcaagcagcccagtggacaggtcacatgacctcccgccaataacagcaccaacttcccaggtgtataaggggccgcctcagaagtggagcctccaggctcaggtaaatttcagctccagctaacatcttgatgcaaccttacaagagacccctgagccagacccacccagctgagttattcccaaattttttcttctgagccacagaaactgtgagatgataaatgtttaccatttaaagccactaggtgaggagtcgtttgccatgaagcaataaatgagtaacatacaacacttctatcttttttccaagtcccaacgccagtatatttcatcgggaatatttttccccatgctttggtttgaacatgtttcctgtggtgtcagagtcagatgtatattttcctgaattggtgtttaagaaatatgtatgagttctaaatgacagggtggctgtgaaagaaaagcaagttcgcctgttggaagcaagctgaggaaacagggttcatctctcttagatttttaggctatggtttcgaatgggtaaggaagtgtttccacaggagataattctgtgccttacacacaggcacacacatgcctgcacatacacacatacacgtgtgcacacatgcatgcacacacacacacgcacacatgcacacacacacacttttggtctccttgcttttgcaatgatagcaaagtgcagtacttttcaggaatggtcagagttttcatcactgtgtgatgagaaattctagagactcagtgaacaggcagaaagcaagactggggacacaggaaggatcctcggaggatacagaagccgtaggaggtgacattcagtggacaggaaaaggaagaggatgagaagacagaagaatggtccaagttccccgatcattcgccaaatagctactgagctccaggtcttcaaagatttcagattctgagacttctgctttgcttcatcagcctgctttcagactcagccagcgctggggttcagggaattccataaagaccctttcttgtgatggggctgtattctgctgccttgcatatgtccacctgggagcaatggtcaaaccaaggaccctttgggcttaaggcagaagaatgaccccatcattgcttcttcgtgggtcttgtacagctactgtgtgcccagcacatggtgcatggtgtgattcctagattttggaagaaaaaggaaagacaaggtggaggaatagcccagctatacctcattttctagagcagcaccgtccaacagaactttctgcagtgatggaagtgttcttcctctgcactgatcaatacggtagccattagccacctgagcctagaggctctgcttccaaggtggccccttatacacctggtgctgttattggcaggaggtcatgtggcctctctactgagctgcttaagcatcctcacagcgtggcttcccttgcaactaggactccatgagagagcaaagagaagccacaagggtctactaagcacttgaaatgtggtgcctgccagggaggggcggaatgtttaactttatctagttttaattagagtataagtttaggtagtcgtatatggctactggcttctgaattgcatggcatagctcttaggccttgctttgggtttataaacacagtctctctaaagatttataacaacttttgacagggcacggtggctcacgcctgtaatcccagcactttgggaggtcaaggcgggtggatcacctgaagtcaggagttcgagaccagcctggccaacatggtgaaaccccgtctctactaaaaatacaaaaattagccaggcatggtggcgggcgcctgtaatcccagctactcgagaagctgaggcaggagaatcacttgaacccaggaggtggaggttgcagtgagccaagatcccaccactgcactccagcctgggcagcagagcaagactgcgtctcaaacaacaacaacaacaataacaaacaacaacaacaagcttttaaattggccaggcactgcgattcactgagtgtaatctcagtactttgggatgccgaggtgagaggattgcttgagcccaggagttcaagaccagcctagacaacatagtgagaccctgtctctacaaaaaacaaatgtttttaaaactagctgcagctgggtgcggtggctcaagcctgtaatcccagaactttggaaggccaaggcgggcagattatttgaggccaggagtttgagaccagcctggccaacatgttgaaaccccgtctctactaaaaatacaaaaattagctgggcatgatggtgagtggctgtaataccagctacgtgggaggctgaggcgggagaattgcttgaacctgggaggcagaggttgcagtaaggtgagatcactcagactccatctcggaaaaaaaaaagaaaaagaaagtagctgggcatggtggcatgtgcctgtggtctcagctactcaggagactgaggtgggaggattgcttgggcctgggaggtcgaagctccagtgagctatgatcatgctactgcactccagcctgggtgacagagtgagaacctgtctcaagaaaaaggaaagtggctgggcgtggtggctcacacctgtaatcccagcactttgggaggccgaggcaggcggatcacgaggtcaggagatcgagaccatcctggctaacacggtgaaaccccgtctctactaaaaatacaaaaaagtagctggacgaggtggcgggcgcctgtagtcccagctactggggaggctgaggcaggagaatggcgtgaaccctggggggcggagcctgcagtgagctgagatcgcgccactgcactccagcctgggtgacagcgagactttgtctcagaagaaaaaaaaaaaagaaaagaaaaagaataaatccactattacatttttgtacaagtttttgtgtcaacatgaagttttcagttcacttgggtaaacagctaggaatgagattgggggatcctgtggtaagtgtagcttaacattataagaaactgccaagctgtttttcaaagctgctgtaacatttttttttaatctttcgaaaaatatttatttatttattttcaggcagggtcttgctgtgttccccaggcgggcgtacagtggcaagatatagctcattacagcttctacctcctgggctcaaggggtcctcctgcctcggtctcccacattgctgggactacaggcatgttccaccacattctgataatttttcattttttgtagggatgggggtctcactgtgtagcccaggctggtgtcaaactcctggcctcaagcaatcctcctgcctcagcctcccaaagtgctgggatgacaggcacaagcccccacacccttctagctgtaccattttgcatgccattggcaacataagagagttccagttgctccacattctcaccaacagttgctattgtcagttttgttttctaaggaatgtgaataggtgtgtagtgatagctcgttgtggttttaagttgctccctaataataacattgatcatcttttcatatgcttgcttgtcacccatactttttttttttttttttttttttgagacagagtcttgttctgttgcccaggctggagtgcagtggcacgatctcggctcaccacaacctccgcctcccgggttccagcgattctcctgcctcagcctcctgagtagctgggactacaggggcctgccaccatgcccagctaatttgtgtgtgtgtgtgtgtatttttagtagagatggggtttcaccatgtcggctaggctggtgtcaaactcccgatctcaggtgatccgcccatctcagcctcccagaatgcaggcatgagccaccgtgcctggtcccatataccttctttggagaagtatctgttcacatcttttgcctaatttttaaattaattaatgtatttttagaggcagggtctcgctcttattgctcaggctggagtacagtggcacaatcatggctcactgaagcctcgacctcccaggctcaagcaatccccccgcctcagtcccctgaggagctgggactacaggcatgcgccaccacacccagctaatttttgtattgttgtagagatggggtttcactatgttggccaggctggatttgccaattttttaatggactgtttctctagatattttattgcctctttaacaataaaattaaataaactccctctttcacacagccttaacttcgtgtagtggtcttgtggatggcttactgccttggagttaatttcgttccttctcgtttctgctaccagcttcacaggcttctgctaaggtaagagcctgggtatggtggagcctgaaaaggttaactcactcttcctttgcaagtttttttttttttaatggagtcttactctgtcacccaggctgaagtgcaatggcacaatctcagttcactgcaacctccacttcctgggttcaagtgattctccagccttgcctcctgagtagctgggattacaggcgcatgccaccacgcctgactaattttgtattttagtagagatggggtctcaccatgttggctaggctggtctcaaacttctgacctcaggtaatccaccctcctcagcctcccaaagtgctgggattacaggcgtgagccaccacgccaggctgcaacctttttacttttctttttttgttttgtttttgttttgagacagaatctcattctgtcacccaggctggagtgcagtggtgtgatcatagctcactgcagccttgacctcccaggctcagcctcttgagtagctaggactacaggtgtgcaccaccatgcttggccaatttttgtatttttttgtagagatgggggggtctcgctatgttgcccaggctggtctccaactcacggactcaaacaatcctcctgcctcagcctcccaaagtactggtgtgagccacctggccagctatgcttctttttttgagcacatgctttgtgagacagctttcacatgccctctggacctggagagagtgagagaagaattcagtttctaacatcttggttggtcaatgcctttttactggtcctttttaaaccttccctgtggaagctaccaatatatccaatgactgactgcgtaaggaaaaaggaatggcaaatgattaaacccatgcctggacttgccaaggtcacagggagttggcctcgtgaactccttgcagtattattgtacagtgttttgctccttggggaaaacatcatctaggtttgtcagtttgtgcacaattctttctttcttcctttctttttttgagacggagtcttgctctgtcgccaggctggagtgcagtggcgcgatctcacctcactgcaacctctgcctccccggttcaagcgattctcctgcctcagcctcccaagtagctaggactacaggtgcacggcaccatgcctggctaatttttttgtattttagtagagacagggtttcaccatgttggtcaggctggtcttgatctcctgacctcgtgatctgtcccccctcaccctcccaaagtgctgggattacaggcctgagccaccatgcccagcctctttcttttcttttcttttttcttttttttttttgagacagggtctcattctgtcccccaggccggagtgcagtggtatggcgatcttgctcaccgcagcctcgacctccggagctcaagtgatcctccagcctctgtcccgtaagtagctgggattacagccatgcgccaccacacctggctaattttttgtattttttgtagagacagggtttcactgtgttgctcaggctggtgtcaaactcccgacttcaaatgatctatccacctcggcctcccaaagtgctgggattacaggcatgggccgcctcgcctagtctacaattttttttttttttgagatggagtctggctgtgtcgcctaggctggagtgcagtggcgcaatctcagctcactacaacctctgcttcctaggttcaagtgattctcctgcctcagcctcctgagtagctgagattacaggtgccaaccaccatgcccgactaatttttatattttagtagagacgcggtttcaccatgttggccaggctggtctcaaatttctgacctcaggtgatcctcccgcctcagcctctcaaagtgctgggattacaggcgtgagccaccacgcccagcctacaattatttacatttaatattgttaggcctatggtgcctggaagtacatacatgcctcttgtcattaaataaatctgtcattaagaagtcagaagtcatctcaaggagtccaaaggaagagaccgtatgaggaggttgtatgtaaatctctctctttacaattgtggtaaaatacacataacataacatttaacgtcttaaccgtatttttttttttttgagaccgagtctcactctgtctccaaggccggagtgcagtggcgcaatcttggcttactaaaacctctgcttcctgggttcaagtgattctcctgcctcagcctcctgagtagctgagattacaggcgcacaccaccacgcccagctaatttttgtattttagtagggatggggtttcaccatgttggtcaggctagtctcaaactcttgagctcaagtgatctgcctgcctcggcctctcaaagtgctgggattacaggcatgcgccaccgcgcccggccgtcggaaccattttcaagtgcacagatcagtggcatgaagcacattcccagtgctgtgcaatcaacaccatcagccacctccacaatgttctcatcttgcccaacagaaactctgtccttattccacagtaactcccggtctcccctctcccagtcctcggcacccagcattctaccctctgtctctatgaatcttactgaccaagggaccccatagaagtggaatcacatcacatttgtctttctgtgaccagcttatttcactgagcataatgtcctcaaagctcatcacttcacatgtcacgtatgtcagagtttccttccttttcaagtctgaatcataccccactgtatgtggtaccacaggggtaaacgcacacttggattgcttccaccttctggatctcgtgaataaataacgctgctgtgaacatagcatgcaagtatctcttcaagaccctgcttgcaattctttgggggtataaacccagaagtggaagtctgcattgcatcttatgggaactctagtttgtttatttatttatttattcgtttatttattgagacagagcttcgctctgtcacccagactggagcgcaatggcatgatctcagatcactgcaacctctgccttccaggttcaagcaatcctcatgccttagcctcccgagcggctgggacaggtgcccaccaccacgcctggctcatttttttgtatttttggtagtgacagggtttcaccgtgttggccaggctggtctgaaactcctaacctcaggtgatcacccatctgagcctctcaaagtgctgggattacaggtgagagccactgggcccggcctcgttttaactttttgaggaccctgcatgctgtttcccacagaggctgccctgtgttccattcccaccaacagtgtgtgtaaatgcctttgcaggaaatcagtatctcctgcatccctctgcttctctgcacctctctcctttcacctctctcgctggtctccagcttcctgagcaacctccgccatcactctgacctatttccagttcaggatccccatggccgctagagtgattgcatttcagatactgcatgtcggtgtgcctgctgtcttgcacgtaaagcccctcagtggcttcccattgctctaggatcagccccagatcctataggacccacctcagcccttcttccctcctggttcagctgaacatggccactcggttccacacacagtgaccacctgcctacccctccacggcccatacttccttctgtatcacacagagttccctggcaggggcactaccctcacagtctcacaccacttccctaatcaggcatcccttagacctcaaggaggagccccctgactctgtttaccatcccccccacctcaatcaagcaggtactcaagttactgctcctgctaaaaatgcgttccttggccggtcacggtggctgacgcctgtaaccccagcactttgggagtccgaggcaggtggatcatgaggtcaagagatcgagacaaccctggccaacctggtgaaaccccatctctactaaaaatacaaaaattacctgggcatggtggcacacacctgtagtaccagttacttgggaggctgaggcaggaggattgcttgaaccctggaggcagaggttgcagtgagccgagatcgcaccactgcactctagcttggcaacagagcgagactctgtctcaaaaaaaaaaaaaaaaaaaaaaaaaaaaagctttccttgcctcccaaacacttatctctgcatgcacatattcaaggctgagagatgagattaatacctatttcagccccagactggagcgtgggtgtgcaggtcagggaagctcctgccttagacaggcccagtctctcgtttacacttgcacgtcaccatgcaccagtccctcaccggatgtatcacagctgtgacttgattttactttttctaggatgtgtctttgatttatgtctgcatctccccctcaactataagctccaccagggagggaactgtgtctcctttcccacccttaataattcgtaaatgagggaaatgtggaaactgcaccgcctttttaggggaacctgaactggcaatggaggaccaggctactgaagtccgaaagggatcccaatgatgcccacgtttgccactccctgttttcagctaagatttctctctggggcattctctcagatctgtcttagctggatctagcatattgaatgagtgaagggctccagaaagaaagagagataggctgggcgtggtggctcacgcctgtaacccagcatttggggaggctgaggtggcagactgcttgagccccaaagttgaacaccaacttgggcaatataatgagaccctgtctctataaaaaaattgaaaaaggccaggtgaggcggctcccgcctgcagccccagcactttaggaggtcgaggcaggtggatcacctgaggtcaggagtttgagaccagcttcaccaacatggttgaaaccccgtctctactaaaaatacaaaaattagctgggtgtggtggcagatgcctgtaatcccagcgacttgggaggctgaggcaggagaatcggttgcagtgagccgagactgcaccattacactccagcctgggtgacagattaagactctgccttaaaaaaaaaaaaaattaaaaattagtcgggcatggtggctcatagtcccagctacttgggagggtgaggtgggaaaatcacctgagccctgaaggttgaggctgcagtgagctatgattgtaccactgcactccagcctgggtgacagagtgagaccctgtctcaaaagaaaaagacaagaaagagagagaaggaaggaagggagggagggagggaaagaaaggaaggaaggaaggaaggaaggaaggaaggaaggaaggaaggaaggaaggaaggcaggcaggcggccgggcacggtggctcccgcctgtaatcccaggactttgggaggctgaggcgggcagatcacctgaggtcgggttttcaggactagtctgaccaacacggagaaaccccatctctactaaaaaaatacaaaatgagccgggcctggtggtacatgactgtaatcccagctacttgggaggctgaggcaggagaattgcttgaatccagggggtggaggttgcgttgagtcgagattgcgccattgcactacagcctgggcaacaagagcgaaactccgtctcaaaaaaaaaaaaaaagaaggaaggaaggaagggaagaaagaaaggaaggaaggaaggaaaggaggaaggaaggaaggaaggaaaggaaggaaggaaatggagggaggaagggagggagggaaggaaggaaaggaaggaaggaaggaaaggaaaggaaggaagggaaggaaaggaaggaagggaagggaaggaaggagaggaagggaagggagggaggaagggaaggaaggaaggaaagaagggagggagggaaggaaggaaggaaaggaaggaaggaaaggaaaggaaggaaggaaagggagggaggaaggaagagagggagggaaggaaggaaggaaaggaaggaagggaagggaaagaaggagaggaagggaagggagggaggaagggaaggaaggaaggaaggaaagaagggagggaaggaaggaatgaagggaagggaaggaatgaagggaaggaagggaaggaaggaaggaaggaaagaaggaaggaaggatggatcagggattcagggatggatctcaagtggtcttcagttacagtagagtatgatgacctttaatctgagggcttaagaatgatcaggcctggcactgtggctcacacgggtaatcccagtgctttgggaggtcgagatagatagatcacttgagaccaggagtttgagaccagcctggccaacatagcaagaccctgtctctataagaagtaaaaaaattagctgggcgtggtggcacttgtgaggcagaggcaggagggtgacttgggcacaggaggtggaagctgcagtgagctatgattttgccaccgcactgcagcctgggcgacagagcgaggttagaatataaacatatgtattgtatataatacacatatattttatcttctgtctatcttacactttagggttgggggcctggagtgtctggggcggggagactgctgaggtcatccgtccctttctccaatgacccaggctcaaaactttgtggctgggcatttcaggggtcccctcttccccctggatggaggaaagggcgcccgccgcctgcagccccgcggggaggggacgaggtgcgccgggcccagctctcccgggggcccgccggccctcccggcacaggcctcgcccccagccccgcgctggcgcgcgccacgtgggctacgctgggcgggaccggcgggcgggcgaggcgaggcgcacggtgggctgggaggctccgctccgcgccggcgcgatctggcccgggtttccgcgcccgcccagcgccccgacctccccgccccccgcgccgccgctgcagccgccgccgccggaggccgctcggagccgcgcgaacatggccgaagtcggcgaggacagcggcgcccgcgccctgctcgcgctgcgctcggcgccctgcagcccagtgctgtgcgccgcagccgccgccgccgccttccccgcggccgcacccccgccggcccccgcgcagccccagcctccgcccgggccgccgccgccgccgccaccgccgctgcctccgggcgcgatcgcgggcgcgggctcctccgggggctcctccggggtatccggggactccgcggtcgcgggcgcggcgccggccctggtggccgcggcggccgcctcggtacggcagagcccggggccggcgctggcgcggctggagggccgcgagttcgagttcctcatgcgccagcccagcgtcaccatcggccgcaactcgtcgcagggctcggtggacttgagcatgggcctgtccagcttcatctcgcggcgccacctgcagctcagcttccaggagccgcacttctacctgcgctgcctcggcaagaacggcgtcttcgtggacggggccttccagagacgcggcgcgcccgccctgcagctgcccaagcagtgagtggccccgcgacccccgccgcccgcacccggggctcgcccacgacctcgatctctgaggcccgggcctggggatccccctccagcttcctcggcctcgacccccaccccccggcccacccccggtaacccccgaccggcctggactccggggtcaaccccgacccccgcctcctggctccctaggatcaccccgaccccgatcctggaggctccagcctgaggatctcctccactttccccggtctggataccccgtcgcccccgacccccaccggcctggactctggggtcagccctgacccacaccttgcggctcctggggtcacccctgacctcatctcccaccggcctgggctcctggagccacccataccccaagcccatctggctgggcctcttagacccctgacccagatccctgctgctccccagctcccatcggcctggactccggggtcattctgaactcccactggcctggatccctggggtcatctacgtccctaccctgcctaaacacgcaaggttaaccgcgacccccacttcctaggcccccccggagtcacccctgaccgctaaccccacaagcctgggctcgcagggccactcccaccccagctccacccagctgggttactgaggtcaccttgaccccagtccctgctgcctgggcctggggatcaccctcaacccttccaggtcaccctggacccccaccagcttggactccagggtcaccccagcctgacctggttctcaggaccacccccgacccccaccagccagggcctcaagtcaccccagtgcctgatgcctgccgtcctggaccccagtggctacccctgaccctgtctggtctggacccttgggccacccccaccccatccagtctgggtcctgggggaccccaacacactcacccaggacagtgggagggtgttgctccgggaagtgcgaggtccctaggagtgtgggctgtgctgaaggagcagaggcctggcggggaggggcgaggacaggaagcctgtgcctcagtttacatccccaactagtgctccttggatggagtagcgggaccccaagatcaaattagattcccccgggcccgaggtcaccagggcagagagacccagctgggcctggacggctgcccaggcctgtcggtgcctttggtagcatcccgtggtcacctcccgcccattccggttccctcctttccagctccactgccctccgcaccctctgctctgccccggacctcaaggtctgttgatcaggagaaagcctgtttaattactcatttcctctggagccactttctttttctatttagtgattgcctctaactcatcaccagtgtttatatttcttcaatgtggttcttgttcagggttgtctgtctaattactcccttttataaacgccttgcgtctggggaatttttgctggggtaattcccagggcccaaagtttgtgtctgtaaacttctccccttttttagtcttggcatgtttggttacagatatcgcattgaataatttaaaatgcaacatcaacaatgactcactcccccttggggcgtgagaggggaagtatacctttttctaaccgtgctgaaaggtgtgcattttggtaaaatcagaactcaggagataacaaatttgttctttgcctcagatattagtgtgttctctctcttccataaccaatacactctctccgtttggggccattaaatgcatttcctggccactctcccctccagtaagaaaatgacaggtaggctccccaggccccccttagaggcctgctttacagacgcacctttatataactcaggttcactaagtacttccattaaagtcttgttttcaggtttcctgcccctgccgtggaaacaggtgcactcctgagtcaggcccagctttagtgaatcttgaaggaggctttcacggtattttttttttgtaattcaaggggaaaaaatttcaacctcagatcgtctacgaataggccagtagcaagcctgttatttatgaaatgttatcggtgtatacagtccttgcacatttatgctccagggagctcgtgttctcggtgggtgcattaccaggcattgtggtggggctgtcaggctacacagatgcccgcccgctgacttggtgcattagatgtgcgtgaagtgcttggcccactgcgcctgtctgtttttatttgacttcacctgcacatgtgagcaatatctatgtaggcagcaatgtaaaatttacaagaacaaagcaaatgtgcagaaggaaaaacattaagtggatgtccatgtccaccctcctagaaaagagctatttgcttttttttttttttttttttctgtcatggagtctcgctctgttgtccagactggagtgcagtggctcactgcaaactctacctcccgggttcaagagattctcctgcctcagcctcctgagtggctgggactacaggcgcacaacaccacgcccagctaattctttgtatttttagtagagatggggtttcaccgtgttagccaagatggtctcgatctcctgacctcgtgatctgcctgccttagcttcccaaagtgctgggattacaggcatacaggcgtgagcccctgcgcccggcctcactttttttttttttttttttaattttagaaaacttacacctaagtagtcacatatgtagaacaggctgtcataaacttttttggttaggtaaagattcttaagcctggactacatttggttaggtaaagattcttaagcctggactacagcctcacgcctgtaatctcagcactttgggaggccaaggcgggtggatcacttgagttcaggagttcaagaccaccctggccaatgtggcaaaaccctgtctctactaaaaatacaaaaattagcttggcgtggtggatcacgcctgtagtcccagctacttgggaggctgagacagaagaatcgcttgaacccgggaggtggaggttgcagtgagctgagatcacgccactgcactccagcctgggcaacagagcaagactccatctcaataaaaaacaaaatgaaaaaaaaaaaaccaaaaaacgattcttaagcctattatgttgaaagtcattaagaaattttaaggatttcagcgcaaggaagttagatgcgtaagtttttgtcaccctgaatgggaaattcatcaccgaatgtcaggaattactgtgtctgttttctctccggctttggtacctggtattgccactgctactggaaattgtgaatttgtttactgtaaactacagattctcttgctgtgttggaatgtgattgccttggacgtgcttggatttggtgggaggtctatgttgtgttggtgcccacaccattttccaaagctgtgttgtccggggccaccctcttcaccttgggacaggtacatgccacacacacttccagtagagctcccactcaggaaggatgccagaattcaacccctatttgttactggaagtacgtaattccaaatcttcaatatttttaattattggtgggggaaaaaaaagacttgtgacccagcttagagctgatcttgctctactgggtgacactacgcctggtgggtaagcatctcgccagagctcccaggcacagggggagtgtgcgtgggttctgattcagctttgcttggtgttgacttggaggaactgcccgggtctccgtgatagcgtttcttctagaccataagctccctgtggctggggccgagaatttatgatgtttcaccagagacctagtgcaggcactggctcctattaggtatgcaacaactgggttctgtttgttgagtgaacaaattaatgaccacatgaatttgcagcttctgtaggagaaaaacggcgtcatcgatttagtctggtgtcctaaaaggaccatgagcctgtcatgggggggaattcagacagccttcttcggttatggggaggggggtgaggtgtgtgtgtgcacatgtgtgtgtgtgctgtcattcttgatgccacttaattttttttcttttctttttttttttttgagacagagtcttgctctgtcaccgaggctggagtgcagtggcgcgaacttggctcaccgcaagctccgcctcccgggttcacaccattctcctgcctcagcctcccgagtacctgggactatgggcacctgccagcatgcccagctaattttttgtatttttagtagagacggggtttcaccgtgttagccaggatggtctggatctcctgacctcatgatccaccctcctcggccttccaaagtgctgggattacaggcgtgagccaccacgcccggccttttttttcctttttacatagttaatgtatccaactgaattcttggtttgtttgttttcgttttcgtttttgtttttttgcaacggagtctcactctgttgcccgggctggagtgcaggggtgtgatctcagctcactgaaacctccgcctcccaggttcaagcgattctcctgcctcagccacctgagtagctgggattacaggcgcacgtcaccacgcctggctaatttttgtatttctaggagagacggggtttcaccacgttggccaggctggtctggaactcctgacctcaggtgatccacccgccttggcctctcaaaagtgctaggatgacaggcgtgagctactacgcccggccccaactgaattcttgatgccacttaattttgaatttcatttacccaattcaaaattcaaaaaatttgttttcctcatgaacctgagaccctgtgcatatcccatacttgctcttccctctttctctaaagccttttcgcccagtatttttatagtaaatgtggatggcttgaataattacaatgagaacaagacttctgtttgtggtaactttgagtggtaagattcatatgggtgtctttttttctttatacttttctgtgttttccatgttttctgaagtgaatgtggttactttttaaaattattttttaattttgtagagacagggtctcaaccatgttgcccaggttagtctggaactcctgctctcaaacgatcctcccaccttggcctcctaaagtgttgggattacaggcatgagccaccatgcccagctgcttttttaaatacatactttttatcatggacaatttcaaacatagacatagagtaacaagcttccacatggctgtggccggcttcagcagctatcatcttgtggccaggcttgttttatcttcacccccattcacctttccccctcgccccagttctttagaagcaaatcacagatgtcatcttactttgtctataaatatttcaaccaaaatttctagaagataagaattcttaaaaaaaaaaaaaaaaccacagtgtcattatcacacctaaaaaatgaataataatttcttactgtcctcaaataatcagtgcataggtttctcttactgtcggcatggttgttttttcttttcttttcttttttttatttttatttttttttgagacggagtctcgctctgtcgcccaggctggagtgcagtggcactatcttggctcactgcaacctcccaggttcaagcgattccccctgcctcagcctcccaagtagctgggattacaggcgctcgccacgacacctggctaatttttagtagagatatggtttcaccatgttggccaggctggtctcgaagtcctgtctccagtgatctgcccgcctcagcctctcaaagtgttgagattgcagcccccacgcccggcaccctctgcttttttctcatggagtcacttgtcctgtgtagttccccacacctgcctttacagattggattctgccagcatccattcactgtgtccctcccccttgtcattcctgtaaactggttactagacccggggattccatcagactcaagtgttttgttttgcttttttgccagaactgccttctaggtggtggtgcacgcagaggtgaaaatgtctgggtgtcccccacaatttgtaacattagcagcttttggtggtcattgccttggatcccttaatttgttctcacctgcacttttttttttttttgagatggagtttcactcttgtcacccaggctggagtgcagtggcaccatcttggctcattgcaaccccctgcctcccaggttcaagcaattctcctgcctcagcctcctgagtagctgggattacaggcatccaccaccacgcctggctaatttttgtatttttagtagagagggggtttcgccgtgttgcccaggccagtcttgaactcctgacctcaggtgatccgcccacctcagcctcccagagtgccgggattgcagatgtgagccactgcacccggccaccggtacttttttgtggttcattttggctgccagcatcggatacgtggctgggttgccatgctccatctgctgagaggcgtattgtgagtggcaggtgttatggatcacagcctctgcatatgtgccagcagaaaaagtaattgtaaccagcaaagcattttactacataaacgttttagcccctataaaaacatccggagatccttttgttgttcatgagcatgacaattgggtgttttcatgcagcgagtgagatgtgccaccctggaaccttgttacgacgtcgcatgttacctgtctgacctgaaaaataattaataagtaaaacatacggaagccagtttctcatggctatttccaactagtcacttgaagaatatggaattagttatacaattagttatacgttgtataaccatcataaaattagttacagattgatgtgacattatcttgaaattaatgggaaaagtgccccagacctggggaagtcgaatgccccactacgtggcatcaaggacagtgacggcattcctcttctcctggggttttcccacccttgtcactgccctcacccagtccccttaggtgacccagcgcctgggtgggtcacgcttggctggtgcaggagtgggcgtatgtgctgagctgggctttgcacttgggacaagaaagggtgtcagatcagtctctttccagcgagtagacgtgaaaactcaggtggtgctgtctcgcttctccacgtgaaggatcagcctgcagtgccaaaggcgaagggaagagctgtgattagggagggttggtctgttagtgaaggaagccacagaggagacaaagacgggcatcaggtccgactcctgagacctggtggccccaggactggagaggagcagatccaggtgcaggatctgctgaaggaaggaatgttcccgttgggtgatggttttgaaccggagctggggagaacaatcactgctgcagaggttggagggggagccgcttcgcggaacggggtgaagctttagtttcagtccggttgtatcttgatagccaagaaatgaaatgcggcatctccaaataaaggctttattcttagtgttttgctagttggcagtttttgtgtatcacatatatttgttccaagttagactgtcaactggttaaagttactttaaaaagctttgtgggcaagtagcaagtacattgggtcgagttaaaactatgagccactttctagtatttggtgtacgctgaattttttgggcttgccgcccatttaagaaaacttacatagaattttaaaagtcagtctatgaggagggtgttgtcgtgtagtattattgaactgaatttagaatatttgcatgaaagcctttgtcatactgatggagaaaaagggtttgtgggtgctaaaagtgtaggatgtagtggtgttcatatttagtacttttgaaaaagacgcagctatgtttaaaattttgtgctgaaatgagactaaagcatttgatttggagatagagtaatttacgatttgctgtttttgcatcttgtgaatgtcagaggataaacttgctaaattaatgacaactcaaattgcagcaatgcctcatttccataattaccctacatttaaagcatttcatattaaaatgagaggattatataaaatgcttttagtttgatttcctggaaataggcccctgcatcgtgacttgttgggcgatcttgtacttaattttcattgcgactattacttttcacgagtttctagtttcctggtaaaatgttgccgggtaattaaaaaggataaaaaacagaatgtgcgtaaccaagaaggcgtgtggcgtgctgccaggaatcggaggaaccagggttcaagaactcgcctcacctgacccatttctacagtgttgatgatgtatgttttcctcggatgctgtgaagatgagtttgggcatgttttgctttacttaaacataacagtttcatcattaaatcatgaactgcttgcaaagcgtagcttttctctcctaagaatacttttcaggaagtagacaaactgatcaatagacatacagagagcctccctctgtctcccaggctggagtgcagtggtgcaatctcagctcactgcagcctccgcctcctgggttcaggcgattctcctgccccagcctcccgagtagctggagttacaggtgcctgccaccacgcccagctaatttttgtatttttagtggagacgggggttttactgtgtcggccaggctggtcttgaactcttgacctcaaatgatccacccacctcggcctcccaaagtgctgggatttcaggcatgagccaccacgcccagcccaggccattatacatgatttgattaagaagaatctcgtctgccctcagtactgcatttaaccttgctgggaaaggggtgaactgtcttccatctgtttcctcagaggacgctgagctctgatcatgttgcctctctgcccagaaacctcagtggctcccgtgtacccagggcaagaggccctgcccctcagcagagaccctgttattatgaagctgtcctctaacctgttcccctaagtgtcaaagggcatggttctctttgggcagaatggctgctggacattctctgcttataccagcaattcccagatttgttttagtctcagggcccttttatactcttatactcctacacattactggggaccccaaagagctttggtttatatgagctatatctgttgacactgaccgtattagaaattaaaatatgcatatttatttatctactcaaaaatggtaataataactctatttcaaaaatatttttatgaaaaaaaaactatatacccccaccccaagaaaagaataagagtttttttggtagaactctgtaatgtctggcttaatagaagacagctggaatccatggctgcctccgcttttagtcggctgtgatgcgtgttcaggctgaagtacatggagaaaagccagcctcctgcagatacgtagttggaaaagggagtatttttgtagccttttcagatattgtggatgttccttgagacctcactaaaacctgacaaggggtagtttctttttttgttgttttgttttgagacggagttttgctctgttgcccaggctggaggggcagtggcacgatctcagctcactgcaacatccgcctcctgggttcaagcaattctcctgcctcagcctcccgagtagctgggataaacaggcatgtgccaccacgcccagctaattttgtatttttagtagagacagggtttcatcatgtaagccagctggtctcgaactcctaacctcaggtcatccttctgacctcaggtgatccgcctgcctcagccacccaaagtgctgggattacaggcttgagccaccgcacccggctgggtagtttctttttttttatttatttttttgagacagtgtcttgctctgtcacccaggctagagtgcagtggtgcaatcatagctcactgcagccttgacctcctgggctcaagcagtcctcctgcctcagcctcccaagtagctgggaccacaggtgagcaccaccagaccagctaatttcttttatttatttatttatttttggttgagatggggtcttgccgcgtttccctgactggtctcaaactcctggccttaagtcatcctctgctataatatccttaagtcatcctctgctataatatccttaagtcatcctctgctataatatccgtagatgttttatactgtgttacgttaaaacctattgctctttcattttgaatgagtcctttgccacccctgtgtgattttgtaacatcatacattggccattggcaagaatattgattgagttatgcagatcttctaatgttaattataaaaaacaaagtctgttttatcctgaggttcagctgatagttaaacttgatcccttcgaacccaataaactctgtttttaaaaacagaaatcttttataggaacaggctttttgtagtcagttaatttttaaagctgttttaaaagttgagtgacacagcatattttaaatagactttttatagagcagttttaggttcacagcaaaagcatatttttatagaaataaagttatataatttagtcattggccttattagcatgttgtgatatgacttggctacagttagtatatttttttaaatgtacagtaattttttgatgatttagggtggcacgattcatcctgttagttactgccgttattttccctgggggcctctgtcgcccaagccgctctctgatggtgcccttggcctttcagccacggatatgggtgtcccctcccctggagaacagcagagtgatgggggaggtgggacagggttggggtgtcccaggtgagtcctggagtaaagtcagtaacagaatttgtcttgtttttttgtttgattttgaggcggtcttgttctgttgcccaggctggccttgaactcctaggctcaagtgatcctctagcctctgcctcccagtgtgctcaggtgtgagccacctcatctggcttcaaataatctctttaaaaaaataacaaaagttttttttctgtagagacaaggggttgttgcccaggctggagtacagtggcatgatcacagctcactgtagcctctaattcctgggctcaaacgatcctcctgcctcagccttctgagtagctgatactacagtgcctacttccatgcctggctaattttctttttattattttttatagagaccagtgtctcactatgttgcccaggctggtcttgaactcctgggctcacatgatcctcccacctgggcttcccaaaatgctgggattataggcctgagccacgcgcccagccagaatgtgtttgtatggagacattgttgtgtgggatttttcatgaaacttttctaggtttttttttgttttattttattttttactttggaacatttacatcaaaataagcagactttctgaaaaactatgccactttggataaacataaaaattcattttctccctccccagtctgataggaactcttggaggaaatttctctctctttcccttctcactataaatcacagcaaatcagcagtacacagagaataaaagcaatcttctgcctgttctgaaaaagctttgcttcttgtgatttgtatcacgagggggaaaggtccttactgtttttccagacctacagttgtgatagaggctcctcccagccccgcccacagaccccaacagtgccctctctcacaaatggattctggggcttggtctttatttttgtttttgttgggggcagcatatggaacccaaaaatagtatcatagcctagatttggagctttgtgccagccttgtctgtaggatgacccgtgtgggtctcacctggtgactgggagtccacaggggtcagttagtagcagggagctgcagggcgcctgtcagcagagaccgtctcattccccaaacccaggagccagaggaactgacgcccggataaatgcccaagccgccccgggtgggattagtcgtctaccttcccagaaatacaccctcccatcctgtgacttggatacagtttactgatgaaattagggaacctcctgcgccttaccaagaagctgtggctggaacttagtcaatgaaaaatgatttgtaaactctttggagctggctttgaaagaatgtttaaaatgatagctgatactgccagacaacagaacaggccggccttagccatgaggctccagaagaaggagaactgcaaagtttgtgtccgctacctctgcccttgggatggagccattctgtctgcttggctgtacagccctggcattgggaacagtgattcatcgccgcttgatgaaaacatctttccgttaagaatatccacctccctcgggttggagtccatattaaccagggaacacttgcagccctaatttggttcctaacctgcaagaagattttgctagaatatccagcttcctttgcaattctctttttctctgtaaattgtggtgtggacagattttacaggcctgcctacctttggattggccaatcagggatgccatggcgagtctagaacttcctgtggtggtagaaatgttttatatctgtgctgtccaacatggccaccactaggcatgtgtggctgttgagtgtttgaaatgtggctcaaggcggggcgcggtggctcatgcctgtaatcacagcactttgggaggccagggtgagaggatcacaggtcaggagttcgacaccaccctggccaacatggcgaagccccgtctctactaaaaatacaaaaattagccaggcgtggtggctcacgcctgtaatcccagcactttgggaggccaatgtgggaggatcacctgaggtcgggagttcgagaccagcctgaccaacgtggagaaaccccgtctctactaaaaatacaaaattagctgggcgtggtggcgcatgcctgtaatcccagctacttgggaggctgaggcaggagaattgcttgaatccaggagggagagattgcggtgagccgagatggtgccattgcactccagtctgggcaacaagagcgaaactccgtctcaaaaaaaaaaaaaaaaaattcccacaaaaattagctgggtgtggtggcgtgcacctgcaatcccaactacttaggaacctgaggcaggagaatctcttgaacccaggaggtggaggctgtagtgagctaaggatgcaccactgcactccagcctgggcgacagagcaagactgtgtctcaaaaaaaaaaaaaaaaaaagaatcttgtgctgagtctgacccctgacatacattaggaggggaggcttccatttgtccctgtcttaactctccttcttgaagccaaaggaaagacgcaaatcatctaggagattctgatggataataaagaagagggacaagcttgctgatgtaggggaaataaatcgccgaggctctgtctagcttggatttactgtgtgtattggctgtgggtggattacaggtgagctcataaatattagtattttgctcatgtccttccagatttgtaatttccttgataagcaggtgtgtgcgcgtgacatgtctgtcgtctacccgtcacacggttgtaccaggtagcctttgcttaataagccctcggagtactcgtcctttgagctcgtgggacttgcggggtggtcattaagcgttggtgtgaataccgggtatctccgtctcccagaagctgcgagtccctcgagggcaggggctggttctttcgggaggcattttgttctcagtgcctcgcccagtgccagtgaagacacacttccaggtgtcatctgctataacctgctagcccttctaatagataaaccccaaaaccttgcctatggaaagtccacagtagatgtttctgaatggtgggcagaaaatgcctccttcgggccaggtgctgtggctcacgcctgtaatcctaacactttgggaggctgaggtgggtggatcacttgaggccaggagttcgagaccagcctggccaacatggtgaaaccccatctctactaaaaatacaaaaattagccaggcatggtggtgtgctcctgtagtcccagctacacgggagacagaggcaggagaatcccttgaacccgggaggcggaggttgcagtgagccgagatcatcctgccaccgcactccagcctgggcgacagagcgagactgtctcaataagcaaaaaaaagaaaatgcctcccttaaggtgtgattcagggacccaggctggcactgtctggagtccagcggcctgggcacggctgcacctgctgcagtgctgtctgcatctggaggaaaagagggaggctcaggggaggccaggcccagaagtagcatatctcacttccactcaagccagtgaccagagctcagtctccggccactccaagggaaggcaacgtgctcaggaagaagatgacagtggcctgctgaacagctagccggtattcacggccaacttttcagatcagggtagccagctgcagcctgtgggccagaccctgccagctgcctgtgtttgtaaataaagttttattggaacacaccaggcacatttgttaagtgctgtctgtggctgctgagctgagccggagaccatgtggaccccagagcctgtgttatttccttctggccatgcctggtggcccgtctgcacacccctgccttaggccacagacttctactcttccacatcagtgcgtttacctgggttcatcagcaccttttattaccaatttctctccacatttcttgtcaggttgaatcctgggttttgggaatatgaataggatctttttttcttattattttctaaaggttagtgtttacatacaggaaagataggctgtgtgtgtgtgtgtgtgtgtgtgtgtgtgtgtgtgtgtgtgtgtgtgtttctttggtatgagttttatagtaactaatttttttttcttttttttattttgagatggagtctcgctctgtcatccagactggagtgcagtggcgtgatctcagctcactgtaacctccacttcctgggttcaagtgattctcttgcctcagcctcccgagtagctgggattacaagggtgcgccatcatgcctggctaatttttgtatttttagtagagatggggtttcaccatgttggccaggctggccttgaactcctgacctcaagtgatcctcctgccttggcctcccaaagtgctgggactacaggcgagagccactgtgcccagccctaatttgttattaaaattttacgttttgaaaaagttgcacgcctccaaaaatgttgcaagatgagtccaaataactcctgcatgtcctctgcccagatttgttcatttttagtgctctgccatgtttagcgttttctctatatatgtatgttatctgagagtgcgattttatatatgtatgtgtgtgtatatatatatatatatatcgtgccctttttcttaataccacaacatgcattgcctaagaataaggattttttttttctcgcttcaccatatgcaagaataaagatattttattcacacctaccccaggacacccaaaaatggggtggaggatattttacataatcacagtctgttattaaatttaggaacattaatgatgatcccatatgattagctcatgtgcagtccacgtacctctttgttgttgttgttgtttgagatagggactccctgtgccacccaggccggagtacagtggcacagtcatagctcactgcagcctcgacctcccaggctcaagtgatcctcccacctcagcctcctgagtggctgggactacaggcacgtgccaccacgccctgctaatttttttgtgtgtttctagaaatggggtttcaccatgttacccaggctggtctcaaactcctgagctcaggtgatcctcccaccttagtcttccaagtaactggaactataggcctgcgttaccatgcccagctagctttttattttttatggagatggggtcttgctgtgttgcccaggctggtctcaaactcctaggctcaaatgatccacccacctcggcctctcaaagtgctggtgttacaggcgtgcaccactgtgcccggcccacataccatttttgccatttgtcccagtatcgcccagtgcagtgctttgtcgcttgctggggctccagcccaggatggagtttggcatgctgttgtcctgtgtttttagtcatctgaatctgggacagttcatcagcccttctttgtcattactgaccttgacatttttaaaaacaggccagttatgttctgggctggctctccacatacatttgtccgatttgacaaaatcccaacttcactcaggtggagcatctttggccgtgggactcgtggggtccttatccacagggttagtttttttttttttttttgagacagtctcactctgtcacccaggctggagtgcagtgacacgactcgtggggtccttatccacagggttaggtttttttttttttgagacatctcactctgtcacccaggccggagtgcagtgacacgatctcggctcactgcagcgtctgcctcccaggtcaagcgattgtcctgtgtcagcctcccgagtagctgggattacaggtgcccaccaccatgctgggctaatttttgtatttttagtagagacagggtttcaccatgttggccaggctggtctcgaactcctggcctcaagtgatccacccacctcaggcttccacagtgccgggattacaggcatgagccaccgcacctggcctcacagggttagttttgatcacttggtttaggtgttgtctggccggcttttccaccaaagagttgctgtgttttttcttttgtaattaagtaatttttgagattcagtacaagtgttaaaatattaattttctgtctagtcacatttacatttctggtaacagttttttaattcatgtgcttgcgtttcctgggccataatcctcatgtgcagataatacttcttctctttgttccagtatcttagatctcatttctttgtgttgtctggttgaatcggctaggacctccaaataacattgaccgagtaccatgataatgggctccttcttgttcctagcttggaaagaaacgcctgtgaagcgtttcagagtaaatattgctctgcctgcctgagagccatttccgtcaggaggccttccccggtgcctggctgagcttaggtcccactggcttgcactgcagcaccccacggcaccctgtgtggcctgtcgttgtttgtggttatatttatctgagacacctgagttttgttggggcaggaccacgtttttcttgtttattgcatagcctcagtacataccaatatgcttggcacatagttggcactttgtaaatatttgtgggcaaaatgaataaacaaataggagagatctgaatgcaaaaataacctggtgtaagaaagtgatcagaagttccattagcttagcttctaaaggtctggcttttgctgagtgcccttgggcaagtggattgaccccgagctcctgtttgcccatctgtaaagtgggcacacttcctttttcataagtaattgtgagaattactagagatacattagaagtatttactgggccagatgtggtggctcagtgggattacacctgtagtcccctcccagcactttgggaggccgaggtgggaggatcgcttgaagccaggtgttgaagaccagcctgggcaacatggtgaaaccccgtctctacaaaaattacaaaaattagccaggtgtggtatcatgcacctgtggtacgagctactcgggaggctgagggggaaggatcccttgagccccagaaggtcaaggctgcagtgagctataatcgcaccactacactgcagcctgggcaacagagcaagaccctgtctcaaaaaacaaacaaacaagtacttacctcagtgcctggcacatagacagtgctgatagataaacatcccacatacatgcgtctgtgctgccatcatcgctgctgttactgtcaaggatgtattattcatcctgtgatgtcagaagcggaggttgttgcagggcagtgggaaatgactgcagtgctttgagctgctcacagtggagcagactggccctcaggtctgctgagctccctgccccagcctgttccagcaggggcggccgctcaccagcaaggctgtcattcctaggcagcatcttgcactggctggagaacgggcttcctatctccaagctccctgcggctgtgaaggctgcacgatcagagctaaacagcaggggtttgttttcttgtgtttttctgagctgcttatctagagaatgggagctcaaaggacggggggctagaagagacaaactcaggttttaccttgaattagtttgagtaacgtttgttgggtacagagactggccaaaacttagggaggacactgagataagaaggtttgatctcaaaacagttcccagttttagccaccgtgcccagccaattcgtatgtattttaaggtatttttttaaatgtggaaaagtacaaaggatatgtaacaagtactattgaccgggcgtggtggctcacaccagtaatcccaacactttgggagactgaggtgggaggatcccttgagctcaggagttcgggaccagtctgggcgacatagcaagattctgtccctgcaaaaaataaaaagtaaaaggccaggcgcagtggctcacgcctgtaatcccagcactttgggaggtcgaggcgggcggattatgagggtcaggagatcaagaccatcctggctaacacggtgaaaccgtgtctctactaaaaatacaaaaaattagccaggcatggtggcgggcgcctgtagtcccagctactcgggaggctgaggcaggagaatggtgggaacctgggaggcggagtttgcagtgagcggagatcgcgccactgcactccagcctgggcgataagcgagactccgtctcaaaaaataaatataaataaataaaaagtaaaaaattatctgggcatggtggtgcttgcctgtactcgcagctacttgggaggctgaggtgagaagatcgcctgagcctgggaggttgaggctgcggtgagctgtgactgtaccactgcactccagcctaggcaacagagcaagaccctgtctcaaaaaaaaccccaaaaagcaacaacaacaaaaccaaatcgtattgtacccactaagaatccgtgcttttcatattttgtcatgtttttaagccctttttaaagagacacatgacagataaaattgaggtcccctgtcctccaccttcccctcccgtttctgtcccttctccagaggcagctcctggaggaatttaaccctagacctcccgcgtatgtcacatacacacgtagacatctaagaggcatttgttgtttgtggggtttttttatttatttattttttttgagatagagtctcactctgtcgcccaggctgtagtgcaatggtgcaatcttggctcgctgcaacctctacctccctggttcaagtgattctcctgcctcagcctccggagtagctgggattacaggcacgcgccaccatgcctggctaatttttttgtatttttagtagagacagggtttcaccatgttggccaggctggtctcaaactcctgacctcaggtgatcccaccggccttggcctcccaaagtgctgggattacaggcatgagccaccgcacccggccagcattcattgtttagttcacgcgagttttcaggtttgcgttagtggtgtcgtgacatcttcttcatgatcctgtttgtgttttccacttctctggaaagaccgcttcataggttggtgccatcagacatgcgtaaccctagtgggtgtagccccccatcctggacggggccttgacggggcctctggcctcctcccctgccttcctcttctcagctctgaccagaggggatggaagcttgtgtccctctgggtgacagacccagcctgcccgccctacccagctcgggttctgggttcctttgtcctcgtccccagggctgcgtgtcctgctcgtcctcctgagctcctggcctgtgtctccacctaaaaggccgtcctcagctccccctgccaggtccggttggggaccgagacccctggttgcttgcactgctgggtgagagtgcctctgtgtcgggggctgggctgggctgggctggactgggaagactggctctctcaggggattccagggcaggcggctgggagggcgtttctgaggaagtgctgttttagccgaggtctaagttacaggcaggagctggcaatgaggagtcagggagacagacctccagccattgggcctctccgctctggggtgaggggagggagggggaggacccgagggggcagagcatttaggacatggagtgggtagggcgttgtgacagcctggctctcaggggatgggaggacaactcgctgaagttcgtggccccaagacatgcggagaacccgcgtctgcagggctggtggcgtccagcacagggcagggtcctggtgtcctcgccccacaaggctcccccagggtggcccgaccctgctgcgcgggagggaaagagccacaacaagttgaaggtgcccaggagacttgggtacattttgctcatcttagggttggggacagaacatcattaagaattgtttttatatctggcaaaactaaaagcttgaatattaaaaccaaatgatcccgggtagagctgcagctggggactggtgcgccatgcaattgacatagcgctgctcgggcgaccaggaggcccttcagtgctccggaggcactttcagagcatcgtgactagataaaagtaggtgaaaagggaatcgcagcctgccgagagctttagagagactcccctaaccatgatttaatctggggaagggagaaaagtaacatatggcagtcacattacattatgaccatgaaggctaaatactcccagtcactataaatacagaaaaccaaacctggtgggaaaaaatgcgtgtatacgtacccctacgtgtggaaaactggctaccgcatgcttaacaaaataacttgggaatgaattactcatggtgaggcttccgatcagtgtctaaccctggtagcgtctgccagtagccacaccgaaagggtctaccaagggtacactatggacatttttcatttaaaggtgaaagattttttaaaatgcattgctaagaaacatccctggccgggcgtggtggcgcacacctgtaattccagcactttgggaggctgaggcaggtggatcacttgaggtcaggagtttgagaccagcctggccaatgtggtaaaacctcgtttctactaaaaacacaaaaattagtcgggcgtagtggggcacgcctgtaatcccagctactcgggtggctgaggcaggagaatcacttgaactcagaaggtgaagattgtagtgagctgagatcacgccactgcactccagcctgggcaacagagtgagactctgtctcaaaaaaaaaaaaaaaaaagaaaagaaaaggaaacattcctttcatcaaaacacaaataaatatttttcaaaaattaaaaaaaaaaatgctcaaaggattaccgggtactttgtgaataaatgttttccctatttcggaactggataagctaagctgggatccacgcagcacgcagcaggagggattgccctgtgtgctaggcaaggctgacatcagtgacagcagcgtcaggctgtgctcggatcacgggcccatctgtagttatactttttaaattttttttcttctgttgtttctgtagagatagaacctcactgtgttgcccaggctggtctcaaactcctggcctcgagccagcctcccaaaccaatctatgtttcattctttttttttttttttgagaaaaagtctggctctgtcacccaggctggagtgcagtggcatgaactcagctcactgcaacctccacctccctggttcaagtgattctcctgcctcagcctcccgagtagctgggactacaggcacatgccaccacgcccggctaacttttgtatttttagtagagacagggtttcaccctgttggccaggctggtctcgaactcctgacctcaggtgatctgcccgcagcagcctcccaaagtactgggattacagcatgagccactgcacctggcctaaaagtttatttttcatcagtctacattctccaattttttaaagtcagaattttattgttttgttgctgttattagagacaagatctcactctgttacccaggctgggggcagtggcatgatcacagctcactgcagcctcaaactcctgggctcaagccatcttcccacctcagcctccccagtagctgggactacaggcgcatgccatcaccctggccaacttttttttgtaaagacagggtcttggtatgttgcccaggctggtcttgaactcgtgggctcaagcgatcctcccaccttggcctcccgcagtgctgggattacaggcataagcaatcatgcctggccttaagtgagaattcttctgtgtcatttccttctctttctctctctctctctctctctctctctctctctctctctctcgctctcgctctctcgtcgccaggctggagtacactggcgcaatgtctgttcacggcaacctctgcttcccgcattgaagcaattctcctgcctcagcctcccaagcagctgggactatacaggcttgtgccaccatgcccggctaatttttgtatttttagtagagagggggtttcaccacattggccaggatggtctcgatctcccaacctcgtgacccccccccgcctcagcctctcaaagtgggattacatgtgtgagccactgccccggccttcacgtgtcatttctttttgtaggaaccaattttaaaagaaagccgattttaagagctcagcttttaggttatatatctatataaactatatcatttccaactttcaaaattatatatatatatgtatatatatatacgtatatatacgtatatatacgtatatatacgtatatatacgtatatatacgtgtatatacgtgtatatacgtgtatatatgtatatatatgtgtatatatgtatatatgcaatccatgcttatagaaaattgaaaaatacagaaatgcgagcaggagaaaagccacatagaactctccacaaaggtaacagcgaacgtcatttcagcgcgttttcctcctgtttccatttaaagagatctatagcagggacttggctgaaaccttgtatttgcatattcacaacggctgctgatcagaatcacaactggttaggggcttaaatacttaaaataaaataccccttttctgtgaatgatctgtttaagtgggtaaagtgctctggcaccctaagttaggagtttatatctgtgacactccttccctccagctaaacagcaaggggaggtggtcagggaagttccaggaatgcaggcctctggccctagagtggggtggggctgtggatgctgacagttgggggcccatcggagacagtcccaagcagcatggctgggtgtctgtggttccctcctatcaagaaggaacctctccacccttcctcaatgtgggcagaatcctgacacccaccccaccagctggatgaggtaatgccaacagtcaccaaaaagcaaaatgtgatttacagttctgtctgaattgttttcggagtgcagaaatgtaaaggaggtcttcatcatcctcgtgaaagacacgtacagggtgaaacgttcgaaagctatgtgaatgaggcatgatttcctttgtcagtatcagccaggtcatcgctgaccccggagttgggctgaccttccttggccgcccggatgccgacccccaatgcccctgtagcctggaactgctgggtcggcctgtgccttctccctctcacctccccccgggacttctgagttccttctccaaggagggctgtgccctagacttccgggccacttccctctacccttgtgcaggaaataacttacctacttcatgccctaattgaattccattgcattttcttcttaaaataaaagactaaaaactaacggttgcttcctgcctttgtccgtaatggccaccttccagtcttagagaagcagcgatgtctcccctccgggtttcccatgatgttacgttgccctctttgttaccacccctggtgcggtggacacagacattgcccaaacactaacggagagggaagaggtgcggggagctcagggcgttcggggtggtgttctggtggaggggacgctggtaaagagcaggtctggctcagtgcttatttcagggaaaactcttgtgatgaatgggccatccgggataaacagatgggacggagagtgcaatttacataacaattaagctagtttagtacatccggcaatgctgctgaaagcaggcctctccctgggcgggctttccgtgttattaatctactttatgacccagtttccccaaatggataatttcgccttggtagtgttaagatgtatttagcgactcaagtatctgcagcagcgagagggtgggtgtgggagtcggtgaattgtctcttacgccttcctttccgggttttcctggagaaggctgcctcactgggtctttgcagttggcgtgttccccggtgccattcgtatctgattcatgcgtgtgcgaccagtactccatttcactttttttttttttgagacggactctctctccgttgcccaggctggagtgcagtggcacgatcgtggctctctgcaacctccgcctcctgggttcaagcaattctcctacctcagccccccaagtagctgggatgatagggcccgccaccgtgtccggctaatttttgtatttttagtagagatggggtttcaccatgttggccaggctggtcacgaactcctgccccaagtgatccaccctcctcagcctcccaaagtgctgggattacacccatgagccactgcgctcagcctgttttcacctgttttctgaaatctgagtaaatgtggagggagagagtgccctggtgctggggtaccgcctagtaactggtggggagtgaactggaaggatgagaccagttccttttcccagcctggaacccgccccgccctccaggagtgcttggaatgtgctctttgaagggcccgagtcttccaccaaataaaggctttttcagatgctgattttggtgctgatgctgtgtggctttgtttgggttcagtttttatcctggctggcagagaggtctctaaaaatgagtccccgatgctttgtaaacatgacctagttgccgcagtgaccccagccgcccttaggaaaactggaagcccccgtggatcgggatccggcctccttcatccagggctgctggtcgggggaagctcacccgaaggtaaatcagagtggatcttgggaagagaccacttccttgggaaaggttgattaggttaaactctaacttgaccttcagttatccaaagtctctctccagggttagggtggaattttacatggcagaacaagaactaaagatgaccaagtttaagaaattgatatcataaaagtatagcaatttgccccgaatggtataaacttgtgtgtggcctggtaaggagagttctccctggtgtttttgtggctgcagcaggcgggaggctgttcccttcctggggctcccagcctggggtgaacttcattcctgccagcttctcagagcctggttggatattggtggccgtcaagtgctgcttttagaaaagaggctggtaaggccgggcttggtggctcacgcctgtaatcccagcactttgggaggctgaggcgggcggatcacctgaggtcaggagttcaagaccatcctggtcaacatagtgagaccccgtctctactaaaaatacagaaattagctgggcgtgatggcgtgtgcctgtagtcccagctactcgggagactgaggcaggagaattgcctgaatccgagaggtggaggttgcagtgagccaagatcgccccactgcactccagcctgggcaatgagcgagactctgtctcaaaaaaaaaaaaaaaagaaaagaaaagaaaaagaaaaacaaggaaaaaagaaaagaggctggtgggaaaatgtagttcctggaagcctcgcctagctgttgctgtgcacactgggggcccgaggccccaggatacccccgtgccttacccacgctatttgctgcctggcatccccaccctgtcatcccgagaatcccactgcatgttttggatctgtccgggatccctccttgttaggccaggtcagcgtgaggccgcctactgtgcctccttcccagtgtcacgttgctgcgtccacgagcctggcttccgcttccattctcagggtctggacagggccaggctcttcccaagcgcacagtccacataggctgcttatctggactcgatgtctccgagcagatcgaggctggcccacccctgctggcccgcgacccctgctggcagatcgaggctggcccgtgaccggggcaggcggaccttctccgggagccctgtgcacagttggcttcgcagcaggcctgtgtggtctgctagaaaaggggaggttgcagaagattttaactttgttaaaatcatgaactggttttgccgcagtaaagcgtaattcacatgatacaaaacgtcaaattgcgttttacgccattggtttggaccctggagcagtgaagttccacagtgtcatgataattcttggcgttgagtgacctcacgatgtgctgtccgtcttctcgctgttcagccagcagttcactgtctgtaaaataggtccaaaagccatccccacctccaaggagggagagaggatcgaatgagttcacttagaacaacgcgtgacacgtttgaacacggaagaacacggaagcctgtgtgttaggcgttaacattgttcccgcgtgaaggggtagaagaacaggcaaaatccatgatttttaaacgttaaattgtgtggcggtcagttagttcagcgccacttcttcttacggttttaattgtagtgtcaaaaaatttcacaaaattcagtttcttggtttcctcatctgaatgagaaggttggcacttaaatagaatctgtgactgactgttttgatgactttggacgagtagttcatctgctctaagcctcagtttcctcagtcgcaaacaacacaaatgcctgcttcctttctaagataacagaggtctcagaaagtacaggataggccagtgtactggctcacgcctgtaatcccagcaccttgggaggctaaggcaggaggattgcttgagcccaggagtttgcaggcggatcacctgaggtcaggagttcaaggccagcctggccaacatggtgaaaccccgtctctactaaaaatacaaaaattagctgggcgtggtgaggggtgcctgtaatcccagctcctccggaggccgaggcaggagaatcgcttgaagccaggaggtggaggttgcagtgagcctcaatcgcgccactgcactccagcttgggcaacagagtgagactccatctcaaaaataaataaagaaatacataataatgataataaatagctgtgtattttggagaaatgggtgcagccgggtgtatggccttctgctccttgtgggaccacaagggcatgttcttgctttggaagggagggtcacattcagggcgagggtgcggtggtggctctgcagccccagcggtgcaggttctgggctggtctgcacgggccacgatactgttcatagaagctgagctcagctggagccaccagttcccaccactgagaattacagccattccacgtcgtggatttttcccatttgttttcagcttgttgtgactcttgttccttctcctcgtctgtgtagttccttctgggtagagatgtgtctgtccgcattacctgtcgacaccgtcctagccactgggttctgggaagccccatcacggtgcctgagcttcacggagttgcagagcagcctggctttagagaacgcttagagaagatggagatggatggagacggctgtccatcagctgtgcagggccaagctgggcctggatcctacttagtctctctgacttcttctactcaagcatgatgtccgttcctgatgccttgccccgggcagcatgtgcccagctctgttcaggaagcgttgtgctggtgtgccctcctgggtcccgacacctgggggtgttttcacagggtgggaaggctgagtgtcctgggaagcgtccatgggatgtatcagtcagggaggctgggcgcagtaataaacacgcccagagtggaagggcttcctgtgagagggtgtggcagtccgggggtgggtcccagccagccgccagctctccctggagtgattcctggatgttgaggagggagagatctggagttaaggaagatgtgactttctcagtggccctcagacgtcttggcaagtgaagagtgtgaagaggtgtgccccatcccatggccactggagaactggcagaagctcctagagcagttggatggggagatcagagtgggtctcaagagtgccactcctcggcattgtgtggatgggcggtagtgagaataattactaagggcgtcataccctctcgtatctgcatcacccataaggggtgggcagtggtgctgccgtgtcttgtcaggaggccagctctgtgtcacccaccaggctgggctcagccacaagtcggcaacgtagtgcctccagggcagatgccacggaccgtagagaagcaacgcaaggtcagagagaaaagattgcggccggccggtgtcaaggcgggggacctgtgagctgggcctggagctgaggcagaacttgatggactatgactcaaggttgagatggggcagggactccgggggaggggcagagggcaggtgccgccgagcaggagggaggacgcggcaggtcacagagcccaccaagtccgaagctggaagttcagattctttgatattcagaggtggatcatctgtgcttttttttttttatcagtctctcactttttatccatcatctaattgtgacagcttatttgcctttataccataagatggggagtagggttgagatgaaatccaagcatcgtttcccttccccgatggtcgcctccctggggtgagacgttcgacgtgtcagacttcaccaagagcatctcccgcctcggtgcagtaatggacttggaaacgatttactccggcacttggttcctgtctccataaatgcggctgctttaaagggaatgtaaaaagggctgtaaattggtattgattgccggtggtcttgaagaaccccaactgaggattgaccgttccttggagtgaaggctccgcattcagacgcctttcgccttacgtcatcataattgagaagggaaaggagacgtgttagtttcagtctgattatttaccatcaaggcataaacacttctcagaggcagctgaacccatttgtcctgccccgcgcgcttatttgagaaggaacacggagagttgttagaatcaaaccaccgctctctgaattctgggtgtattattgcagtctcgaaaagactggtcatgtttgtctttaagtgtaccagcgatcaggcttctcattttacacctcaagggtttccgatcctcttacctcgctcatctgttgccctctcagataggagatacttggttctgtttatgctgcagagtgtgttcaaatccgtttatgattaaatactgctcaaacagccagggcagggtttattgacacacagcggcgtgatgaggatggagtggtaggggatgaatcattgctctctgttctgtttatttccagttgacaagaggtgacatttatttttaaatcgtgctcagagctctgtgacttctgcagaactccaaacgagatttcatttttaaaatacattaaagaggggcgataatgaccagtgccagcaaagggggcatgccttcttcctggcccccttaggccgataactccacatctggagctcatagataactttggttcaggtcatttaatccaagtacatttgtggcttgaaaaaagaattcttttcctgccctattaatttgctagttacttacattttgaaatagtcaacaaagttcatagctgtggtcacagcccattgtgtaattttaaagtcgttgaaaattattatttcttttctgtactgatcgtaacagtgctctgtgccaggccccaagctaggctctggggttggggcgggctgggattcccgctcactgagattcccgctcactgggattcccgctcactgggcttggtgtcgcggaaaaaacgaaggcagagaaagaattagaccacggtgcagccactgcagcttctgggccgggaaagccctgcgaggtcagctccctaaacaagagaatttgcataaccaccgtgtttttttttttgttttttttttgaggcggagtcttgctctgtcgccaggctggagtgcagtggcgcgatctcggctcaccacaacctccccctcctgggtgcaagtgattctcctgccttagcctcccgagttgctgggattacaagcacgtgccaccacgcccagctaatttttgtaatgttagtagagacagggtttcactgtgttggtcaggctggtctccgactcctgacctcgtgatctgcccgccttggccgctcaaagtgttgggattacaggcgtgagccaccgcacccagccccgtgttttcttttgagttttttctttttttctttttttcttttctttttttggagacagagttttgctcttgttgcccaggctggagtgcagtggcgtagtcttggctcactgcaacctccacctcccgagttcacgtgatttctcctgcctcagcctcccaagtagctgggattacaagcatgcgccaccacgtccggctaattttttgtatttagtagagacgaggtttcactgtgttggtcaggctggtcttgaactcctgacctcgggtgatccacccacctcagcttcccagagtgctgggattacagatgtcagccactgtgcccagcctcttgatttcttacccatctttaagatggtttttaaagttgtctatttttgagccctgaaaactggcccgtaactcccaaatcttgtcacctttacaagacagaacaaggagagaacagagatcatcttttcatgttgaccctattttcactgtgtgtgtctgtttgtttgttgagacagtctcgctgtgtcacccaggctggagtgcaatggcgcgatctcagctcactgcagcctccacttctggggttcaagtgattctcttgcctcagcctcccgagtagctgggattacaggcgtgtgcccccatgcccggctaatttttgtttagtagagaccgggtttcgccacattgcccaagctggtctccaactcctgagctcaagctatccgcccacctccgcctcccagagtgttgggattacgggcgtgagccaccagcctggcccctcttttcactttgaaaggaaaagtttaggtttaaagacattacttttgtgtgtcaaagtaggagtgcgtgcttgctttgctttgttttttcaaggctcatcttaaggattttggcttacgtattttctaagtaggcgttacattcccgcggttcaaaactcaaaaggtatgcggttaaaaattttgttttggttttttttcctctctctcatctcagtttccctccttagagaatcagttcccagcgtcttgcaaaggaagggcataaaacccagatgttttgtccacctgagtccgatttctccagagagctgcgatgagcatcatgcttttgtgtgcttttgggaagtctgcgtgcacgtggagttgtgtgtattcagggagtgtcttgttgtaacgtggttctgcatctttttcttggtacagaacagaagccacacaccagcgacaatcagaggttacataggcttggggcgtagcttttctgatcagatgagtttcacggctttagtacagaaaatattcaaagccagtgcagctggaattgtgatatagtgcacggtggaattgtgatacggtacatggtggaactgtgacgatacggggcacggtggaactgtggcgatacggggcacggtggaactgtgatgatatcgggcatggcgaaattgtgatacggtgcatggtgttttgtttcaaggagagatcgtaagtcatggcttcagtttgctggcaaagtgtgtctcagagtgaagccgataggatcaagcccaagtgttcagggcgctcagctgtgggtggcccgtgtacaggaatgggatcgcacggtggtccagatcgtctgtgcacccatccttgccctgcctccctccttctagggggttggctggaactcgggccccgctggccggcggtaggagctggaatgcccgagctctgagaagctcttcatctatcagcagtcagctttccacttaagcagagccaagtttagaatgaatgaataggatattttgaaatgctctggtgttgtgaaatacggaacttggcgagttcttgcggccatcccttttgttccctgctgtgactgactggcaggaacctgggcttgtcaagtcagtctgtagtgcacgccgttagattggttgtcattggccaagccagctccgggcaccctgaggttccctcacagcgaatccaccgaagagcgctcccatccacagccggctctttgaatacttaaagaaatgtaggaaaagcaaaactcacaagacaatccttccagccactggtcacaggatggccgttgctgaacttcaacattggccaccaatatctgctgtctgtgcttaaaggatcaaaaatgcagacctcagtcaggcgcagtggttcacgcctgtaatcccagcactttgggaggccaaggtgggcagatcacttgaggtaaggagttcaagaccagtttggccaatatgatgaaaccctgtctctacaaattagacaggcgtggtggtgggtgcctgaaatcccagctacctgggaggctgaggcaggagaattgcttgaatccagaaggcagaggctacagtgagttgagattgcgcctctgcactccagcctgtgcaacatgtgcaacagaacaagaccctatctacaaaaaaaaaaaaaagaaagaaagaaatacagacttcaaggtggaggttcacttgaagccaggagttcaagaccagcctgggtaacatagcaagaccctgtttctacaaaaaaaaattttgttgtggtcagctggatgtggtggcatgcacccatagccccaactacttgggaggctaaggcaggaggatcacttgagcctgggagttcagggctgccgtaagctatgatggcaccactgctctctagcctgcgtgacacagcaaggccctgtgtcccaaaaaaaaagagaaaagaaatacaaaccagcagaatgggccacctccaaaaagccagtacagtgggaggggccccagacatgtcactgtggcctgctgtggccacgggcagggccagagcctgagcctgggtccttctcaagacccagtgctgctcttggaagcgggtgagtacagaggccagtgagggcacagcaggttccgggtggaggtgctccttggaagctgtgtgagaggggctgtgggtgtctccattttactggtttggagctggcttacataggcgtcacaaaacagatgtctacaagttttcattttatgaactattttaagctgattgcttgatttttctttatcttaatagagattaaaattggttggtttgtgtctggcttgtatgtgcagcacatccccaggtgaagggcaagttgtacgtggtgggaggcgcatggctgggaggcgtgtggctgggaggtggtggctgggaggcgcgtggctggaaggtagtggtgggaggcgtgtggctgggaggcacgtggctgggaggtggctgggaggcgtgtggctggaatgtggtggcgggaggcacgtggttgagaggtgcgtggctgggaaggcatatggctggaaggtggtagcgggaggcgtgtggatggaaggtgatggtgggaggtgcatgactgggaggtgtgtggctgggaggcatgtggctggaaggtggtggcgagaggcatgtggctggaaggtggtggcgggaggcatatggctggaaggtggtagcaggaggcgtgtggatggaaggtggtggcgggaggtgcgtgactggggaggtgtgtggctgggaggcatgtggctggaagatggtggcgggaggcatatggctggaaggtggtagcgggaggtgtgtggatggaaggtggtggtgggaggtgcatgactgggaggtgtgtggctgggaggcatgtggctgggaggcatgtggctgggaggcgtatggctgggaggtgcctggctgggaggcacgtggctgggaggcagtggcaggacgtgcatggctgggaagcaagtgtctgggctgcgtagctgtaaggcaagtgtctgtgaagcgcatgacgggaggtactccaccctagccccagaggcagggcccttccctgcacctgacctcactgcccgcctggtcctggtggcctccttgtctctctgagcattgcagcttcatctgcacgaggaggcgcttgaaccctgcctctaaatgctgtttcttctgaagctttgctgcaccgtgtatgtttagttacaaacacactagtccatgctccaggtgaagaccgaccaccgccgtgtgttgcccgcgtctttgggctctggtctcagattgggtgatggttttctattgtaaaagtgggagaatattaagcatttttgcctcgtcacgttttcttcctgataaatgtccacagaccctggtttatggttttttactccccctgtgtgccatttcagtgttgaaggaaaggaaagtgggggtcgctgcctctgggggccctgttgcccgtgttcccaccagctccatggacacactttccatttggaaacaatcacagattcacaaggagcagcagacgtgttgcagaggtccctgcacagcccaccagcctcctccgacgcgtccatcagcatcacagccgggaagttggcatcggtgcgctgtgtgtggttccgtcatctcatcccgtgtggctctgcgaccgccacctcggtcaccacgcagagccatccccaccgtggcggccacgcagccattgtaaccctggaaaccagtaaatgcgtctccatggctgcaggcctgtcgttatgagaaggtttcagaagcgggctcgtccgcagctcagggccgtctttctgagttgtgggcctcaggagtggattcctttttattgctgagatgccactgggtggaggttcccctgtttgtttgaccccctgtctactgaagtacattagtttttccatttttcggcctactacaaatacaatagctgctgtgagcaaccatgcttaggttttgagcggacctaggtttccctcgtcagggtgagtacccgggagtgcagtgcctaaggcctgtccttggcataggttttgtttttaaagcaactgccgacctcgctttcagagtggctgccatattttaccttccttccacccatgtatgagaagcccagtgtctctgcagcctcaccagcatttgctgtatttgttttaattttagccattctgataggtatgtagcttttgtttttttgtttgtttgtttgagacggagtttcactcttgtcacccaggctggagtgcagtggcacaatctcggctccccacagcctccgcctccggggttcaagcgattctcctgccccagcctcccgagtagttaggattagagggacccgccaccacgcccggctaattttgtatttttagtagagacggggttgcaccatgttggtcagtctgatctcgaactcccaacctcaggtgatccacccaccttggcctcccaaagtgctgggattacaggcatgagccaccacacccaaccttgttttttttgttttttttttgtttgttttgtttgtttgtttttgagacagggtctcactctgttgcccagctggagtgcgatggcacaatcatggctcactgccgccttgaactcctgggctcaagtgttcctcctgactcagcctcccgagtagctgggactacaagcgtgcaccactatgcctggctaattttaaaaaaagattcttttaatagagatgaggtcttgctgtgttgtccaggctggttgcaaactcagcctcaaatgatcctcccgcctctgcctcccaacgtgctgggattacaggtgtgagccacggtgcctagggagtaggtagctgtcttagctttgtgtttccctaatagctaactacactgcacatatttttttgacagaatctcactccatcacccaggctggagtgcagtggcgagaccttggctcactgcaacctttgcctcctgggttcaagcaattctcctgcctcagcttcctgagtagctgggactacaggcacacgccaccatgcccatctaatttttgtatttttagtagagatggggtttcaccatgttggccaggctggtctcgaactcctgacctcaggtgatccacccgctttggcctctcaaggtgctgggattacaggtttgagccaccgcgcccggcctgcattgaacatctcttcatgtgcttatttaccatctgcagagcctcttcagtgaaatacctcctcgtgtgttttgtcctcgttctaattgaattgtttggtttttatactgaattttgagtttttcctgtattctagataggagtctcttctcccagcttgtgacctctttatcctctcattggacgcctgcgcccatccagagctttacgttttgatgacgtccgatgtgttgagttttttctttttcttttatagatcctgtttttggtgtcatggctaagaactcttcaccaagccccaggtcctgaaggattttttgaaatttgaatagtttttccctcattggtttctccctggctgccttgtttctggttttcagaagcctggttgagtttcttcgggttcatcctgcatggggctcactcatcttcagtctgtaggtttatcattctgaccaaatctgtacatttttcagccattatttctttgagggttttttgcctcatctgctttctgttcttcttctgggattcagtgacatgcatgggagagcttttgttatgtatggtctagtgtgtccctgagactcttaagatttgattttcagcctctttttctctgttgttcaggttgggtaatctttactgtttcagcttcaagctcgctgatttctttcctatggctttttcattctgtgtgagcccattcattgaggtttcatttcagctgctgtactttttagatgtaaaatttcccctgtgcctcagtggggatgggcagcctgtggccaacttcgatgctggcagagccaggccggggagactccagcctcagccccatctctcccgagcaggcagatgcttcctgagaattaggcagacctgttggaaactggctttgtatgctgcgtgcctagctttttactttttttttttttgagacagagtctctgttgcccagggtggagtgcaatggcgcgatctcggtgcagtggcgcgatcttggctcactgcaacctctacctcctgggttcaagcgattctcctgcctcagcctcctgagcacctggaattagagacatgcaccaccacgcccacttaatttttgtatttttagtatagacggggatccataaaagaaaaaaaaaactcaacacacgtgttagtcaggctggtctcgaactcctgaccttatgtgatccgcccacctcggcctcccaaatttagctttttacctaggtcttttttgtctttcagttaagttttgtagttttctctgcacgggccctccgtgccccgtccctttcttgctttactctgtcactgttgccgtaagtgctttcccgagtcagcagcctccctctgtgcatcagggccctggaggaggttctccgttcagtctgcacgcttggctcaatgcagcagctcagactggagcttggatcctggacatcgtgggggctttgcctgtgtgtggcagtgcacaggggccttggaaaccccccggagctccccagccttgagctgccggcctagccctgtgtcgctgcagcccataatggtgcaaccttctgatgaccttggtgagaagcgaccattccctgcgacccccagcctgtttcctgcaggtgacagtggctcagtaaaatgccttgaattctaatctccaggcgtcggctgtcagttaacttcagaaagaactttttctgaaactttgagaataagaataattccagctctccaatgataagagctcacagatggcagcctaagaaggacttttctcttttctttttcttttttttctttttttttttttttttttgagtcagagtcttgttgtgtcacccaggctggagtgcagtggtgcgatcttggctcactgcaacctctccctcctggattcaagcagttcttctgcgtcagcctcccaagcagctgggattacaggcgtgagacaccacgcccagctaattcttgcatttttagtatagacagagtttcaccgtattgaccaggctggtcttgaactcctgacctcatgtgatcctcctgcctcggcctcccaaagtgctgagattacaggcgtgagccaccacgcccggcctgttttcattttaatatttgagttttgtttttccaaattagatttctcaaatgtaaatgcatccctttctcgtgcaggagtaacggggacgcgcacagccgtgttactttctcccaaaggaggcagccggggtgagactggtgaccccgctgcatcccataccctccacccatcccagcagcctcatgcctgtgggtgggacgtgctagaggaggggactttggtggggccttgggctcttggtcacatcctgccctgattcagaagatggcggggcaggaggtgtctgtgtctcagcagatgctggatttcacgtccacggccgcctggaaataaatgccagcaccgtgcaagctggctttgcattctctgcctttcccgagcgtccctgcctcagattccaaaatctgttgttctagaaactctctaaggttttacccagattcccattgttgcctcttatgtactttggtcgttcgtatttcctaggcttaaaacccattctcctgtgaagaggccttccctgagatcctggccagaggaggtcccgtggccaagtggcagcggtgccggacatacacggcagggcagtgggctgctcagcaccagtggcctcagcccagtgccagcgtgctgggacgggtacactcgtgcctgttaaccgcacacctgcgtgcagcacgggcacactcgtatacaacgggcacacatgcacgtcagccgcacactcatgcacgttcatgtgctgtctctagtgttttctgagaaacgggattttccttgggtgaaacgaggaagtcgtaggagacccacctcagatgctcgggtgcacatctggggagagtcaaccgcccagcatggcttttggctttgggggattccgttcctttgctgctgccttggccacaggcctccacagccctctgctgtgtctgtgcaccttctccatccctctctcgtttgggctccggttcccgcagaattggcatccaggtgaggtgcctgtgggcagagctgttgatggaagagggtgtggtcagaggcagggcagttattgtaggaagaacccccaggagcaggtggccgacgcaggcaccctcagatctgagatccagacaagaggcagcgctgggttcagatcaccacacaacctgtatcagcttgtgatcccgaacaaaaacccgtcttcccaagcctgttgacgatgatggtaacggcaccgtgctcactccaacgccgtggctgtgagcggagccagcttcaaagcactgggtccagggcgcctgctcgcggtcacccatagggtgggtggacacccatggcggcttgcacgttgcacgtcccccggctcagcaccgagcaagtgggcctggaccctgaaggatgtggctgctgcccgactccagagtgacaaatatagcaaaagagcttgttggtaaatactgcctgaaaacattggcttaatttgtcttctcaaagctgtttttgttttctgtggggttttttttttggacgttcccagctgactaaatttgccttcttccttcagggaccatcttggaataatcttgctcagctgaataatgttgcagactaaaaatagcaaatgcagccccgagccttcctgttgcctctagggcctgtccatcccgtcagcccacggtgcctctacaaacacaggtccctcctcgccgtggtacaatcgccacggcacaggaccgagcgtggagagttgcagcagtgcaggaagcttttcctttctctcaaaacagttactaccaatgtttgtttatttgagatagggtcttgctctgtctcccaggctggagtgcagtggtgcaatcgtagctcactgcagcctcaacctcctgggctcaagcaatcctcccgcctcagcctcccaaatagctgagactaccagtgtgcaccaccacacctggctgacttctttgtatttttggtaaagatggggatctcactatgttgcccaggccggtctcgacctcctaggctcaagcgatcctcctacctcagcttcccaaagtgctgggattacaggcgtgcacctctgtgctcggcccattcgatttttaaaaccttaaatgaccctgcatcttctgctgcctactttttcgagggcttttggtactttggattattaagttgtgtgagtgaacatggtaatgaccttgccatagcagctcttggtgctctgaatggctgcgcaccaggcagtgcccaagacctccgtgctcccagctgggattctgtgcacatccagagtttgtgttttgggggtggttgttgttgttgttttctttttgagatggagtcttcctctgtcacccaggctggagtgcagtggtgcaatctcggctcactgcaacctccgtctcccgggttccggagattctcctgcctcaacctctcgggtagctgggattacaggcacccaccaccacgcccggctaatttatgtatttttttgtagagacggatttcaccatgttggccagggtggtctcgaactcctgttctcaagtgatctgcgtgccttggcctcccaaagtgctgggattacaggcgtgagccactgtgcctggcccagagttcgctttttctttggttggggagctctgacttaatttctctctgaagccaagcatttctattttgtccaaatgtgtcaatcaggggtctgtgcctcgttgtgtgtgtgtgcgctgcgtggctccacggcccccatcctagactgtggtccaggccagggctctgggctcagcagacagccaggctgcttccactggtctgtgaagcttctgtctcaatgctcaaggtggcctcagtgttcagcatggttgccagtgccccggtcattatgtttccattccagaggggagagaggagggagggatggtgggcggtgatcctctgggtagctctctgcccacctcttctgagactcccacgagggctgtgccgtaggccacacccactttgcattgctggcccccagctgcaaggggagcaggaaagtcaccttttagctgagtgcgtggccacacagaaaaatagtggggacagggagaggagaagtgggtttggggggagccccgccctcctaaccctgcctgctgccctctgtccccagcaggagctcccccgaggccatccaagcgcggtgcacccgccacccacagcgtcctccgcgcccacgttgccctaaaccccactgtgctgtgctctctcgcagttcctgcaggcgcgcgttctctctctgaatttgtttcatttcactgcgagttggggtcgcgggggtagatcggagctgcctcttgagaatagcagtgcccaggctttggcccaggtggccggaacgccccttggagcaccgacgccatcggctccgggaaatgcagcgagcacagagcccagtcccttggtctgaccgggggcgctgcttttgttcagaaagcggtgggggtgatgtcatcggattttttttcactgctgttgcccaaagtgaaaccgggcttagttgttgtctcaggagcccagccagccagggggacacggcctcctgcccacaggcagaggcccggggccagatgtccgctttctctttcgctccgcaggagtgagaagcaaggacctcactgcctttgtgcggccgggcccctccggccagtctgcgtgaacggactctccgggcctcgcccatgctccgggcgtgtggctgtgttgggaggacgggagctctactgcttggcagtggacacaccaaggctgccgactggcccagtgggtggcgatgccacttacatgtgatttctcaatctccgtcaactgccgtggctgcccgggctgggctgccctgtaggtttcagttcttcagggcaacaggctgggatccaggcaaggtgcctgcactcagaggggtagggagccaggggcacatgtgctgggcgtgggctggggcttctggctggcaggggtgtgggtttgggcctggtgggattccccatattaggaaggtgagctgagctcggctgcagtggctgaagcaaggaagtgatttgtcaagccatttagacactgtccctgttttctttcaacaaacagaactttttttttttttaagcagcgaagaccttttgctctctgttggggtgtgattggggtttgcatttgggggctctcttgagctttgccgctgtcttcaaggatggtatctaaagggaaagtcttaaaataaataactttgaatttggataggaatgtctatgcagtgagggacaggaggcttccgtgtgtttcactagaacgttcttgtttttggcctacgaatgcttttacttaggaagcacgagacctgtgctgcagaccgtctgttggagctggccgcggcaggacggcgatcaccttcctggcaggcccctcctggattctgccctctgcttctgaaagcgtttcctccatcagctttagcaaaactgggcctggcagatcatttgaagtcaggagttcgagaccagcctgaccaacatgatgaaaccctgtctctactaaaaatacaaaaaagttagccgggcacagtggcacgtgcctgtagtctcagctactcaggaggctgaggcaggagaatcgcttgaacccgagaggtggaggttgcagtgagccaagattgtgacattgcactccagcctggacgacagagcgagactccgtctcaaaaaaaaaaaaaccgtgcctgggccttggaggtgcctgagtccagaagacagacagcgggagctcactcctgccatgtcgctcttgtttcttctcccctctgcagggcggcagctgctttgccctcaagacttctcttttcgcccactctattcatagggggaaatgacaacacaggcgctttccctcaaactctgtgtattcatacatcaccagagtgttcagagaagtgggatattttggtgagttaatttacttaatgtgcttagcacacagtacctggtatatataataatagcagatattagttgtcaactactaattttaattttttttttttacaaacggggtcttgctctgtcacccaggttggagtgcagtggcacaatcataacccattgcagccttgaattcctgggctcaagtgatcctcctgcctcagtctcctggagtagctgggactacaggcatgcaccactatgccaggctaatttttttatttttattttttgtagagacggggtctcactctgttgcccaggctggttttgcactcctggcctcaagtgatcctcccactttggcctctcaaagtgttgggattacaggcgtgagccactgctcccagcctattattattatagaatttcatgttaaggtttgcaggttattcttttactttatttttaaattttatttgtttatttttttggcaagggcgtcttactctgttacccagcctggagtgtgatggtgtgatctcagctcattgcaaccttcgcctcccgggttcaagtgattcttgtgcctcagcctctggagtagctgggattacaggcatgcagcaccacgcccagctagtttttatatatttagtagagacccgtttcaccatgttggccaggctggtcttgaactcctgacctcaggtgatcctcctgccttggcctcccaaagtactgggattacaggcttagccacggcgcccggcctgattttgcaggttgttctaaagtgcggtgtttctccttttaggcttcagtgctgagggcggcctgctgtccgtccctgcggcagactgggccctgtcccaccttcccgtcactcctcgatgtcacatcagagtgctctctcctgggtgggaacccgcgcacggaggaaacactttaccagagtaaacgagattataacttgtttgccagagaacctctcctgtggccatgcctgaacctctcctgggactgtccgtggtcttcacattggtgcttggacacccgtccttcgggaggggaggaaaagcggccggtaaaatggagacagtcggtggcgtgtgtttgccgattggactggcattggtatagacagataccaatcactgcacagacatttccaggggcccttccccagccatgtttagtggcactgacctcaggcagctgggcccccgggacagcaaccaggggactgccctggccctggatggcagccgggaccggctcacaagcttctgtttggagcagttctgttggcagccccccgcctccagtggagatgtgacacgactctttcttgcctgccaaacgttctctgattctttggatcatcgatcctaacacagcaaaggcggtattgttgctgtcctttcaaggttaatccaggatcagaaaagtctaatcatttctctgtggtttttggaatttccaaagagcacccagattttaaccctcagtcctcggggttgtccggctgcggctgtgctgctgttgagcattaagctcattccacttcacatgtaaacttgtttctatgcattcacctcctgggagactccacattcctgagagaactgcatggttatgaactcttactcgtgtgcactaaagtgcacgtgctgtgtgtgtactgaccctctgccctgtgggagccacgtgctgtggggagaacagaccagcagcagatgggactcctcctccaggaacctgctaccagctaggcgtggtggtgcaagcctatacttctggcactttgggaggctgtggcaggaggatcacttgaggccaggaatttgaggccagcctgggcaacatagtgagaccacgtctctttttgaaaaaaaaaaaaaaaaaaaaagaaagaaaagaaaacgtatttttcttaagtcgggcatgagagtgagccagggaattcaaggaaggctgcctagatagagaaggggaccctggggaacagtcttagaggacgcaaagtctatgcagataaaccagcgtctggtacttggtatcagtcaggtggccagtgaataatgactacgtggaattactgtggacagcattttgagatctgcagattaagccattttgacttcccagaagcattttcttaaatcagcgtagagacagaagatgaaagttaacctgaattgctcgtcgcaagcaagctctgcccgggtcagccccagagggttgcagaacactgtgtctgtgtccgctgtcttaaagagcctagtccatctttacgcggtctttttacgtctgtttaagccacacagcatggtggggagcggaggtgatttcggagcctactctccgatcctcaggatcctcttcgggagcagcaggcagtggctttctcctgggccaggcagggttgtctggggagtggaacgtctgctagaaatgcagatcgctggggccaccgccgtttggccgtgtcagtcatctgggggtcccttagcctccgcagagtaaagctgtgggagtcaccacgggtccccatgttgggattgggaagcagtcacctaccagatgagcgttccttccgcgaagggaaggtggggggattttgaaggagctgtgaacaccgagggtgccgtcctcgcctgtgctgccatggggtgctcaggactgccgggccccgggagccccacccggcaggacacacacctgagccccagggagggtcggtggccatggctgtgcttggccgcctctgtggggctctatcctaattcagtgaggtctctcgccaccttcctccagggtcttcctgagacagagaccgagacttcagcttcaaaaagaaaccctggccgggtgcagcagctcacgcctgtaatcccagcactttgggaggccaaggcaggtggatcacctgagctcaggagtttgagaccagcctggccaacatggtgaaaccccatctctactaacaatacaaaaactagccaggcctggtagtgggtaccagtaatcctagctactcgggaggctgaggcaggagaatcgcttgaacccggaaggtggagtttgcagtgagctgagatccagccactgccctccagcctgggcgacagagcgagactctgtcgaaacaatttaaataaaaaaaagaaaaggaaaaagaaagcccggcttcggtcagaccgttgtctgcgtttttcaccgcgtgtcaccgactcagcatatgggcttgagtatctcgctgtcttttctttttccaaataggacatgcttatttgcctgattacaaaaatagatgcattctccctatttaaacaaattaggccctatgaacgcataagaacttataaacactaaaactgctaccgggttttaattcacacacaccacgcacacccccacattgttgtcactgcgagaacggagggcccagagccgagtacactcggccagggtgagtgatgggcaggcacagagctgtgtctctgaccaccctgctacccagcttgccaccgctgtcagccgtggggttcaggagaacagggttgtggcatggacccaaaagtggagtcacggttgcagctctggttcctggaggagggacgcaggcccagtggagagggcgtggtttgcaggcaccagtgctggttccgtgtctgtcggggaggggatggacgtttgtgttgctgtcagggaccttgccgacccagcccccgccccgccttcaagtttgtgccttattttccaaagccgccacacttgagacgtccttgctgcgggttcgtctgtaacctgtgtcccttcactgccatgcactgctcttagctgctggcgaagacgtggtctctgcaatagagaggcgcctatggctgcagccacctgtgttcgttttggggttgtcataaataaatgccttccatttttaatagaaagacagtattttaggttaaaaaatttaaggttgtcagaattctctgatttggggattttatatgttaacgtttctttcaaaaccatttcctgaggatgggcgcggtggctcactcctgcaatcccagcactttgggaggccgaggcaggaggatcccttgaggccaggagttggagactagcctgggcaacataacaagaccctgtctctacaaaaaatcaaaaccatttgctgaacagtcttatttctcggaggagtttaagcaaacactgcagggcctccggcattccagtttcaggccttatctgatgtggcccaccctgggaccgtcacctgacttcctgtccctgcacagagaacttgctggtaggaggtggtgaggggcctccgaggtggtgggtgagcatccctgcaagtcaagctctgctgttccccggccttcccttgagactcttgggggcctgggccctgcgggacgttttccccctgcctcagagccaaaccacttaacagaaccaggcgagccaggtttagtactttatcgggtatcctaaagacacgttgcagcctgcaaaattcgaaaagtacctggagtatgtaacagcttttgcctcccattcttgagtctttcatttcttcaaggacatggtagcaacatttaaagaaccttttgaaaagagagaggcggccgggcacagtggctcacgcctgtaatcccagcactttgggaggccaaagcgggtgcatcacctgaggtcaggagttcaagaccagcctggccaacatggtgaaaccccatctctactaaaaatacaaaaattagccgggcatggtggtgggcacctgtaatcccagctactcgggaggctgaggcaggagaatcgcttggacctggaggcggaggttgcagtgagctgagattgcaccactgcactccagcctgggcaacaaagcgaaactctgcctcaaaaaaaaaaaaaaaaaaagaaaacagagaggcctgcttataacaccatccttatcctgggctgttttcctttgtccttccagtccttgtctaataacaagaataactgaagcacattttcagtaaccgcttgctacgtgccagccgtccggtcaggactgatgttcacggcatggagacctgaggccacacggaggccgggctggccagggcggggctcagattcagtgacttgcccaggtgcccccagggcatctgagcagcccaggctccagccaggcaggtctgacttcacctcccttgccgtgagccgctgcactgttccacttgggcttctgctacatttatcaagctgttgtaaacgtttccatattcccccacgcctcagtatttagcgagggctccttatgtgtgacacgccctgtgtgcgtctgatgacgttgcttggaatcatttgttcagtccacaagaactctgattatgcaccatcattaccccagtttggctgatgagggaaaccaggccagtgtatgaagagactgaccaaagatcccagtgccgacagttctccattcattcattcattcattcagtcaccatcatagcccactgcggcctccgctgcccaggctcaagccatcttccctcctcagcctcccaagtagttgggactacaggtgtgcgccaccacacctggctaatttcttaaacaatttttagagacaggatctcactgtgttgcccaggctgatctcgaactcctagggtcaagcgatcgtcccacctcagccttccaaagcgctgggattacaggcgtgaaccaccgtgggattacgggcatgagccaccgcgccagccaatatgcatagttttaaatggccatagtaacgcaaggcttcaaacagaagtcctcaggtctcacttcgcagaggcagtggcttttaaagcatcctgattaacagtctgagctgctattcactgagttttcgccctgttgtagacacacatggctttccgttagagaagacagggtctggctctactgctgccctcctcatccggagccgcgggtctgcgctgcacgccccttacacgtgtgcctctttcccatagcgcagagtttatcttcttactcgtccagcgttctctgtacctattgtgaattgatctctggacgctgacccaactctagaacttcgctcagcagttgggtaagacgacattcctgtccttcagttctcctgggaactttctcctgagagccctggctctctcctgcacagctctgggctcctgcacagcttctgttctggggcttttcaccctcttcctggattctttcagttaggacgtagttttgattttgcaacaaaggtcaaaaataacgagggccaagtttgtttcttttatacgtgacggtctttttttttttaattttattatttttttatttcaagctgggttcttgctgtgttgcccaggctggtttcaaactcctgggctcaagcaatcctccaacctcatcctcccagagtgctgggattatagatgtaagccaccctacccagccacacatgaccatcttaatgtcagctatgacctggaggcaccagactttttctattacgttgcttgttgctccgttatgcagtgtgcctttatggtccactgtggctgctcggctcctgccatcacagcagtatctggctgttgggaaggggaggagtgaagaaggcccttggttcctcatatagacatgacccatttgtatcccattgaccagctcatagtctcatggttgcaagaggggcagagaaacatggtcttcagttgggtggacgtttctctgtctccatgtttgctatagaagcaggagagaaggtgctctgggaactacagcctcagccacagtccaggaagctgcccagtgcccacatgggaactgcatcctgcaggtatcgctcgtgaaaaccggcctggcgtcttctggcccttgctcttgggtctgctgtttctctcacgggagaggctgctctgaggtccccgaagctgcaggctgggtgggacggtgggagcctttccctggtctttagtccggctgacatcctctctctggccgtcatagccagcgccatgggattggggaagccacagggacctcccagcacgcgccaaccctggacttcccccagagctcatctgggtggcaggtgctggccacgtggagtctgccctccacgtgccgtgggtgaagcttcacctggcgcagggaaggccatcagacttccagctcgtcacccatgtcctcaacccctaaccactgaagcgatgcctgtgttttaaccttagtaaccgtgccgcccagctcctagaagacacgcgactccacagcagttaggagacagcagatgcattcccagagctcctgagaaggagcggcttgtgtggggtgactctatctcaagccgtaggcctcccagacagagcctctgaagctcctgttttctttgtccttcctgagacagatctcatccagcctcttccttttgatgttttctgagtcactttaaactgtgcaagatttcccgtttcccctggctgtggctcttgtggtcctggccttggtgggcaggtgcagggcccgctccctccttgggaggatgagatgctctgtggcttccaccactccccagatcgtctgcttcctccttgcccctcaaactcctttgcctcagtccctgtcttccttgatgggggcattccccaagtgtctgttcttgtggaaggggaggtgccccccggcccacccccccgctgcccaagtgtgcgtgggcatcggtgcacggggctccctccctggggcttcatggggggctcaggaaggctgggtctcaggcttttctcctgcgccattgtctgctgatagctgggctcagctctggaagcttggggggctgagagcctctggtcctcctgcagaatttcaggtcgcaaggctatttttggcgtgagatgtcactgtctgccgcttctgtgttgggtgccctcgtccaggcctcgggttcaccccatccagaaagtaaacccgtccttccgctgggagagacggggcgaggggacagcggtggacaggagcgatctgtcacattcattttaaaaatcgcctccggaagctttcacgggctcttccttccctctctgattatttctctgagtctgaaatgatgacaattgtatttatatttatgtcatcgagaattaagtgagctatttttattttcctgacagctttctgtttggccgggcaggtggtaggatttgtggcctagggaggggatgggaatgaaggcacatgacatgccccaagtcactcgggctcagcactggtggagcggtggccagttccagctcgctgtgtagagacggctctgtggtctgaggctgagccaggcagtgtcatctccaaccaagtcaccagtttggcccaacttccaggagccatcagcttctgggtggacctgggaaaaacccagggctggagtagaccctcagtgtgggagcttttgggcaagaattctccccaaaaacagcttgcctgagatcgactgcacataccttacaactaaccctttccattgttccagtccgtggttttcagcgcattcgcagagttgcgcggccaccaagtcaacttcggaacattttcctgactctagaaagaaccccctagctcttagtcattctccgtcccccctgcctgtcccacccgtcactccagccctaggcaaccactaagctcctttctaagtcgggcaagaatgttctggagagatgtcctccacagatgggcacttgctcgtacaggaacctttccgccgggctggtggacggagatttctactctgtggacacacttaaccttagcggaatctccgccggtcaagaccggcagtgtgtgtggctgggtttaaaccaccgtgcagcaccttcacgatgcaaaacgtgctcgttcagactccagctagagccctgcacctccatcaagatattacagggagagatgtaactggcaaactccctgagcatgctggggaaacatctatttaaaaatcaagccaggtgcagcggctcacacctgtaatcccagcactttgagaggctgatgcgggtggatcacttgaggtcaggagttcaagaccagcctggccaacatgaccccgtctctactaaaaatacaaaacttagctgggctctgtggcgcgtgcctgtaatcccagctactcaggaggctgaggcaggagaatcccttgaacctgggaggcggaggttgcagtgagccgagatcgcaccactgcactccagcctgagtgacagagcgagactctgtttcaaaaaataaataaaatcaagtagcatgcttcatagcattttctcctcctcctagtaatgaggccacctgcctcaggacaatcactgttacggcagatactgtgaaaatatttattgttaaactttaattggaaagctactattacagtaggaaattgtcatctatagatggcattagatccctagatccctgcctgtcctataaaacatcgttttgttttagtgaaaactcaatacatatgtacatatcatctagaatcagttttgttttttttttttttttaagacagagttttgctctgttgcccaggctggagtgcagtggtgcgttctcagctcactgacatggccgcctcctgggttcaagcaattctcctgcctcagcctcccgagtagctgggattacatgtgtgtgccaccatgcctggttcattttttgtatttttagtagagaggggggttttgccttttggccaggctggtctcgaactcctgacctcaggtgatccgcccacgttggccactcagagtgctcggattacaagcctgagcctccgtgcccagcccataatcaggttttgaactggaaagcacctttgagatggtgtcttctattccaaccattctgttttattagcaaagatcacagaagcgcagagaggttagggtgagtggttctaaaccaattttctcttttggtggcgttcacctttgtctcaaatccgcacaccttacggctctcattcctgccacaatttgctctttgaaagggagaagtcaagcctgggaaggcctttccaccccactggagttggggagtgatttagcccaaggtcagatgggctctggctagtacctggctttcaggtgccagtccagagggggaccatgctcctcttctgtgcgtgtgtgtgcatgtgcgtgtgcaaatgtcttacgaaaaaacacctcttcatgtcttaatatccaaaccccgatctccaggatccccttcttcttgtgacctcagtcatgggccagaagccacatcttctttctacttggccttgatggctgcagcgtgatccgatcccatattaacatagggactttcacgacacagaaagtcagaggtctcaactgtgcccttctgacaaataggagaacatggtctgtttcgttgatttgcagtggttgagggaactggagaaaagagacaaatggcaagggccatagaagctatctttaaacatttgtcatcatgactgccatcgtgtccagcactggtggaacgggtaggtgtgtgtgcatgcgtgtgtgtgcgtgcacgtgtgcatgtgtgtgtgtgcgtgggtgtgggcgtgtgcgtgggtgtgtgggcgtgtccgtgcatgcatgtgtgcattcatgcacgtgtgtgcgtgcctgtgtgtgtgtgtgtgtgtgtgcatgcatgtgttgatacagacatggacactgtgttcattcagcaccgtcgttcacagctggagttcaccttaggtcccctgcctggaccctcagccagatgctggccccaaacctctttccttgcttccctaggtcagggacaccagtcccatcctcagacaccagcttgggtggatgtcggctctgggacccacaaaagctaacagcccccaggactgaagagcccttgggtatcatagagcatcttagaaaatgggtgatgcaaggccgggtgtggtggctcacgcctgtaatcccagcattttaggaggccagggcaggaggatcacctgaggtcgggagttccagaccagcctgaccaacatggaaaaaccctgtctctactaaaaatacaaaattagctgggcgtggtggcgcatgcctgtagtcccagctactcgggaggctgaggcaggagaatcacttgaatccaggaggctgaggttgcggtgagccaagattgcgccattgcactccaccctgggcaataagagccaaactctgcctcaaaaagagaaaaaaaaaaaaaaagggtgatgtggccagtcacggtggctcatgcctataatcccagcactttgggaagccgaggtggttgggtcacctgaggtcaggagtttgagaccagcctggccaacatggtgaaaccccatctctactaaaaatacaaaaattagccaggcgtggtggtgcgtgcctgtaatcccagctacttgggaggctgaggcagcagaatcgcttgaacccaggaggtggaggttgcagtgagccaagattgcgccattgtattccagcccggatgacagagcaagactccgtctcaaaaaaaaaaaaaagaaaaaagaaaatgggtgatggagctttctagtcaaaatactgatgcaggaaatctccactgggctggactgaagaaagtgtaaaggacatcagacgttcctctcaatgtgacttaagaggacagaattgtggagtattttcaaatagccttgggatgcccttctaaacctcaggggtgaccgaccacccacccttatcccccaagattcactcgctgggccgtgcctcccagacagcttctcatcttggaaacagtctcagagtcccttttgtgtttggaagtagaaacctggtgcccacaggcctgacagcgcctggcactgaacgatgcggcccagcctcctctgaccagtatctcggggagaatcaggactggcccagttgagccagcttaagtgcctgattttctctcttccatgtgggcagcctggctagcagacctatgggaggagccgcacatttgtaatgctgagtcacttcctttgaagcgggtccctgggaagaagacgcaagaggaccccctgccgacagccaggcacccttcgtcaccctctgacctgctcctcagtcccgtctttcaaaaacgctttgacgaagagcaaagggactttcatatgaaagaggggtgtctgcgcacgtccatgcaggattttacgtagattgactatttaaacattgctgcagatttaaaaacacagtcaggcatagacccagcagcctggtgcttcatgcaggttccactacaagagaccttagcgtctctcaagtgttgagtactttgcccgtcctgaatgccttcgggaactctgaaaagcgcattatcaccggtggcttatgtacattctttcttaaccccctcctacaattttaaacaagagccttttccaaacagctgcgcaggcggccagcgttccttatctctgtgtgggcaggctgctgctttacattgtttttgtttttgtttttgttttgttttgtttttaactgagtcccacagttagcaacttgatagttgctgcctcatcagtttagaaattgaaaggtgacctggataagtaatgctcagctttgtaaaaggtggcagtttcttcaagccagatgaaccctggatactgttcacagcacactggtgttgaccctgacgcttgcggctggctttgtttgcacttggtcgtctccagtagaaaaaccgaggctcacggttttaagcccagaactgatcgtgaagccggtccattaagctctgggtggataatgcacgctctctgcgactcccgcctgccggagcaggggtggaattgctccttccgttgtcagatcttctaggcagtggcagggaatcatcttgaaaatgtctgcataggtggttgccgtgctatttcagtcttccagtgtgtcatttgagaggtggcagatcccacctgggtgccacagcagttgccctggcagacaggaagtagccgtgtctgtctggagcctgcgtgggagatggcatcagcggcacttgtctggggatatttatatctcttctgttctcacacacagtagaaagacaactgacggctgggcacaatggctctcgcctgtaatcccagcagtttgggaggctgaggcaggtggatcacctgaggtcaggagttcgagaccagcctggccaacgtggtgaaaccccgtctctactaaaaatgcaaaaaattggccaggcgcggtggctcacgcctgtaatcccagcactttgggaggtcaaggcaggcggattacgaggtcaggagatcgagaccatcctggctaacacagtgaaaccccgtctctactaaaaatataaaaaattagccgggcgtggtggcgggcgcctgtagtcccagctactcgggaggctgaggcaggagaatggtgtgaacccaggaggcggagcttgcagtgagctgagatcgtgtccctgcactccagcctgggcgacagagtgagactccctctcaaaaaaaaaaaataaataaaaaatgcaaaaaattagccgggcgtggtggtgggcgctcgtaatcccagctactcaggaggctgagacaggagaattgcttgaacccaggaggctgaggttgcggtgagctgagatcctgccattgcactccagcctgggtgacagcgagactccctctcaaaaaataaaataaaataaaataaagaaatagaaagacaagtgacttccaaataagccaaagtctcagttcctaagtgtcctgataaaagcatcgaaactgctctctggggcccaggtttgagagttacggtccagttacttagacacacagacacgcaccttccctgggtgttggcgtcttcttgagtctcctcctgcacctcacacccgctcctcctcctgttgcaggtgtaccttccggtttcccagcacggccatcaagatccagttcacgtcgctctatcacaaagaagaggccccagcctccccgctgcggccactgtacccccagatctcccctctgaagatccacatcccggagccggacctccggagcatggtcagccccgtcccctccccgacgggcaccatcaggtgagtagccccccagcctgcccttgggcccccaggagagagggggatgatgcgagcgtgcctgtcgtacgcagcaccgggttccaaatctctctggaaagttgcacgtgcatggaaatacagaaagtgttgtacgtccatccgggacctggctgaaatttccgtgaattctcttacaaagggaaaaatcactgcctgatcatcacttttcccactggaaattttacatattagagcttgttaaagcaagcacaggtttttttgttgttttttgtttttttttaaagggcgttgaaaatgttttttttttgtttgtttgttttgagatggagtttcgctctgtcacccaggctagagagcagtggcgcgatctcggctcactgcaacctccacctcccgggttcaagggattctcttgcctcagcctcccgagtagctgggatgacaggcgcctgctaccacgcctggctaaattttttgtatttttagtagagacggggtttcacgatgttggccatgctggtctcgaactcccaacctcaaatgatccacccgccttggcctcccaaagtgctgggattacaggcgtgagccaccgcgcacggctgaaaatgttttaaagtaatatttgtccaccaggatttggtgaactttgtttctttaagcttcatttgtgaaaattctctatgaccttttagaaattaatctagattttgaagaaagtcctcaaacttcctcatctctggcatgttatacaatgatgagcccctgagtaggggttgcaggtgaaaagtataaacagagctctgtgtagggagtgccggtgagccctagactgagtcacacacgaacctcaggcgacagcctggatgcatggcacacagccctggccctggtcctgtcatacagggatgcaaaaacagacgtgtacttgaggctggagggttcatacattctttaatgatttacctcttcattgcggacatttctaaacgtggctggcttttctctcccaaccgcacgtctgtggctctgcagatgcgtggctgcgcgtggtttggtgccggagctgtggctcctccgcagcaccagcagtttctgcgtcgctcgcgcgtcaccagcaaaggtcaccccagtggaaaaagcagatcacatcttagggctgttgtgaacatggtgttgacctcacatataccctgaaaggggctcagggccctcggggacatctgtgaagcacgctctgggcatgctgatctgttggagcgagcgctgtggcaatcccaggctggtcacgtcagtccctccctgctgatctgcgcactctgctgaaccccggccgcaccttggcttgcttttttctttttttcctcttgcagctgtaggagaagaaagggcttttgtttgtatttcagagacagcgtctcactctgtcgtccaggctagagtgcagtggcgcaatcatagctcgctgcagcctccaactcctgggctcaagcggtctccccacctcagcctcccaagttgctgggaccacaggcatgcaccaccacacccacttaattttcttatcttttgtagagacagggtcttgctatgttgcccaggctggtctgaaacccctgggctcaagagatcctccctcctccacctcccaaagtgctgaggttacaggtgtgagccaacacacccagcccgtacatggcctgcaccttttcagggtccacagttagaactacacactggcttctcttggaacacagccatcaggggcacagctcctctaccctgctttgccgacaagttaccagtgacctacaagttacaaggtgggaatcatctccatttgagttgcttggagtaggtctccttttttccagagccagtgggtgggagtgtctctcgtggagagagaagttcagggacagtgctgctgcggaaaggagaggccccgggctcaggccgggcatggtcacctgtgtgactctgtgcggtcacttcagccccccaccttcccgggcccggttcccgtctgagtcagtgctgtgacgtcatgaccctctgggatgatgatgatggtgaatcctaagtgactgagagcctggtgtgtgcccgcctggccctgtgctgagcagtgcacatgcagtattttatgtagtccatacagctttgagaatgttccagaagtagatagtggtgatggttattcaattttgtgaatatcctaaaagtcactttaaagagtgaactggccgggcgcggtggctcacactggtaatgccagcactgtgggaggccaaggcgggtggatcacttgaagccagttcgagatcagcctgggcaacatggtgaaaccccgtctctactaaaaatacaaaaatcagccaggcatggtgccatatgtctgtaatcccagctactcgggaggctgaggcaggagactggcttgaacccaggaggtgaaggttgcagtgagctgagatcacgcgactgcactccagcccgggcgatagagcgagactccatttctcagtaaataaataaatggtgaattttatgttatgggaattgcatctgaagaaagcagttgagcgcagtatatgtacttaagtcttcacctagtaccaccttaaaggcgctgtagaaatggtggccaagaccagctcacgtgctagtggaagctcacaccagaagaggctggtcctgctgcttttggggcgggtagcaaaggcctcaggtccagagagaagcaggccaggcagcgatccggggctcctgaggaagggctaggccagcgcccccgccttagcctgggagtgggttattaatcagcaggttgtaatccagctaaacagaagctttttttttttttttgagacggagtcttgctctgtcgcccaggctggagtgcagtggcgtgatcttggctcagtgcaagctccacctccctggttcaagcaattcccctgtctcagccttgagagtaggtgggaatacaggcacatgccaccacgcccggctaatttttgtgtgtttttagtagagatggggtttcaccgtattgaaagaaagaaaaatgttttggtttgctccgggagggggcttaaaaaaataaaactatttcccagtgttaatccaaatttgcatagtaaagtcgcttttattacaagagaggttgtggtttgcgaaggagttaagtgatacctgtgttttaaattacggcagggaaaatactgtttatttttattttatcttagcttcagggggtacacgtgcatatttgtgacatgggtatattactggtggggattgcgcttctggggttcccgttacctaaagggtgaaccgcgtaccccgtaggtcatctttcacccctcgccctctcccgcctccctgcttaggagtcccagtttctcattgtttcgatcttcctgttcccgggtacccactgttcagccactgcttgtaagcaagagcaggcgctgtgcggtattgtttctgagttggttcacttgggataagcgcctccagctccatcgcgttgctgcccaggtcaagatttcattcttttttatagctgggagtaaagaaattgtgtactgagcacctgaagctcttgcagctggagctgttctgagaagctgggtggcggcctcctgtgactgcgagtccccgtcagggggtgcgagcagctccctgggcctgcacctgccctgctcttgctgcgggagccaggaaggtggggggccacccctttcccctccttccgcccagtcctgttctttgaaaccgccctgtgcaaagaccggattcttgttggggagaattctgtgcggagaaagtagtaagttagggactggctgtctggctttttggccttccattgttacaataaaagcctctctgtttacatccgtttatcttagcaccctggaattcaattgagtgtttagaaacctcagaggcccttgaggttttccctgccaagatacttttcagtttgagtttctgctgtagggtggagccggcgtgtttacaaacactccctgcccttccctgccacctccccactctcctcctctctggctgcgctccctaacagatcgggaggtgggagcggggccaggccagaagagctggctgcctgcaaggctgtcccctcccagtgccgccccgcccccgcggtgcctgccttcctaatttggtgtgcattcgcctcgccagtcctcattggccgtggagtggctggctcggtgtaggccgggctcgcccagggcccctcattcccaggagtcgggagtggcttgggagcggctttttcctgggggagcctccctgatcagctgcccctgcccccgccccccgcgccaccctgcgtccttcctttccgtttctcgcaggccctcgctccttttcccagggtgggtgggtatgggtgtgggtgtgtggttttgtgtgtgtgtgtgtgtttctgatttatttttttctgccctgaagtactccacccagaaaatgaatgaactctctttgaaataaattctgctatctttagcagaagtttgaccttttctttcctttttgcaaagaaggatttttacaggccaggcgcccggtggctcaggcctgtaatcccagcactttgggaggctgaggcaggcggatcacctgaggtcaggagttcgagaccagcctggtcaacattgtgaaaccccatctctactgaaaatacaaaaatgagccaggtgtgtaatccaagctacttgggaggctgaggcaggagaattgcttgaacctaggaggcagaggttgcagtgaaccaagattgcaccactccagactgggcggcagagcgagactccatctcaaaaaaaaaagtgtttttaggaaggaattaaagtatttaatgaaagaattcaagtagttaatcattttctaggttccatcagacagacaccagtctaaaaagtgttccttagaggtagagttttaagaaaactgctgaaattcagtgaaaggacattgcacagagtgactgtttttgctcatgagggcaagacttcaagagctgtttctcttaaggctcttcctgatttctccaacgtggagatcaaaaatgaaagtaactcgtacaattcggcgaaggtcagcagtatgtaaatatacagtaaaaatgcagcaactgacttcaaaatctttcccttttaatcatgatttttaaacagttctgtcttattgctagataacattcagtcctaacttggtttatgttgttttgtaaagttagaggtcttttgagtttggaggttattggatctacgttagaaatactctcctttttctgacaactttggtagcttcctgcagggtgattcatctctttcaaagtttctggttggctgggtgtggtgacgcactttgggaagctgaggcaggaggattgcttgaggccaggagttccagacaagcctgggcagcatagtgagacccccatctctaaaaaaaaaaatttttttgctaattagccaggtgcagtggctcatgtctttagacccagctactcgggaggctgaggcaggaggatcgcttgagcccagcagttggaggctgtggcgagctatgatgtcaccactgcactccaacctgggcaacagagcaagaccctgtctcaaaaaattaataattaaaaaacacaagtttgtggctgcagccttccgtgtgttttcagcagggctgcaggaggattgtggtgcgaatgtgtgaatcacccctagcgggaatcctgcctggctgatctgggctggctgtgccagcatttgcaaatccagtgagggtccctcttcccttgtctgcctgtccctgtccctgtaggccttgctgcccctccccaccccaccacaccctcttatgtcttttcccagctgagaactctggggaagtaactattgtttcctccacatgggaaggttgggactttctgtcttccttttatttttccctcctgcctagatcccttcgaggggcaactttggcgctaaagtgttgggagttcggaatgaagcttggtagggaagtccttgtgtttgtccgaatctgttgaaaggacatccccacgcccgcgtttcctgtaatctcggagggtcctagcgcccgacttctcaggtcagcctcgggtgacaagcggcttgtgtggagtaggcctgttgcatggcttctgtgcgggcatgttacgcacgaggacagccctttccgggttccatgagcctcaggggaagcaggaggcgcctgcagacacggagctgaccccggaacctgcctagctgcggggccgcctctccgctcaagcacccactcagctctgtgaggtctatgcctaacatgagagcagctcctgttgaagccaccatgctggttattctcaccagggcaaagtgcacttcagaaacaagttaattttattttctaaattattatttttaatgctggttccaatttgggtttggggggttgattttgtttttgtttgtttgttttttgggacagggtctcactctattgcccaggctggagtgcagtggcacagtcacagctcactgcaacctcaacctcccgggctcaagcgatcctcccactgcagcctcctgagtagctaggactacaggcacccaccaccacacacacccagctcattttttattttcgttgagatggtgtcttgcccaggctggtcctgaactcctggcctcaagcagtcttcccaccttgacctcccaaagtgccaagattacaagcctgggcctgtttttgttgtggttgttgttgcctttgttgtttttgttttgttttgaagcagggtcttgttctgacacccaggccggagtgcagtggtccggtcacggctcgctgcagcctcgacctccgggactcaagcgatcctcccacctcagccgtgactacaggagcaatccactagttaatttttaaaaatagcttcccagcattttacaatgtcggatttatcttaaaggaacacattctttaagatcattctaagaaattcgcctctgaaaattttctttccctatttgtttatttttcctttttcagattacgaagagactatctatctatctatatgcatcttacaaaatgcaaacatttcagaaagtgaaaattcccccacacaacgctccccagagctgagcccttctctctcacttctgtgtctctgagtcgtattcgtacgtgactgtctcttggtttttccgttttagatattacacatgaggttcctatatggaaattaaggatttagcttcccccctccccatcccagtaaagttacatcatcatgtctggtttaccttgcatgagcgttttctgtattagaactgtgtagtgattgtagcgcttagccatttccttccttgtacttttggcttatttccgccacactccccccgctcttggggttaataatggcctcttctccctttactgtgaaggccttcctctggggcccctctgaccatgggatcatcttctccaccatcctgggaatcccctcaggaggtggtggtggagagagggctgtttcctgattcccacgtcttcctctttcctgatttgttcctttgttttaccagagtccatcccccagtcgcttcctgggaaagggcacaggagacagacttttcatttattcactgatttaagagacaaggtctcactttgttgcccaggctggtacttctgggctcaagcgagcctcctgcctcagcctcccgagtagtagggactacaggtgtgcaccaccatgcccggctaatttttgtattttttgtagaggtggggtctccccatgttgcccaggctggtcttgaactcctgtgctcaagttatctgcccacctcagcctcccaaagcgctgggattacaggtgtgagccacctcgcctggacccccaggttcctgtccacgcttctgggactggctgtgcctggcgggcctctgagctgagtctctcatgcctctcctttcctttctctctctactttctgagggattttctccagtctctccttccaccctttcttggatttgtatttctcttcttttgaattcttattttttaatttgaagagcgtgttcttgctctgcaggtgtgctttgcatgctgttcttactgtcctacagagacggcatcgttacctccctagggacgggaaccatgtttcatctcctcccaagctcccgtaggcttccctgggtccctcttctcttctgttttgcaccatgttccacctggtagaagcttcctcaaaccacagatgtgccttggccggctgttgtgtttaacagtgaggtcctaaaaaccctcttagagcggctggtattggagcaggggctggggcagggaccccaagcgtcctcctctgcagggaggttcccccaggaggcttcaggtgccgccttgggacgcaaaggtcatcgcagacccccgcagccttctcgcccctccactgcccacaaggctccgtcgcagctccttcctccagcccctccaggcgggtccctctgtgtctctagggcttcaggagggatcaggtcccttctgacagagcactgtcctccctgggcctgccggaagcgataactgtcccgaccctaggcctctcagggtggccttctcagcctcagagcagagccaagggcattgagggtggactggaaggaccgcagccctgtgccctggggaaggcttgtcttaggctctggggacggagcccagctggcggctccagaggtggctttaggtctgttgttggatttgcctttctcagcgtgacttctcatcataacgtgacccagcgacctgtgtgtcccacagcccgtccgtccctctgcagtctccctgcactggcatgtcctgggtggtcccagtggcaccttctaggcccggcccctggatgcggtggaggctgcccggggtgggtcagcatggggttgtccctgtgagcacagctccgggagacccgtactcagaatcctccagctctctcgcctgaggcggaaatgtgacttgggaattgtcctccatataaaggaagcaaaatcagggcctaggggtgagctgcttactgtgcttcttccctctctcagcctccaatcggggggcacaggcgtttgattcccgcgacgtctgtgggctgtcactgtccagcctctgcgtcccacacctgggcagctagggactggggggggcctgaccgaggcctggggtacttaccccagaaggagtgattccctgtttcctggaattgagctggtggtccctgtcagggagcagtggggtcccctcagcttcctgctctttctcattcccgcaggaggaaatgtgtgcacgtgtatgccgtcgttttcagcactttttttttttttttgagacagaatctcgctctgtcgcccaggctggagtgcagtggcacgatctctgctcactgcaagctccgcctcccaggttcacgccattctcctgcctcagcctcccaagtagctgggactacaagtgcccgccaccacacccagctaattttgttttctgtattttttagtagagacaggatttcaccgtgttagccaggatggtctcgatctcctaacctcgtcatccacccgcctcggtctcccatctttttttttttgagacagagtttcactcttgttgtccaggctggagtacaatggcataatctcggctcactgcaacctctgcctcccgggttcaagcaattctccttcctcagcctcccgagtagctgggattacaggcatgcaccaccacgtctggctgattttgcattttcagtagagacgggatttctctaaatcgggcaggctggtctcgaactcctgaccttaggtgatctgcccacctcggccccctcaaagtgctgggattacaggcgtgagccaccgtgcctggccttcagcacttttttttttttttttttttgagatggagtcttgctctgtcgcccaggctggagtgcagtggcgcaatctcgactcactgcaaactccacctcccaggttcatgccattctcctgcctcagcctccagagtagctggtactacaggcacctgccaccatgcccggctaattttttgtattttttttttagtagagacggggtttcactgtgttagccaggatggtctcgctctcctgacctcatgatccaccctcctcgggtaatcccaaaagcattgggattaccaatcccaaagcactgggattacaagcgtgagccaccgtgcccggcccagcattttctttagattgctaagggaatgtttccgtggactcccagcatcagacatgggatgtcttgattagttttccggatggctccaaggcctctggctttggagctgggtgtcccatcccaccctggctgggcgccctcagacctgtcttcccccagggcactttacagctcttagcggctgtgaggctcgagcagcctctgcttcccgcctccgtcagctgcaggcctggtatcgggggccttggtatcaggagcctggtaccaggcacagccccgtggccgaggcccgcctgcggaggacagttgaatggggcttattgagagacgggctgctccgagggctggaggagccatgtgaacaaacacatgtggtccctcagcccaggtggctggaaaacctcagaagctgcgctgtcgtacctgtcccggctggagtgacaccaggatccggcagcccaggccaggtccagtgctggggaaagtggcggagaaaccaccctactctctcgcctgtgggagccaggcttcgccaacctttcttatttccacttgaaatcattctctggggaatgacaacttttcctgtgggttttactccatgaggttttttgtttgttttttgagataaggtctcactctgttgcccaggctagagtgcagtggtgtgatcatagctcactgcagcctcgacctcccaggctcaagccatcttcctgcctcagcctcctgaacagctggaactgcaggtgtgcattaccacgcccagctaatttttaaaatgttaaaactttgtttatttatgtatttatttatttatttttagagacagggtcttgctccgccagagtgcagtggcacaattatagctcactgtagcctcaaactcctaggctcaagcagtcctcctgcctcagcctcctgagtagctgagactacaggtgcacaccaccacacctgtctaatgttaatatttttgtagagatgggggtgtcactatgttgcccaggctagtttcgaccatgtgggctcaagcgatcctcctgcctgggcctcccaaattgctgggcttacaggcatgagccaccgcacccggcagacatgaattttctatgatcttctgcaaaataactgctgggaacaggagcaggtccctgccacacgtgctgggccatcactgtttgttgtggagtgctggggggtgcccctcattggtcctcaggaaggatccaggagcccgcctgccacctcatgggcctcggatgagattttccgagctgagtggccattccccagcctgtggccggagatcagagtgtatgtgagtgacacctcggctcagtggtccccagcaaggactgacatttcagttcttcctgctgagtccaagggggacgtccagtggctttgggtctgggaccgggtgcacaggcgtgtgctggccccattgtctgcagcccctccggccatgaggccatcctgcctcagcagggaggtgtttggttcccagaggcctttgacaaagccgattttgggggctgtgtgctgttaccagtcaaaacctttctctccccttctcatcttacttgtaaacttgggttttgtattttggattcagaactaaattcagaaaaggtttccttttgactgtttcctacctcgatcgagccatttgtgggtgttcatttaagtttcgacacgtgtggaacttacctatctctgccatatttggggagtccgttgtaagagagaatgggaattccagatcagagtccttaacgttccatgtgggtgacactgagtccttcctgaaaatgccccagacctgaactgatcattaatgtcagctgtcaggtttttctcagccacaggatttttttcattcattcctctgctccatccaaaaaatgtttcttgagccccgcctgcacccaagggggctcctacttaacctaagttttggagatctaggagtcttgtgcctggacagttagggaaggatgttcctggcagaggaaagggcagcaaggcgggaggaggagaatggaccttctggatggttctggatggttctgggtggttctggatggttctgggtggcctgcagggcagtgcagcagggagcatcctacccgccacgggggctctaagtcagctgagaggggggatgtcagcatcacaggtgggcagggtccatctcaggacggggctaggtgggtgcccgtgagctcaggacagtgggatctctttctctcgggaggttctgcacccactcttcgtgtcttcattggctttctctgaatacctgtaatagaaatcattttcagaagcaaaacatcgccgtggtttgctgacggaagcctgccttagtgagttagggaagcaggccagagcacacccctcagccggacggacgcagcctcctgcctgtggtcccggcctcaacccagagcctcacctgcagccgggggtgtcggtcactcccagccatctgtggttgctccagcctgggagggagaggggatgagggcaggggcatctcagcggctcagggcaaaactgcaggggtcatctcttcccgagggcggtgtctccaggagagccacctgccacgccttcaccctgcagggcgatggcacctccacagcctctttccaggatctgcctctgtgaccacacggggttgtcctgggcccgagccttttcccacagcgccgccttgtggacacctgtgcaggagccagcagcccgcggaggctacctgctccgggtgcacatcctgtaggggtgtgtgtggggggacctgaggaggggccccacagagctgcctgaccaggtgctgccctgggccctgcataatggcaggaggagggcccgcggtgctctcagcccccgagcagaagtcaccactggaaggaaacttgcctgccgtttccagcatcttgtccccgccgctgcgtgaccttggccgggcagtgtggtggcacttaaaattggaaagtgtgagcttcttccccacagccccaccctctgggtaggtcctgaagccctgagccccacaggggccccctcttcagagccatgaacttacagtgtccttctctctcctcagtgtccccaactcctgcccagccagtccacgcggtgccggctcctccagttaccgctttgtgcagaacgtgacctcggacctgcagctggcagcagagtttgcagcaaaggccgcgtcggagcagcaggcagacacgtctggaggagacagccccaaggtctgagcccacctggcgccgtggtgcacctggtgacccaggatcgggccatagtgacccggcgcgggcggcacagacagcccagggcctgcgggcgtgtgctcgaggtggtctcagcccacagggaatggagccgcagctggcggtagagccgtcggccctttctcgttttcgtgcccaaatcatccccgttggtcatttgctggtgacaggggtggcgccgtcaccgagggcccctcccgccacgctccttgttcatctgccgctggcagcccggcgtcaaagccttcatacagcccttgagcaggatggcgttctccttataactttgtcttagttcatttttgtccaatagctgttttcaaattgatttctggaagaggtgagaaatttcagaattaaattataataaaaccgaagttttccttcccatgaggcaaaaatggttgttcctagttgaatgcaagcacattaatgggatagttggagggcactgggacgggtgccggcaagacgcgcacattctcgtgggaaggttcctccccatcagctgtgacgggtgggtggggtagactcagggaccttgctggagctcatcccgtgagccgtgtttctccgcaggatgagtcaaagccgccgttctcctacgcgcagctgatcgtgcaggccatctcctccgcccaggaccggcagctgaccctgagcgggatctacgcccacatcaccaagcattacccctactaccggacggccgacaaaggctggcaggtgaagccgagtccccagggccggatcgcctctgaaggcccttagaacatggaactcacaggcatattgcttcccttaaaacagaagagggccagtgagggggctcacgcctggaaccctagcattttgtgaggccgaggcaggaggaggatcaagaccagcctgtgcaacatagagagaacctcttttctactaaaaattagctgagtgtggtggtgcacacctgtggtcgcagctactcggaggctgaggtgggaggatcacttgagcccaggaggtggaggctgcagtgagctatgatcacaccactgcactccagcctgggagacagagaaagaccctgtgtctacaaagaaaaaaaatatctttttaactaagaagataaatataaaagagggatgttttcacgaatggcatatggtacatctgaaaggcattagcgctgtgataccattgtgtctaaatactcttttttattagtttccttcttctgagccccagaactgagaagatggatctacaccttgttagatttttgtgcttgctgtgcctcacaatcccacgttaagttggaaaaatgtaccatatactgttattcaaacaatccacatgtctgaattgtggatggcattttaagagctttgtccacaccagccatgactgatgcatgttgcatttgcctgtattttctccaatgtcagtgtagcgcatccactagctttggttttttgtttgtttgtttgttttttgagacaggatctcgctctgccatcccggctggagtgtggtggcgcgatctcagctcactgcaaccttcgcctcccaggttcaagcgattcttctgcttcagcctcccaagtagctggggctacaggtgcccaccaccacacctggctattttttgtatttttagtagagatggggtttcaccatgttgcccaggctggtctcaaactcctgacctcaggtaatcctgccagcctcggcttcccaaagtgctgggattacaggcgtgagccactgtgcccggccaagacccagtgttttctttctcccagatgtgctcctagaccaggatctgtctttctgtttcactttttctgtaaagaatggtaatggcagccaggcacagtagctcatgcctgtaatcccagcactttgggaggccgaggtggaaggattggttaagcccaagagtgtgagaccccatctcaactaaaaatacaaaaaaatcaacccagcatggtggcccacgcccatagtcccagctagtcaggaggctgaggcaggagaatcccttgaacccgggaggcggaacttgcagtgagccgagatcgtgccactgcactccatcctgggcgacagaatgagactccgtcaaaaaaaaaaaaaaggtaaaatggtaattatgcggtgtcaaattttgataggaatgacctgccctgtgcctcggtgctgctcccgtgaggcccagccagcacagcaccaagggctctgcacagagggacggcctcccctcaccctggtcccgcatctgctgcagatttgaggtgggtgggactcattttctgatttgctggtgatgggtgaatatctctgcttccctgcagaattctatccggcacaacctctctttgaaccgttactttatcaaagtcccacgttcccaggaggagcctgggaaggggtccttttggcgaatagaccctgcctctgaagccaagctcgtggaacaggcattccggaaacggaggcagaggggtgtctcctgcttccgcacccccttcgggcctctgtcctcaaggtaaagttctctgagcgcccgtcctccagctgttaggaaagctgagctgccctggagtttagagatacgtggcgcagtcagccctccggatctgtgggctcaggctcagtgtacgggcatgcaactgatcacaggtcaaaaatattccaaaaaaaagaaggccggcgcggtggctcacgcctgtaatcccagcactctgggaggccgaggcaagtggatcacctgaggtcaggggtttgagaccagcctagccaacatggtgaaacccctgcctctactaaaaaaattcaaaattagtcgggcatggtggcaggtgcctgtaattccagctactggggaggctgaggtaggagaatcgcttgaatctcggaggcagaagttgcagtgagccgagattgtatgtaccactgcactgcagcctgggcgacaagagcaaaactccgtctcaaaaaaaaaaaaaaaaaaaaaaaaaaaaaagtaatacaaatgaaacaatacacactacaacagctgtttacatagcaggtacatttgttagggattataagtaacctggcgatgatttaaagcttacaggaggatgtgcacaggttgtatgcaaatgcgacaccatttctatgaggaacttgggtaagcatctgcagatttggtacccacaacccccgcccctcaagtaccgaggggtgactgctggtttcggcacttaaagactgcaccattttctgtttttgttttgagagaatatctcaggaccaagaactcctaaaatagtaaggttactaagtaagccactgactgttgtattaaaaataagattttagttcttagaagtggaaatgtgtgtagcaataggaacggttcctaaggccaagaataaatggattgcggttgtgggtcttttggtagcactaagctttctgttgcagtgtgtgagaggacccggggagagcccaatcttcgaagggacagatgaggggtatgacctggggagcccacaaccgcctttgcttttcgcagatgctgggaacgcagctctgctgccggcggggtggacagaccctcccccagccattgctgcccacctgctgcgtcagggcctcccctgcccagctcagtcttggccaagcccagtctggaggagcatgcaccgcctgtgagcggtctgggcagcgcttcccaggttgcccatcagatgagcccgtcccaggtgtcgaggaggagatctcctgagcggcagtctcggaaatccttccccgtggaaggacacgttaacctctcgtgcttcccatttcaaaattctgtttccaacacgatttgatgaaagattgaaatatctgaaaattcatttcgagcacagggtctggcattgtgattctcaggtgaactgggcgtatggttgaggtaggacttcaaaaaagtgttcgaacgtcatttgcagcatttaaactgagctccaaatgacgttcaaacacccctctcgggtagagttttcatggtggaacggttgcgcccaccaaacagaagcttatgtttttggcacagaaggcctgggccattttcatggacacctggctggacctcggtggaagtgaactccgtaggttgttgcgttcactgcagcacctcacatgataccgtcccctctcatggaacggagcctcccccatgcagcccccactcaaatggagttttaaaggctgggttcaggttacgggggcgtttctcaccgtctgaatgcggaggacagagacgagctccagggagcgtgggcgggtgacggcgctgagatgcgtgatgtctcggaaacgtcctcgcatccctcagcgcgggcgctgactgccgcggcccttgcctgtcttccaggagcgctccagcttcgcccacacaccccgggctgatgtcccctcgctccggcggcctgcagaccccagagtgcctgtctcgggagggctcccccattccacacgaccctgagtttgggtccaagttagcttctgtcccagagtaccggtattcccaaagcgcacccggtaaggagcgggcggccctcttgcggggcggggcggggcgggactcgtgggggtgcgggaggggtcaccgtccgctctccgccctccgtgcaggctcccccgtcagcgcccagccagtgatcatggccgtgcctccccgaccgtccagcctcgtggccaagcccgtggcctacatgcccgcctccatcgtaacctcacagcagcccgcgggccacgccatccacgtcgtgcagcaggcccccaccgtcaccatggtcagggtggtcaccacatctgccaactcggccaacggatacatcctcaccagccagggcgcggcggggggctcccatgatgcggcgggcgcagccgtgctggacctgggcagcgaggccagaggtaatgcagccgcggctggcagccttcgcaggaccctttgtggtggtcccggccggcaagtccccaaggcagcgccattggcctgggcctggggcttgaggaggatgattctctgcttctgcctctcgctgccttgtccctttaaatcagcatgagctgggcaggtggctcatgcttataatcccagtgctttgggaggccaaagcgggtggattacttgaggtccggagttcgaggtcagcctggccaacatactgaaaccccgtctctactgaaaatacaaaaattagccaggcatgatgatgcgctcctgtagtcccagctactcaggaggctgagggaggagaatcgcttgaagcctggaggcagaggttgcagtgagctagactgcgccactgcactccagcctgggcgacagagcaaaaccctgtctcaaaaaaaaaaaaacccatgaatctccgcagatgtgtccttccttgttgaacagggccctcggatgcacatagctgtgtccttgccctaaggtaacgttaaattgagttgtgttgcggccttgcatgcatttggaatttagtgttttctgcaggagaaagaatgagcctgggaagactgttcttttcgactccctcgtaagttaaagactttagaagtcatttagggaaaaagtagttctgaattgctaaaagaaatccgatcccagggcttgacggggtagacactgaacatgcagctgaccccagaagctcctctccggaacgcctgcagttaggcagcgccctcctaggccactctccaccctggacttcctctccgcggtggtgtttgtttcaatgctgccgtaatgaaactgcagtttggtgagggaaggccaagttacagctgtaatcaggatcatttcattccaagtaatacgttttctttctcagactaaatttgggttggttaaagctaaggtatttaaaatactgttctaggccgggcgcggtggctcacgcctgtaatcccagcactttgggaggctgaggcaggcagatcacttgaggtcagaagttcaagaccagcctggccaacatggtgaaaccccatctctactgaaaatacaaaaattagccgggtgtggtggcaggcgcctgtagtcccagctactcaggaggctgaggcaggagaatcgcttgaacccgggaggcggaggttgcagtgagccgagatggcacccctgcactccagcctgggcgacagagcaacaaaattctgtctcaaaaaataaataagtaagtaaaatattgttctaaaaccctagtaattttcttcccaaacctatttcacccatgggattttcctctagcaaacctattttttcccagtgccgacctcactttccccacttgtccgacctgctgcccaggcgtcgaggaaatcgattgtctcgttggccgagtgtggtgctgacttggttcctgtcccgcaggcctggaggagaaacccaccattgcgtttgccacaatccccgcggctggtggagtcatccagacggtggccagccagatggcccccggggtccccggacacacggtcaccatcctgcagcccgccacacccgtgaccctcgggcagcaccaccttccagtccgggccgtgacccagaacggaaagcatgcggttcccacgaacagtttagccggcaacgcttacggtgaggccctggccctgttctccatgccacatcccaagctctgtggctcccagtagtcagtgcggcatgagaatgttctcccagtatctcccgatcctccactcagttcaatttattgagcacctgctatactccaggcactggggtaatgcaaagaaaaagagggtggaaggggccacctatcatcccagcaccttgggaggccaaggcaggcagatcgcttgagctcaggagttcgagaccagcccgggcaacatagcaagaccccatctctacataagattcaaaaacttagccaggtgtggtgttgcacgctcatggtcccagctgcttgggagagtgaggctgtagtcagctgtgattgctccgctacctgccagcctgggtgactgagcgagaccctgtccctttaaaaaaaaagtggggggaaagaaaacagggtggaaggaaaacccagatctgcccactctctggagctcacactccatggggtgaggcaagaggtcaaaggaaggaggagagttggggtgctggggtgcaagggtgctgggcgggggtgcagggtaccagggcaccgggcgcattgtcagtggggtggctcagggcagtgcatctgtgtaaaggagtgaggcaagccgtcgatgtccagcaggatctagacagcaatgagaggggcctccacccaacaggctggagccagcagagacagggcagatgaggtggggaggggacggcagggcccgcagggagcagagcaagggtagccgtcctgcctggcaggggtgcactgacctccggttccggcttggtggcttagcccctgtataggggacttgaaaaaagcagctgggtcctaaccagaccccagagtaaccctcttcttcctccactccagccctcaccagccctttgcagctccttgcgacccaagcgagttcatccgcgccggtggtggtcacccgggtgtgcgaggtggggcccaaggagccagcagcagccgtcgcggccacggccaccaccaccccagccactgccaccaccgcctctgcctccgcctcttccactggagagcccgaggtcaaaaggtcccgggtggaggagcccagtggtgctgtaaccacaccggctggagtgatcgcagctgccggcccccaggggccaggcaccggggagtgaggtcacctgcaacgcgggggagtgggactcacccagcggcgaccccgaagctggacccggcagctcaggcggccgcacccacagacggaggagaacagcccgcggcggcctgtgggcatcggcggcacctggacacacccagccctttccatttgatcgcctgccttcccgtggtttaagacaaaaacacataaacaagttcagacaactgattgtatgattctgggaattctttgctttcctttccttctccctcggcaccacctcctctccccaggcctccctgtcgggcatggggaggaggttggagctcagcatcttgaggaatgtgtcaagacagcccctccgctccgcgctgcacggccagccgcctttgtccgggaggacagacagaaacgcagcaaggcacacaccaaggctgccggggaggcccgggcaccggacagatgcctgttgggaagccaggagctgccgagccacggaccacctaacagcctctccgcccggaacgtgacatagagagtgttggcattaactcggggggtgtccgatttcacttcagaccccaagtttttctttgtttgtttaaacatggaattcagacttcattgtacacctgagacagacacaaaagggatcatgtatttttgaggattttacctgttgacgtctgatgaccggccgtaggtccagggttcccgctgggtttaatcccctcgaagagtaaacctgccgctctgtctgataacttcaagtaagagcagcggcttcctgggttggcgttcgcggtggaaggttcctaggatgaaaggtgagcctggatccgccggccgcagacatcgcgctgctggggacgattggggccgctgctctgcagaccagaccttcccgaattatccgtggctccgatgtcccggtgctgacggccacatggggacctaacagtgccaaacgccatctgctccagctgctttttcacccagttgcagagtcctcaccactcccacattgatctgctgttttcaattggaaccatttctcctgcctgaaactccagggcccctccctgggctgtccgtgagcaggagaccccaccccagcagcagtggtgagcaggcctgtgcctccacgcccagcccccgccaacgcgactggttttgtttgccacacggtgagaaccggaggacgggatgctccagccagttgggtggttctggggtccctgaggaagccccctcctgcacttccattaagacagccagtggttcctggatctttgtcaccaagcagcgttgagccagagctgtctaatgctgagcccagctcaggaaggagagaggagtccttcagtgtgtcttggagatgcgaagtgcgtcctcgtaaaggtcagctgtcagttttgctggccgctccggcgctggctctcctgtccgggaccacaacgagaaacagcgacagattcgacgcagagctccggaagtgcctgaggagcagtggttcttggaaatcgcccgtcctccgcatcacagcctctcaccagcaaagcagcctctgcccaggccctggcgggagagctgcagagggacccaggtgcctggagggcatttgagggaggtggctggacaggtgtctccctgaagaagaagggagaacacttttcaaagtgattccgaggcagtgcgggaggacacacgtgctgtgcagtggagtggggtcgcccgtggcccccatcagagtccccgtcccccaggacaagtgcagaacctctgtgggccccctccttccacctagatagagaaaaccccttgttcggtttccttcccgtgtcccgttgtttttctaagccccccgaattgagtcgtttctatggcactaacctttccatgggaaataagctctttgtggaagtccgtacctgttgccctgggtgaggtttcagagaaacgggggcaggatgaacacagccggctgtcctgggtgcagttacgtccgtggagggtgagagattgcgccccgttccacacttgtgtcgcctgctgttgtctgtgggccttttctttccgtggtgcctggtgtgtgcgtgcatggcgtgagagaacggggggtgggggttggaggtggctccccgacaccggtgcctgtgtggcctgagccggcgccctcccgggagcgcccgtcacggggggcctctgtgattacctgctgctgctctctcccgcgtggtgactatatgtcctcagggctgcctgtggccaccctgatgggagacctctgtttgcttctgggccactgcaggttggcctcctcaatacaagctgatgtctgcagggagcgccgcgtgctgggattgcaccacgtgttggtcacaaatcgaggtcgccttttggcctggtctgctcaggctggccctgacccacgtggtttcctggcttctgagacgcagcgcattcttcctgttagcggtagcgttctctgatttcactgcttcattgccaagggcgtggaaagggggtggtggatggagccgggaggtggcgagcacaggaccccggggctgcattctgccgtgtggggttctgcactgtctagcttctgcggggactgcaaagagggatgaagggacgtggtcctaggggtcggctcagactcggagcagggcagggagaggagggcaaggagaggaggcctgggtcctggatccactgctctgggctcataaccatgagattttgaaagagtttttggtcatctgagcaggtaccatgcctggctcatgccggaacttgtcttggaaccggtagccagaggcccaggaagggacagggcccaaaagggttgcatgtcccggccacaaagccctccctgtgtgccctgagccagcccagcaagcgcctcccagccaggcgctttcgcagaagcaagagcacaggccagggggaccgggagagcctcagcccccagcctgggcggcctgtgaccctgagccgtgtggagccaggacccaagaaccttctctaggttctcaagggtgagctgacccgggcaatgtgcaggaatgtggggagcaaaagtagctgattccagccccgttctggggtcactggggaggcagaggctgagggcctgttctctggtcaccagggactgggggcacggtccacagcggatgagaacagcaggtcacagtagtggctttgggaagggcccctcctgctttgccctgttcggaaaggggctccctcagagcccctgggcccagtaacccgcttctgtctcctgactcctgctggataaattgccaggtttatcaaatacaagaaaacacctgctttggctaggaggtaagtcccaaaaagaacgtcttaagtagagcaaaggcatccaccgaggccatttggtggcccctgggaagtggggaagcagggcctgagcgtccccaggctgctagggcagcagctggctcagggcacactctctcgtgccagcttctgccaccagcccagtgtccacggagccgcggggccagaggagctcagggagacctggctgtctagggcatggtacccagtatcccggtgtgtgcccatcctcagccacttgtgtctttctttccatgtgggagttctcccggtgacacctgccctccgttgagggtggaatctgtcactcatgcctttgagggacccagatggaccatccctcttctgcttgctttctacattcctaaaaacctcaacgttaatccctcaccagtcgggccgagtgtggcctcatggttctgccgcggcccagtcttctcccactggcttcacgctagagggcgccatgcgctctgggtgaaatgagacgctggtgtggggtccccatgtagagaccctcaggtccctatccagagaccctccaggcagtgctgggaagacactggtggcggggaccatgaccaggcgggtggagccatgtgtgtctcacacctgccgcccctcactttccttcccgaggtctggtaggtcctctttgggatttgctgtttatttgtatctcccttttctttgatttaagaacaatgccaagtgaaaaagctgggaatgaatttctgagttgctgagtgttccctgctcctaggtaccacgctctgtgcttctcaggcagggaggagatggattcggtggagttgggccaggacgggggcttcaccctgccccctccagactgccgaagcccccaagaagttttgagcccagctgggcctcgcctccccggctcctgggtccattttctgtactggtttgagatcacaggcatcattcagcgaatgctcttgtgtcctctgcataaagagggccctccctggagcacccccggggagctgggactctccagaaagccccgggtgagggctccgtcttgagagagagagaaatcccttctttgggcgattcagtgagttcaggaggaggaggaagcttttccttggctttgaaatcagtgtttttatggagacaaagaacagacctcagtgggaaaaatgaaaacgtaatggaacacggggaggtgtcggagaagaaaggattttccccttcgctttcagagccggcgggagtgcaggtctgttttgcttcagaagcctcacattctgctttgcccttgagtgacttcatgcgggatgaggaactgttgacccctctagagaggacaccccaagtccatcctgggctcctcctcacccctctgagaaagcccccctaaaaaaaggcttcagagtcaccggcatgccgcctcacgttgcaggacggaatcgcgcgctcctcacgctggagtaagttacgaaacatgatcgtcaggctctttgcaaacgcagagccccagaacgctggatggaggcctcctcggccctgcgggcggcctggctgcggtaggtctgctgcaaggagccaccacggggactgcgccacactcctgatgaaaacgtgtttacccacagcctcgcctcgagcctccttgacaataccgctgcttcaaagcaatattatttaatgagaatactttacattgctcacatgtgctgctatgaagacaggattagtctgtagacgggactcagctccagaggttcctgggtaatgtattgtggctcttggaaatgagggtagaatttgaaatataacaaatggtctctcgcccggttctgtcccttatttttagattgttttcctgcatcttacaatttccttttcttttcaaagttcctttctccaggcctgtttttcagtgctcaggacacggttttcatcacatacttactgtttttttggttgggttttgatacgaaaagctgctacgtttggtgaccagagggagggtttggaatctgtgctttgcaggggatctcggtgggtaccgcggcccctcgcagggtggcgagtggggtccgtgcctcgagaagggggcccttacccacaccgtgcggcttgaattctgtcggagttgaatctgtggaaaggattgtcccattagagctgctgcgtcctttcctctgtcctccctgtcacccaaaccccgaagtcacagctgcttagaagaatgggattttggggatacaaccacacacatttccctctggactgaaattttaaaaacagacccatttcactgacttctttttttttttttttttttttttttttttgagacggagtctcgctctgtcgcccaggctggagtgcagtggcgtgatctcggctcactgcaagctccgcctcccgggttcacgccattctcctgcctcagcctcccgagtagctgggactacaggcgcccgctaccacgcccggctaattttttgtatttttagtagagacggggtttcaccgtgttagccaggatggtctcgatctcctgacctcgtgatccgcccgcctcggcctcccaaagtgctgggattacaggcgtgagccaccgcgcccggcccactgacttctttagggaaaatagtttcagtcttgggttgtcttgtgagcccacgggcatgggaccctgtctctgctgggcttttccggccccgtcccagctcctcctcaggcagaggctgcagccctcagctctgctgctggatggaacatttcaaccccctccgggaaggtgggcagggtggagggcccagggctaggcctgccatgcaccatgagcaggggtgctacctgggtgtgtgaagttgggctggcttttcctggaggtgggtgagaaggctctccgggcaaatcagaaggccacgagagagagaggagcggggagagtggtgaggaggattcgtctctgactgatgaacctcgccgtgcctgtctgtcacatccaagtctgtgccagctgctgggaggtcagactcctgccctgagaaacagcccagtccttggagaatgaaaccctgagggtcagtgagtggaggccttccctcggggccagccattcccgggaggcctgagtgtgacctggaagctctgtgggtcaccaagactggcattttccttgtatttttgtgcagggctgaagtgagcgttcctcctctgaattggtgaggctttggaaattttttgtttcttctactcatcctaatggctggttttggctgcccggagtatcagagaatatcactaagagggcagtcagtttatttttaggcatctttctttctgtccagggagaaacccctcggaagaatcttagtcactctttgcacctgccctgtcattctcgccatggggaaaatgcgttgaaaagaaaaataccggggccagggagaagccgtgaatgtatttatttgctttggtgaagctgctgaacactggctgcggagggccccccgcccccatcccgcttcaggccccagtgacccagttgcgtcttaagttccatcgtccagatttcaggccaccagaggctgccaaaggtgactgaagcggtctccaagtcactctgtcaccactttttttttttttgagatggagtctcgctctatcgcccaggctggagtgcagtggcccaatctcggctcactgcaacctccgcctcccaggttcgagcgaattctcctgcctcaacctcccaagtagctgggattacaggcacctgccaccacacccggctaatttttgtatttctaatagagatgagagtgttaccatgttggtcaggctggtcttgaactcctgacctcaggtgatctgcccacctcaacctcccaaagtgctgggattataggcatgagccaccgcgcctggcctctgtcactttttttgctccttacccagtttttgttttttgttgttttgttttgttttagcgtgatactacaatggaaagactcctagttggttattctttatctcggattcttttttctggaattgtttgctcatttgagtggttggtggtttgccctgtgtcagacacggtgaaaagagtgcaggaaagctggggccaggggaagcgaagtggcttcaatccgggctgacagccaagaagagttttcctcccttcggtgacagggcctgcccctccgagtctagaggtaaaagcagcttctagaactggcccctaagtctccaaatgtgttggctaagctgaaatgagagactctgaattagagtttttgtttgtttgtttgttctctgcatgaagttcacaggcctgtatggatgttaaattgtgtctatagcctctaaatctccaggttaactggtccagattttttttttttaatcagtaacaatgggaatttaaaatcaaatatttggccaggtgcggtggctcatgcccgtaatcccagcactttgggaggccgaggcaggcgcatcacctgaggagtttgagaccagcctgaccaacatggtgaaatcctgtctctactaaaaatacaaaaaattagccaggcgtggtggcgtgtgcctgtaatcccagctaccagggaggctgaggcatgagaatcgcttgaacctgggagatggaggttgcagtgagccgagatcatgccactgcactccagcctgggcaacagagggagactctgtctcaaaaataataatcaaatcaagtattttaagtttggctcttctttttttcaagaaaggctttttggatacctagaataccttcatgtatgtggcttgatttctgtttcaggaaaaggggggcgggaggagagacaacagccgtgttccagagtctgtcctgagatgtcgctgagtccagacacttgggctgcacgtgccctgcagatgacaaaggccggcagctcagcacacgtgcaggaggggttaaagccaatattgagtttttgttcttgttgttttaatctgaacgattattctcctgtaaaaataatttgggaggggcgggtgttgttcggtgtgtgtgtgtgtgtgtgtgtgtgtgtgtgtgtgtgtatttttttttttacagtggcgcctgtctaaagtatttttcacaacatgtttgataatcagtgctttaaaaagcagcagtgtcctatgaagtggaaatgtcagttctagagcattggatgtgaagttctggtcatgtcaccttgcgtgtctcaccctggaggagtgaaggtgggcgcccggcgggggggtgtggctgcaccccagcaccgggagggggcacgcacgacaccagaggaagggacagccccacccatgtcaacagcaggcaacctgtgttttcatttcaagtgggatacagtatttttttaataaggagccatacttttttttaagagtttgagatctgaatgtgatttctaattgtatcagacgttaatgttttaaagctataacaaagtttaaaatttctactttttgtttttcatttattttaactgttcttttatctattaaattgttgtatgtggatggggaagttttgtttctcctcttagcatttgtttctataaccagaaataaaattctatattaaagaaatgaccctgcggctccggtgtggtccttctgcgcaggtggctactgaaggtggcggacggacagacggcctggacacacagacaccaggcccctggacacataggctcccgaccccctggatacacaaacacctgaccccctggacacacaggctcctgacccccggacacacagacccctgagcccctagacatacaggcacctggccccctggacacagaggctcccgaccccctagacatacaggctcccggccccctggacacacaggcccctgaccccctggacacacaggcccctgaccccctggacacacagacccctgacccctggacacacagacccctgagcccctggacatacaggctcccggccccctagacacacaggctcccgaccccctggacacacagacccctgacccctggacacacagacccctgagcccctggacatacaggctcccggccccctggacacacaggcactgcgcccccctgctccagaggctgaagggcggctgctgataagggaagtcgcccataggtccctggtgtcccgttcctggctcacacaggagatgcttctgcaggtgcctgtggctcctggagtcagtgacccccacccactgagagtgctctaagcgaggatgtttgcagctccaggaatgtgaagacaacgtgtgtctcccctcagacatggcaaaggcagaaaccagctgagccaaccccctgcccctggcacacgcccacatcctggctggggggcacttgcaggtactcgttgctgccccagtggctcctgggcaactgtgggtccttcctgctggcccttggctagatgagaatttctacccatgtccaagatgggtagaaatgtacgtgggtagaaattctctcaggccttacttattgtaggtgtggggcctggggggtggggatggcattgactttggaactacacagacctgggttcaagttcctactgtgtccttaccagctgtgggacttcagcttgcaatgcgccccacttcttcacatgcagcacaggcacccccaccccacaggcctggcgccccgaagctcagctgcgatgccatcagtcactgtctcttctgagagtcccccagacttatgagacccttgggtgtgtctgtgtgactgcctccgacagacttgacagtggtgcatgcttgtcacatgtctctcttctgtcaaggttctgtagtgtttgcatgtgactccctcagttcaataacttgcatttttccgatggcacagttacccaccattgcaggtaaggtttcactgcttctctgtcttccttcaagttactccatttccattgtaagaggttaacataactttaacagattagttctagtttaagatgtcagcccaggctgggcgcggtggctcacgcctgtaatcccagcactttgggaggccaaggcgggtggatcatttgaggtcagcagttcaagaccagcctggacaacatggta

SEQ ID NO: 207 - DNA, 195603 bp, Homo sapiens
  source 1..195603: mol_type = genomic DNA
aatgacaccttttatttccccaaaatctgcaacatcagcctctttaagttgcagtgttgggggagcacgtgagcatcacgtgcccactgacagccaggatggacttagctgagctgcactctcacttggggtacagttggttggtgcttctgaatcaccaggcgggaggtggtggggcccagtggttgaccacagtcccagggggagggagagaagcagtgactccaccaaagcagtggctccaccaccatcatcctggagacacacgggctgagtggcccccacgcttccaggacacctgtgggtgaaatggctgagcccaaagattgccacagcttttcctagcctgaagctccaggtttaacaactggtactgctctgcaaaagcagaagagcttgaccaatgatgagcctgaagaggcagagagagagaatcgtagccatctagattaatttgaaaagtacctagatgcctgaatcccccaccagagggtcaccttccccgctacctcctctcattaaagattaacttcagtgatgatttaaacaatcaatgtgaggactgtgccttcaaaatttcccaatcacagtacctgggaggctatactacctgataagaaacctcatgccggattaaaattgcagctactatgtgtggagcacttactgtacatagagactatcctaagtgatttccatatattaggacagcaaccctgtgagctaaattctatcatcatccctgcttttcaaatgaggaaactgagacacagaaagggtaagtaactcacccaaggccacctgggtagcaaatggcagaacccgaatctgagcccaggcaatctgaccatgctcatcaccgctgtgcctgcctgcctgcatcttgcttactcctgtgatcagcagtcagggccttcctcaagacctgttttgagctgtatcccagctcagaaaagaatgtcttgatccatccagaagaatgtccttaaggtcaatgtttgtgatcacactgaagctcaatcaggacacagggcagtcagatgtgctggcttactgtgcgagcccaggacacctaaaaggctctgtcaaatctagtacaggtacagaaccttcgagagaggacccagacagtatacaggtgtacaaagatgagcaaacaattggggtttgattaacatatttcagtgtggactgtaacaccagcagcagggctcagggaagctataacacagaaacttacttcaggaaccttccccacttcctatgctccttctctcttctgtggtaatctctcttactactgttaaagaaaaatgattcaatggtacttgttaaagcatggtaaggcaggcccgggcacagtggcccacacctgtaatcccagcactttgggaggccaaggcgggcagaacgcctgaagtcaggagttcgagaccagcctggccaacatggcgaaaccctgtctctaataaaaatcagacgggagtagtggtgggtacctgtaatcccagctacttgggaggctgaggcaggagaattgcttgaacctgggaggcaggcagaggttgcagttagccgagatcatgccactgtgctccagcctgggccacagagaaaaaaaaaaaaaagagcatgataaggcagacattatcagaaccatcatgataggtatgaggaccactgcagtggggcctggtggtgggggagaacttaggctcaactccaaatacagcatggacaaatgggaatttacagccaaggagcagagtgggggtcgatgaatggaaaattactaagaggaaacatcagggataagggggactgtggctaaaccgacctaacaggattcttcctgaatatagcccagggtgaccagacatcacctagggatggaggaagatgatgagcctgattagatacaagggtgaacagatatggaggatgggagctcttgataaactcactgattagggctctttgttaaaacggattttacaaggaagtgcacagatggcctaggaaaacgttgaggagttggactacagcttggccaagcagagaatctttgtccctattcacatacagtgtattcatctctcaccctacccctcatcagaacgaggatccctcccgggcatcttcacccaaatgaaggcatctctaactatggaactttaagtactgaccagcctttactagtgctaccatttgttgggcatttgctttgtgtgctaagtgctttacaaatgttattttattccatggccctcacttcatttgaccaccaacaacccttagcacagctgaagactccatcctccttaaactctttcatcacttggcttcccaaataccaccttccttgttcttcctcccacccaactggctgtttactcttgtgctagctcctcttcatctccctgacccccaaatgttggcaggacccaggctcaggtctcttctctatccacaggcaccccatatgcaatgctgtccagtctaaaaaggttgtaattgctttgtccaaatttatatctccttcctgacttcactccctgaatcccaatcttttagttccaacttccaacttaacgtctccatttctctatctaacaggcatttcatgtggtcaaaatggaacttttgctaccacccttccatccatgtcttccccagctcagtctacagcagttccattcttgcagtagctcagaccaaaaaacttgcatcatccttgattccttcctttctttctcatcctatatccaacccagaaatctggtcaactctgtctttaaaaccaatccagccgagcacagtggctcgtgcccgtaatcccagcagtttgggaggccgaggtggtcagatcacctgaggtcaggagttcgagaccagcctggccaacatggtgaaaccctgtctgtactaaaaatacaaaaattagctgggcgtggtggcgggcgcctgtaatcccagctactagggaggctgaggcaggaaaatcacttgaacctgggaggcagaggttacactgagccaagattgtgtcactgcactccagcctggtcaacagagcgagactccgtctccagaaaaaaaaaaaaaaaaaaaaaaaaacctgatccacagtcaaccattttgtcacctcctctgcaacattctggtccagactccgtcatctgtcctaactcatcttgtggctgccatgtctgcagagtcagtctattctcaactcagaagccagcgtcatcctttttaaatataatgcagatcacatccctgctctgctcaaactcctccagtggtttctgagctacctccaggaagaatccaaagtccttaaccatggcctggaatactctgtgtagctctcagatagctctgccctcgaatcctgctgccctcccagctcactgcactgcagcctcttctctgctgccacaaagccttcatacttggtgttccttctgcaaggaagagtcctttctcaagtctccagacagctcattcagttcattcaggcagactctccttgaccaccctatctacagtagcaactgggatgtgcacacacacactcacacaccctcaccatactcacacacacaactcacacatcccaccatcaatctattctgtcaccccacttggccttttttaatatcatttatctcgtgtggtatattatgaatgtatttgttgattgttgttgtttttatttattttctgccttagtccattagaatataagctccttgaaagcagagattttgaatatccagaatccagaatagagaccaccacatagtaagatttcaatgagtaattattgaattatgaatgaatgaatgaatgaatgaatgaagcatagtacagatgagttgactgagggccacagagtttaagtaattctcccaagatcatacagctggtaagtggaagagctggtattctaacccaggtctgtttgattctgcctctcagaaaccataacccataggtgaaccctgataaatcaagtgctgatccattgaatgcaaatgcttggagacatcaaacagcacactcgaggccctgagtagccaccataacttcctgagaggcttctctaccagagacactccacctaacggactgggaagcacaaatgtccctaatcctgcccttctctaactcttccacaccaaaacacgtgtctgcacatggaacttctctgaaatgcctggaattaaacaaagcaggcacagcccctgccctttggaagctcagcaatctagaacaaacactgaggcacacagggttggtcttatgagctggcaaccatatggtctgattttagaggctaggaaagcttagtccaaaaatatctacccctcccaaatgccacagtgcctggaattccactgttagagggatatttctgggagttgaagcactatctccgattctgagtcacttggcttcagttacttttttaaagacagtacaatgttgtatttagatttttttacccatttttgtgagtttatttattttaataaatgagttgatctcattacatttattattataatacatttgtcacaattctatcatcttaaataatttcttttatttattgtttcctctgttttctgtgtaatctgaattttagtcctaatagtggttacctcctcgattttaaataagatgcttaattttctattatcaattaatcagaaatcaaatagtatctattatctcccaaatacaaaaggtgagaaaattaatgattttctatttcctcccatttcctttccacctacgccttaatccctatcaacagacacttgttattatgttgttgaattttttttcttccttatggctgtattattatcattattgttattacttttacatttggtaaaatttttttttctttcatggacttcttttaaatgcaataaaactctggctagaggctacagttatcgtacatcaatatctctgcatgaattaaatactcaagttacttttttttttgagacagagtctcactctgtcgcccaggctggagtgcagtggtgccatctcagctcactgcagcctctgcctccctgccgggttcaagggatccccccagctcagcttcctgagtagctgggactacaggcgcgtgccaccatgccctgctaattttttgtattttttggtagagacgggttttcacatgttgcccaggctgtcagattactttcattcattgcagtagaggctcctacaggatgcaggacagtaaataggctgggggtggagaaaacataaaaaaggaaatcggatgacagatggggaaatacattgaaggcgaatacctacttctctgttttgccttttgttgatcatagaaacaaggggaaaacataatggaaactaaataaacattcgcagagggcactaagatttctgacgctctcatggtacggaagaggagcagtaagacacacgtgtgtggataatcaaaggtgaggatggtgggtgggttggcgcaagaggtgggacgagggagagaagtgctgaccattccagggagtcctctgcatcactgcttctcaacatcacactttgagaggactcttccagctccaaagccctgtccacatcacgtcctgtccccacggtcactctggccaggcaggcctctcattgtgaaatggggccctgcacacaaaaacaacagcctcgtgcttgtggcaggctgaattctttccaaaactgccctgggtttctttatctcagccccttgtgagaacacaggaaactctgcttccccaatcctgaaatatctgcctcaggaaggaagggatattgtcttttcaggggcctctgtttggcttgtgagccagttcgatagcttgctttgtaaatgcactgcaaaagcaagcccactcagaccttccttggaaatggcatatttgaaagataatgtccaaatctatttaaacagtgggggaaaaagttaggtcataaaaccagtaccaactttgtacaaactggtctaaacgcaatactggagaggtgtttggttgtttggcttgctttcgtttgttgattttttttgtttgtattggctaagaattgttcaaaagaaaaatcattcagtttttttcttcaacattcttgtcctactgagggaataattcgttaattcacctttcactggatccaaatggaattcattttttagactttatagaaaacatacaaaccctccactagttcaatattttatgattaatttttataaacaagtaggcgatatcaggacatcttcagagatgaatataattgaatccgagtgctctcatgctgactattaaaggtttcaatttaaaatgtttgcaagagaccagggataggacgaatctccagcattgcctcacagtgccagtgtcctgggcttctagaagcagcaatggtatctgtggttggctgagttttctgggccatcagcgtgatttctaagccggactctggtgctcatcatgctcccacaagcctcagatggcttttatttcacagcagacaacaaacccatctttctgtcaaaggccgtaggttgaggtccggaaatgaatttttaaactatgtcttcaggccactaaattccaaggccatttctctttctctctattcctaaggacccatcaccacagaccccaggtgttatttgtacaccaaacacagccgtgcaactaaagaaataaaaataaaaataaaggttaagcgctctttgcctcccacttctaaaagaaacttctgggcagtgtttctcagttatgaaatgtacgcttcccaggagcagtctccgcgttttccagcgccttccctgcctgcccggctccccggactctgctcctcccgctgcccaccgaagtggccctgcctcaagtgtcctccagctcacactgtgcttctcaagcagtggctccccaaagatgtccccaatgaggagggtgaacaaaaagcgcctttcacaggatctcccaggcactgccagagcgaggcaggctttgaggagcctgtcaaggagggcaaaggcctcgctttgaaaacgcttctccagtgtgctggctcgtgggacttggcaggcccagggaacggcgccgcggggaagaaagcccctggataggcctccctggcgggcaccccctgctcttttcattcggccccatgtgacgcccgtgagggagctggcaggccagggcctggtgaatgaatcctgtttgtcagggcccccgccttgactgcagcccatacgtcaggacacacgcttcccgactgctaaatgacggctgagaaaaggacagtggttttcggtgtttgtaggacaggcaggagtggccaggcaaggactgagatcagtcataggggagaaaatccaaaaagtaaaaactccaccgaccacaggagacttttcttctctgctctggtcagcaagaaggtcccatgattcagcacagaaaagcaccctctggcagcccggtcctgtttagttctgggttcggtgcaatttctttgttgaaactcagtttctccctctgtaaaataggtatagtgacacgagcccatgggagctgctcagtaaagctctattgtttaatcagctgacaaatggcaaagccaagtcctaaatgcttactcaactggccaccagtaatgggtgcataatgagagtgagaattcaagggcagccacctacctcgcccatctgtttatttttcctgccttggtctaaaatggttccaaggccccagactcacagcagtcatgcctcttccgtggcggccagaagtgcagaggacagtgttattcaaggtcatctgaagaaggcagggacccacctgccacaaagggtcgttgtgaaaatgcaaacgtccaggagcaaggattaaggggaagactcccacaccggagagcagccaagggcacccccttgccgagagcaaaaaaaacatgtggtcacttctagaaggcagagtgacaagtcaaagcctctctgtgagttagcagaaatcattccctccgggtggaggaattacacatgtctttctgggcaggcaagttaggaaaggggtgcccgtctgggcaatccagtcaggacgagtgcccctttctcccagactggggacgcagtctggagggcagcgcccactacccctccctctctgggcaccgtggcacaccctccggggccctgcctttaaccgctgtgtagcctgacagggaaacgtcaaggtcaaacaggaggcctctcacagctgcaggaaggaacaccaaagcatcttcttgagaaataaacaatgttgcctcttttagctctaattttttctgtatggctttgaagtggcagtgtctagggaaacccccaatacctttcaaggggggagatcaaggactcctgcgtgttgcagtgaagttaatgaagccattcatccattcggccaacagccatcatcggagctctacagcgtgtccccagtaagtctgctgtcaacacgcagacatggggggcgtcagcacagcccttgacctctgcgaggtcacaatccagggtggctgcaagaccaacagtagcaccccccacccccgaccaatgaagtccagaggagcagagaaagtgctggcagacacagaggatggagcaactcacttattttagaagaaccaaagaaggcttcacagaggtgacttctgggggtgttcttaagtgaggggtagaatttctatgaccagagcagccaggtggagggaaaagcagaagcatagctacggaatcagaagagtctgtgctgtggccaaagcatggggtgggaggtgcggaggcaggaagtccctgaacacaccaagagtcagaactcagggaggcagcggagagaggacccacaactccacctgggccttagggcagctctgacgatgctgtaaggccagactgtagagactaacaatataggcatcacctggaagacttgaatgacccagggaagatgcagaggcttgaggaccaagccagaggggacggaaacacagagactcgggtttccagaccggaccgggcgcatggtgagggcacaggcctgcaatagacagcacaggagtggagtgggtttggaaggccaatgttgaatgtggttgtggagaagccaagtcgaggctcctaacaatgcagtcctgtagaaatgcataacagttaactaaccagcgatgaatagctagttttaaaactaaaaggcaaagagattgcaagggaactagggccctgtacaaggacccctgccgtgctctggggctgtgggagtaattgggtcagggcaacagttctcagactttggggtgcatcagaatcacagggcggtgtgggaggccactgacaatccaggtacctcggcctcacccccactgattttgtgtcagcacctacagaagtaacaccgattccagctccccagttacaacatactacaaatcaaggagtcctttaaactttttaacttctttctcactaattaactagaaataccctcccctgtttaccttttagctgaataatctctttaactgattaactgaagttaattctcactggccagcaaaaagttcggtgaaattagcctcgggagaaactaagatggcaaaggctattttgtgggaggtaagagaagagggagaaacagagacaagagacagtaggggggaatggctaagaatggtccgtctgggcattgttggtgaaacggcttagtggttgtggagtcactagagccacacgttgtatgtgaagtcatcaaagcggacatcagggagccctggagttggtccctcatccccaggaaaggaggacaccggctttccaccagcctcagcaggtccaccctcagacaaggctccccataggctcctcctcaggctgtcctgctgtgaacattgaccccacaatctgcacaacctgtgtagaatcacttccaagttgaccaagacttgctaaattatctcatgaaggacaacaaaggcacaacttaaaaatggaagaaggtgaatataaagtaaacccaaaactcctacttttttgtcccttctcacactgctataaagaacaacctgagactgggtaatttagaaagaaaagaggtttaattggctcacaggtccacaggctgtacaggaggcgtggctggggaggccttaggaaacttacaatcctggtgacaggcaaaggagaagcaggcacgtcttcacatggcagcaggagggagcgagagaaggggggagtgctacatgcttttaaaataccagatctcatgagaactcactgtcacaagaacagcaagggggatatctcccaccatgatcctatcacctcccaccaggcccctcccccaacagtgggaattacaatttcacatgatttgggtggagacagagagccaaaccatgtcacctacctatcattaaaaagtaatgtcccaacccaaacaagcttggagtcaagggccagctcctaccaaacttcaaatattggtgtttaataatacgtgtcatttaggaacaatgacaaaagatgaacacatgcatcttaaaagctgactagcaaaaggccaaagaaggaaatggggaagaaaaaggatatattttccttttatcagaaacctagattaggcctaaactcaactggaccgactatgatcacctcctcacctgcacaggtgaagccaccaaccatcctaggttgtctgggactcttctagttttagcagtaaaattcccacatcctgggcaacttgggacagatggtcactgtgggtccaggtcatggactatgagaatatgagaatatgagtttgggtttggaagacttccagctgactcctggactgccacttactagatgtgggccacttaatttctctgagtttcattcagttcctgcactctaaaaacgaggtttgaaaggctgtcttcataggattgtttgcaaggattaaaccgtaagggaacataaaacacagaatcggtggtacacagcaagctctcaatccatgtgagatgggaaacatttatctgcaaccgtagccagcatagttggggcaggattacccagagacgatggcgagcatcaggtgaagcagatggagatgtgggcagttgttgcttccttacagagctggtccctgtcatttgcacatttgtccccagccctgggtcctggcaagaagcctggacaaggaagctctctatgggtgctcgagagccactggcagacgcatgtgcagtcaggcaagaaagccacacgcccaggccgcagcggccctgccagtaagcactgagcacccaggcagatgggagaaccaagctgcaagcctttcctagtctccctatgatgaatgaatgactgtcctcgtgggaccacttcgcagcagagctagcaagagccgcggcacggatcctgcctacacacctgtgctcccgagccctgcagagctttgggtcttctcactagcggagtgaggatgagggtgtgctgaccacagcaaggttgtgtgcgtgcctccatggaggtgcgcagagcagaaacgctgcccctcgcactgccatggtggtaaggagaggaaataaaacccatgtcttttcaaagattgtgtgagtgtccttgaactcctcttctggcttttcagcagctgtttggcatatacaggcgaatgacagagaggaagagggggcagagacttgtgtagatgccagtgtgttgctcactgcaggcagcactgactgagctcctgccgtgaggctgacacagtccctgccctcctggagattaaccctttagcatggggaggtgacagcagacaaatcagtaagtaagagagtgtttgatggtaataagtgtcctgaacacaaaaccaaaacagtaaagtgatgagtaatggggagcagggggactttctcagatgggagtcggggaggacctctgtaatgggtcatgtccgagccaagaggaggctgatgccaaggaggaggcagccatccgagaggcaggaggcgcgtgcaggaagatggcacagtggcgccaagaccagggatgggagcaagcatgggtctgcccggaataggagtagctgcgggacccagagctcagggagacggtggtggcttgaatgaggggagtagaggtagagggttgacaagtggcccaatctgacgtatattctttactgcaaagccaatgggacttgctggtagattgagtgtgcttggaggagtgggaaacagaagaactaagggcgactctttagatttaatgagtagataaatgctgtaaccgagcagaagatggaagaagactggtttggccatgtcaagtgtgagatgccagctgcacatcctagtggaggtgccaggcaggcagctggagagataggcttgaaggagggtcaggtctagagacagaaataagggagagaatagctcccgtctggagtcggaagggagatgtctttcgctacagcgtgtgaatgttgctttgcttccaaacacaccatgcggtccacacccgcttgcagcctaagtccctgcatgtttaaacagccaggctgtgaaccagctctacctacaggcttcacatacaacatgtggaggagcctggcccagttcctgcccaactcatgtttattctctcagcaaacatgtgtccaggacttataccatgccaggggctaggctagataacttgtcctacagaacagaaggcttgcccagggagttacctcatttggaaaggagatgggagggtgggcagggtgtggccgcaggaagtggcaggcatggggccagggtgcctaggggccagacttgctgagccatcacctagctgaggacctgaaccaagtccatctgcaggctgtgaagccctcatcagtggggaaaaatgaccccttagagtcccttccagttccaaaatgctgcaattatctggaaattatcatctaagtagacaaatcatttaggcaaaaaaaaaaaaaaagatttaaaaatccttttgcttcaattacgcatttttttttaacgtgaattttcatggtaattggcctgaagcctgagtagtctgtccccagacaaagcagtctttgagttaaactctgctttgtatgtcaaagcaaagatacccgcagagcagactccaccttcttctctctacacctcctctccgggctccacctcagagtgcacagatgcggaggtgcacacgaaatctcctttgtactaagtacagttattataaggtgtggccccctagacactaccctctctattattttgacagtatgacttcctgtaatattactatctcctgtcatctcagtaacaaaggctgatacctgggtttttttttttttcacctctcaacaatatacttgacatttaatgcatcatcaaaaagtttctgaggttttggggctaaagctctaaaagtattacttcctgctgccggggcagcagctcaggtacccagagcagccccaagacttctgaagcaaggctgctgccctgttctcaacttcgccagacgatcccaaggatttcaaagccagcccaaaccgcaccccaccctcagtgggccctcccaagggctgagaaatgggtcccagagcagaaagcacagaggccactgcttcccatcccaagctctctcccttagttctgtgggtccttgagcaagtcacttaacctttctgctacccagattggtagaattactgcatggggcaaaatgatccccagggagtggcccagcatccattctcaggtgtttaagtagagacttgaactgccctcgaggccagtcaggtgacctgcgatgaaacctgcagtgaaaccgcctatttttcctaaacattagaagaatattagcttggtttccccaaacggctccctggtggcccagcaccatgggaatgttctgggcctgctctgtgaaggtgggatttgcagccagcaaggcagaaaagcgatcgtcatttacccaactctctattacttcagcagcatttacagtgccacacatgtgtggtcagggccaaagccaggctcgaagatacaaggacaaacacagcaaagcccacgacctctggggacagactgtccaggggttggaatggcatgtgagcacacagctgcccgcaggaagggctggggaagaccggagggggcacaggaagggagcccctaattattcccgaagattagagagggagaggcagagcaggcttcccaaaggagctaacacttgacccaactcactgttttcacagtggttgggcagctggacattccaggcagaggcagtaggaaactccatggcccaggcccagagagatgggctggctaggtaacacacacggacccatgaggctggaccatgatgcacatagggcagtgctggaaaccaggtccgaggcttcagcgtctgctgaggagcgtggctgtttctcattttgggtttttgacccgtggagtgcagtacaggctgtatagctaagggtcagaggccttgatttgggaggtcagccacactcaaatggaatccctgcttgtactaatggtgcaatcttgggagaaatactgaatctttctaaacctccatcctctcatctgtaaaatgggcataataatacccacctcatagatcgtgagggttatgtaaaataacaaatgtcacgtgctggcattaattacagcagccagttaaaacacagaggggagggctcaactggtgcttttagaattatccctctagcgctgtttggcagatgggctgggagaaagacaggtggctgggatgcatccaaatgcatgaacgcacacatacgcacacgcaaacttcttttttaaaatttatctatttatttatttattcatttatttgagacagggtctccctctgtcacccagactggagtgcagtgacgccatcatagctcactgcagcctcgactcctgcgctaaagtgatcctcccacctcagcctcctgagtagctgggactacaggtgcccgccaccacacccagctaatttattttttattattttttgtagagacaaggtcgggctgtgttgctaagctggtctcaaactcctggcctcgaatgatcctcccacttcagcctcccaaagtgctgggattataggtgtgagccctcgtgcccaggctcgaacttctttggtagtggggtaaacaatgcagtacagagaagatgtgatttaatttgaaggtgaaagaggggaagactccaaaaaaggctttagggtaaaggcaacttaggaaatgggtcctgttaggaggagaaatttggagagaataatgcatggaggcatgaagtttcaaggtgttaggagcagtgagaataaaccagagctggtggcctctgggggaggagggtagaaaaggctttcacgggtccatactcaggagacacatacatattccatgcccactgcgtgcgccagagctattgcgatgagtccaggccagatcccgggcaggccttcaatgccatgctaagggatttggaatttattcagaaagtagcaaggaggccattcctttattagaattatctgtttcctgtccactgacccacacaaatctttcaaggaaggagggagattgcagtagaagcgtgcccaccaccccctggctctcccacattcaagagaattgaaccaaattgcttcctgctgccctgtaacccaggcagggtccaccctctcacagcacactaaagttaacaataatactcataatagctaacgtagctctgtttgaagtgctttgactgtcttaactcatttgatcctcctagcaagactgatatcattattctcccattttgtggattaaaaacaagacacccagccatgaaggaatgtacccaagatcccctagctagttaatggacacatgggttgtgaaccccagcagttctggacagaagctttgcaagtcaaggactagagatttctttctttttttttttttttttttgagacggagtctggctctgtcacccaggctggagtgcagtggcgcgttctcggctcactgcaagctccgcctcccgggttcacgctgttctcctgcctcagactcccgagtagctgggactacaggtgcgcaccaccacgcctggccaatttttgtatttttagtagagatgggtttcaccatgttggccaggctgctctcaaactcctgacctcaggtgatccactcgcctcggcctcccaaagtgctggaattacaggcgtgagccacggtgagcggcccacaaggactagagatttctctgctaacacaggggaggggcccagcacacaagtggcccggggcgcctcaaggggaaggcaagttgccacgtgagggctcttgcgggcaggttgtgtcagaagaaaggtgcctctcactgcaccaggggtcacaaaaacacctactgtcttgtctcacctccctccacggaggacagtctggccactgtgggactgaacaccaccggctcccagagggcgcagcagcttagaagacgcaacgctgtggccaaatgcagagaccgccttgggagctgtgttcacggaagcgagggaagatgggggctgtcctagagtatcggggatcccaaactgaaccagccgcctctctcctctccacaatccacccctaagagaggcacaggggccccgtcgggggtcgatgctgggggtgggcgatggagctccttcaaaagctgcctcttcttctcctcccccatcgtggaaccgcgacttcctcctccacctcttttcttagcctgtgcctgttcttcctttacaacccactgtctatgtgagccccacctggaccatgccagcccagaggttcagaaattctgtgcagaaataaggagggcacgcggatagcagttctggaggatgtctgataatccaaggtcatccaaagatttctgttggaaagtagggggtctgaagtgaaaagaccaaaatgaactcatcctggatgtggggaaggtgatgacagcgtctgtgccagacacttcaagtctacgaattccttcatcaccaccattttacagatgaggagggaggctaggagctgaacagccagcatgagaaccgggagctgtctgattccaaagcccacgtctcctctccctgccacccagccataaggaaggatttttttccaacacttaatctctctctgcccaataatgaaaggcagctgcatcagtatctctgctttctgatccatgcagatgggaaatcatctagaaagcacatgcctggcacaaaagcactactaacagtcctcatccccatgctctctctccctccccgtctccaccacctcatggggcatctgaccaggagcaaccttcatcccaaaccttgccttcttcggaggggtgaaggaccaagaaagaagcttccttgccttggtgtggactggaaaaggaacagcaatctttcccctttatttccacccaccagagcctctggaaaatcccatttcttctgataatggtagacagaagttgtccctgcctaagaagctctgaggatactggttgtagcagcaaggtgtggcaacaggcacagaccctggcaggaagccagatacaccacgttgaaaacctaactctgtctaggagaccaacttcttccaggtcccctggggagtcattaaatttctgtgtcttcatttcctccaaggtagaaaggggtaataatctgacctacctcaccagagtgttgtaagtcggaataactaattaacgctagtgcagcacttttgaaagtaaaaagcactttgcaataattaacgtggtttctgctttcatctcctgcagcctcataaatagagagctaggtcccagatagctacagatggcaagaagcatgccaggcagccggctttcctgaggagctacaagggcggctctgtcagggccatcaaagttgtcttggggctcccggccactggagactgtttcaagctgacaattccaaatccatttgcatccacttagctttccagagactgaggcatttttcagttacagcaaacaacacatgaatgtgaagctccaagcaggcagcacagggcaaaaaggactacaaagtctctggggctgctgctgacttgtcttgaaaaatcaaaatgaacttttttcttcaaagactttgcttttattcatcatcattataaaaacagtcaagtccttgaggtctgcagctgcagagaatgcatacaaaatgggctctctgagaaaaaaatatatatatataataatgatgctctaacactcttgtgagcaaagggccacaggagagcctgggtttggagtccagccttcacctccactgggcatattttgcccgttgggatgtgtatgcccccaaaaaggcactgtctttatgaggatgttcatagctggggaggcatcttccagaaggtagaagcatctttaggtatgcaaactgctacaccctggaggatggtatcccctctgctagctgtcaccagtaccccaaaatgtaacacagctttcatcagtatatcacagagaccgcgttacaggggtttgggggttgtgaacctggttgattggtggagtgcttcaggtccacatcgtaaaaatgcttctgtgggctgggttgagaagcatgaggcataataacatttctttgcaaagtgtattgatttccaagcggctgccttaggatctggaatgccggccactcataagagaaggaactgccctgaattatgagacacatgctcccttcattatttcagaggggaggaatgcagttatcttgaatttccttggataggtggtgttcctttcctccttctctcccttcttcctccttccccttctacaggccattctgtcagctaatagaccattggtggctaacagggacttctcagaagaaagttagggagaagctttaccagaaagtggggagttggtgggagttgggtaggggtatgactggctctgtggtactgaagaacacttttccagactccaaaatatgtttgcagggaggcaagaaggaacaggagcaagatggggcctccagacaacctggcataagtcctcgacgccaggagcataagaaggagaagcaaggagagagaagatctagaagcaagggaacttccagagccccttctgatcaagaaattgatacagcagcccctgggggtcacagactgtcactgagacagaagcctgtgaaaaggacagtgcttagtccagcagtggactaggcgagtggacaatgagatgacctaatcatgagttttggatgggctcaagtgagaaaagaaggtagagtagaaatgatttgttttgtattcaagatgaaaaggccaccctcccttctgcaggggaatgaattcttatatagctcggatgtgtgtctcctacaaatctcctgttgaaacatgacctccagtgttggggatgggcctggtgagaggtgttaggatagtaggggcggatccttcatgaatggcttggcgccgtcctcacaggattgagtgagttctcgctatgagttcatgtgagatctagctgggtaaaggagactgccgcctcctccctcccttgctcttgctcttgctcttgccatgtcatgggcctgctcccccttcaccgtctgccatgagcagaagcttcctgaggcccccaccagaagcagatgctggtaccaggctttatgtacagcctgcagaaccatgagccaaataaatctgttttctttataaattacccagtctcaggtattcctttatagcaacacaaatggaccaacacagattcccttccctgagagccaagtggtgccactggagagcccctcccagatgctggtccccagggagggctgccgggtgagcctgtgggggcaggtggcagtcaggcacggacctcgcaaggctgtggtcccagccacgttcttgaacttcctgcagggtcccctcatggagcttccctctgagcatggtgaaggccagaacagaacaagaggcagcagaaacccttgtctttcactctgatgagtgttgcatggggctgatgctggaaactgcttcacaatctcaacagcatgggtgccggccaactccgagggatgtgacaataggccagcctgtcccagggcacatcggctgaatatcacctctccacggagtgtcagccaagtttccttcttttaaagaacattttggctggacccagtggctcacgcctgtaatcccaacaatttgggaggccgaggcaggcagatcccctaagatcaggagtttgagaccagcctggccaacatggcaaaaccccgcttctactaaaaacacaaaaattagccaggcatggtggcagcgcctgtaatcccagctactccagaggctgaggcacgagaattgcttgaacccgggaggcggaggttgcagtgagccgagatcgtgccgctgcactccagcctgggtgaaagagcgagagactccgtctcaaaaataagtaaataaataaaaataaagaacattttaagattaaatgacgaaacacacaagcggaagatgtatgatgcttgtgctatatggctttgcatgagatcattatcaccatcttgtgcagggcagcttcttgggtgtgcaacctccctaggactttacatttaaaaggaccccacacttggtttaatgctctgctgttgctgtcttaataatcatgctggaaaaaagtgtcccatgttttcattttgtactggaaccggcaaactatgtagctggtcctagactggtgaggtaagaaatacaggtatcaccaacttccccatttccaatgaggagactgaaggataaggtggtaaaatggattccctaaagacaccccgctagtaagcagctaactgcagccccaggtctccctagtgcagtatctagtctgatgcatgaatgtaatgagccgtttctgagcacctgcccagctcaggacagtgacttcatccctgccccatgccttctatcgtgagccccttacactgcttataccacttgagactccccaggctcgaactgatgcccacgcctggccaagctgggccagtcagatggtctctccagggaatctaaaacttgcacctagagggacagatgacagaagggatagaaggggcatccagagccatcgtgagaacagaggaatggcaggttcaggcacaggaaaatcacatgaagccttctgcatctcccactctcccttccacatcctaaattcatgggtcccaaggagacacggtctagaggaaggctggggtctcccatacggccaaatgataataatccaggaacctaaagaaaactgcttcatgtgtcctcacctatggtcaaaaatctgccagacctgctgggagagaaagttacaggaagatggagagtagtggctggcaacatctaccgcttcatatttacaaacatatgtagcatttcctatgtgttagattcccttctacatgttttacatctatcagttcatttaattccaacaacactatgagataggtattattatcatcaactctagtttataggtaaagaaaccgaggcacagagaggttaggtaacttgcctgaagaagtcacacagcttgcatgaagtagggccaggatttaaacccagacagtctggctccagagcctaggtttttaaccctctcacaagctgcctctcaaaagtattattctggccagtctgaaataagcaacatgcaatttccacttttaagtttcattttaccttctcaaaatgcagtgtctcagaagtcttgactatttgaaatcaataaggcctttgagtagtcaaaagggatgttacaaagactatacacaaaagcgtgaatattcagtccctccgattcccactcaatgcctatttactcaatctctctctatctccctccttctgtctctccctcccttcctctctctcttacttacacacacacacacacacagagagagagagagagagagagagagttttgttatccactttcaagctcccagtaagtgagaaggaaatgatagttcgctgcatgcaagcatgctgacagtatcaagaaaacattactatgagcctggcagtaaaagaggagacagaaaaaccctaaaatcaattctaaaacttacaaagcacggcagcagggcttcatagaataatgttcaaacagccctaaacatcttcatcctctatcccaactttttattatacaaatagccttctcttggtggttaagccatttccagcaaggttatcaatgatttgcagatgaagaaatcttgattcaatgagcagctgagaagatttgctacattcagtagatgacatttaaaaaggtggaggaatatgtgctacattttttaaggatttacgtctaaaatggttactctagaaaaaaagtttgagagcttaagtgggtagacagatatttttatttctttgttggttggttgattggttagtcgacggggaggtgcttgttattttgggtttgtactatatgttggttttctaaaaaaacacagttgccctttaaaagagtcatgtgctgtctagtttaccacagtccccacccttccttcttcatattgaatttttgttttaagataatggtaggttcacatgcaattgtacaagataattcagagagatcccatgttctttttacccagtctccccctaattgtaacatcttgcagaactctaatacaagatcacaaccaggatattgacaaggacagtcaagacacagacagtttagtcaccagcaggatcccgcgggataggcacacccatccttatcctgctcctcctcagccccaggcaaaggcaaacactaatctcttcttcaattctataattttgtcaaatggagaatgttatcgaaatgaaatcatgcagtatgtggcctttggggttggttttttcactcatcgtaattccccgtagattgatccatcttgttgcaggtatcaatagtgcgttgcttttactggccagtaatagtccacggtggtttgtttacccagccacccactggaggacacaggcaccgttcttttttgcttttttcccagacggtttcctcatttatctgacctgccttgccccgtggacatttgaacttccaatccccagggtggtgtctcacctaggatgggaaaactatctgaatccaaaagatatccacaatgactcgcttcctctcagggtagagctttcagtctctcctctctgtggattattcatggccacagttttaatcccagggaggacagcttccccaatatataaccggctctggccccttattattagctggtgtgtactcaggaaatgcaaaactggaaccaatataaacaggataatagatagatagcaccaaaagccactcaaacataaatatggaaattccttagggagcacctgtgctttgtgttctgccttctggtagctcattttgtgagcatagataagcagggtcaagtccattgagaactctctgtgccttatcttttacccatcctatctctcactgatcccagggagacttcagaatgctcctgggttacatacttcattctgtctcagtgaattcctttttttcatctggctaacttctgggacatatcatctttgttttttaaatatctcactcttggtatgagataaattctactggccctaaagcacttgaagtgtcttatataacatatttcattcagtaaatatcttctgagcacctgttctatgccatgactgtacttaatgatgacataaattaaaattctttaactcacaaaataaattctctaactcagccactaacagagtcgtaaattagggttctccagaaaatggccaacatgctgggtccccactgccagcatctcatctgtagtggatgactcaaaacattctcgattgagctgacttgctaggatctatttcaggaattggatatgtgtgggttggatcagtctgctcagctaggtcctggcagcaataacctcctcattccaccacaatacattttccaatcattcttcacctggattactggcaacgccgcctgaacgactcctcctatcaacgttgctcaccggccattcctttgacactgaggactgtactacgcaccaagcactgggaattacagcaagagcaccattttgtttggccccacgatgtttgggaaaataaatatgactgcaacgtaagtatgactatcattcctgttttacagaagcacctgaggggcagaaagctgataggacctcaaaatcccagagttgatcaattggagcaggaattcaaactcaggtctctctgacatcagagcccattctctggggacttggccagaccacttttccagccccaaagtcccagaaaagaccttcgcccacctccctgataagacaaatgcttatcaccgatcttcctagaaaagaagaacccagtttggtcctcctcttagagggttcacttaatttcactcctctaacactgcaaatcaagctctcaggaagccgacttcagatacagacttgggtccaggacagttcctaaggagtgatgtgtggatcacaaccagtgggggagtaaagaaaggactgggtgcagggggatgttgaacttcagtgcagtcagagttcaagcctcagcgtacccaatgggaacactgaaaatggcccaagttaagtcaaggagaccgtgcctttgtaccccacaccaaccaggcactgggtgcagactgccccaggaagcagatctgaccttggcccacgcgaatcccagggagggactcagctgagagctgtctgccgccccgcagctggggaattgggcagtgcactccggcatccattaggcttaactccagttttctttctgtagctcttctatcttataaaacctctaaattgggtccaaggagaagtcaagtcaattttgtacatttttcctacattcttcttctaaagatcccagtattcatttttcaattcattctttcctctttctcaataaagataacaagctttctctccactgcctctacttacctgagaacaaatcaggaaaattgtttccctggatcttcagagctgtgacctctggaaaggtgccctgggggtgagttctgccgctagagcctggggtgagcctcttcctgtctgctccagctgccctcttcctggtgcctctggccttctctctccatccccctctcctttccaaccctctgttcctgcctatgcccttcttgcccttcacccggaccatggccacagcatcccaccatccccagtcttgcccccacaaatccaccctgcgcccctcctgctgccctagagatttttctagatgcaaacctcccatgtgcctggttcacccattgtttccacgatgagagtcacattctttaccctcacattcaagactctcttgatctggccgtgctgacctcttcagcttcttttctttttttttttttaagttctaggatacatgtgcagaatgtgtaggtttgttacacaggtatgcatgtgccatggtagtttgccacacccatcgacccatgatctacattaggtatctctcctaatgctatccctcccctagcctggcttcttttcttgatagcccctccccacaattatacacatatgcacacacacacatgcacacatgcatgcacacacgcacagacctgtgcacacatgcacatgccacatgcacacatcattctgatgatgctgaactgtgcttggtttttcctcatccaccacattactcctacctccatgccattccccacaaagttccttccatctgacgtggcttatctttcctacaccaggttaactccttcaagatccaattaaggtgttttctccttcaggaagacttgcttgccaacagaagctggactacagcaacttcctgcccgcagcctggtttccacagcactcagacttgcctttaccacaccccttattattcggaagtgtctgccatcactgccctgccatgcccctgcaggcaggagagcatcttttctttttctgtgtccctcatgcctggcacagtataggaactcaagttaagcttgttgacctgaacagaccgaactgcctcttcagcatccacaccagctattttctgcatgtcctcaactctctacctccttccccttcagaattctggcttgccccatatgtgcccattttctctacttcacaaggtgagtattcagcacagttgtgctgcacattaagtaaaactggtgttaggaaaagtctgcattgttaaaaaaaaaaaaaaagtaagggtgattgttgctctttataaaaggctgctagccttggtttctttaacaaggaaactccaagcagtcacaaagagtacatgcctgcaaatgccaatcttcaaactgaatgtgattaccttgggatgcctgtactgtcttctttatttttttttatattatttaaattttatgtaatgagaatgtctcacacattcaaaaaaataaaaaaaaaaccagaaatctattttcattgtgggagaaacatggaaaaataataggcttcctggtgacttttttttaaatctccaaatagattaaaaaaaaaaaagtagggccaggcctggtggctcacacctgtaatcttggcactttgggaggctgaggcgggtagatcaacagaggtcagagttcgagaccagcctgaccaacatagcgaaaccccatctctactaaggatacaaaattagtcaggtgtggtggcacaggcctgtaatcccagctacttaggaggctgaggcaggagaatcgcttgaatctggcagaggctgcagtgagctaagatcacgccattgcactccagcctgggcaacgagagtgaaactctatctaaaaaaaaaaaaaaaaaaaaaaaaaaacccaaatcccttaatctctaggctcactagcaggaacaaattgcacatttgtaggactctatgcccaaatgcattttaaatcattcaattcgaaaaccgtttctttcactataactctccaagagccaatgttttagaaacaatgttagccatccgggcactattgtgacactgaagatgtagacaagcagcaaactcacagccaaggagcctcaaatcccaatccacacagtaaagtaactctctcagcaagtcaatggcactcgttgaacctccactgctttgactgtaatgagatcatctctgcaccccccacagctttccagtaaaagggggaaaaaagacaacatatgtacacttgctttaaaaagtaaaaggctaggccgggcgcagtggctcgcgcctgtaatcccagcactttgggaggccgaggcgggcacatcgcgaggtcaggagatcgagaccatcctggctaacacagtgaaaccccgtctctactaaaaatacaaaaaattagctgggcgtggtggcagacgcctgtagtcccagctactcgggagactgaggcaggggaatggcatgaacccaggaggcggagcttgaagtgagccgagattgggccactgtactccagcctgggcgacagagcgagactccatctcaaaaaaataaaattaaattaaaataaaagactaaagtcaccgagataacaagcggcagaggggttaggattactaataatgtgccagtagcagccattcccctatcccttgcagtcgctgccctgtccctgtgagttcagccatccttgtgtggattctcccttccctgcaggctgccctccaaatgctgtcctccatcctcatcaggcaggactgattcccaagcttcagtgctttctgcccatccctccttcaggtatcaaccccggacggcactgactttttacactaacaggcaaaaatcaccagctgaacgggagcctaaaactacatactctttcctaaacatacatgtttttgtttgtactttgtcatattattttttagggaggggtatctcaaaaatcattttaaagaagcatttgattgcccaatctggagaattattttcttaacaagttttaggacataaagagccacatcatctattggcttacatcttccaatagagagactaaaaatcactttcacctatattaaatcccattacatccctgctaggtaggaggcaaattgtctcaaatgcatgagtcttctgcaccatggatgatatggtttggctgtgtcctcacccacatctcatcttgaattgtagttcccataatccccatgtgttgtgggagggacccagtgggaagtaattgaatcatggaggcgattacctccatgctgttctcatggtagtgagtgacttctcacaagatctgatgtttttataagagacttttccccctttgcttggcacttctccttgctgcggccatgtgaagaaggacgtatttgctttcccttccatcataattgtaagtttcctgaggcctccccagccctgcagaactgtgagtcaattaaatctctttttacaaattacccagtcttgggtatgtctttactagcagcgtgagaacagactaatacaatggatcatcaagtatcttggatttaatcccacagcctgtgagtgagggtggtcaggctagaactagaagctccatgccagacctgcttagtccactggaccaggcatccactttttttcagtagctaagaagatggcagggaacatatctgttaataacaaagtgaacaccatctttaagatactccccagggcatttatcctaaagaaaggaaattgatataccgaagagatacctacacccccatgtttactgcagcactattcacaatagccaagatttggaagcaacctaagtgtccaccaacagatgagtggataaagaaaacagggtatatatacacaatggaatagtattcagtcataaaaaaaaagaatgaaatcttgtcattggcagcaatgtgaataagcctggaggacataattttaagtaaaataagttaggcacagaaaaataaattccatatttaaaaaaaaaaagattgagcttagagaagcagagagtagagttgtggagattagggtgggaatggtagtggggaagggaggatagggagaggttggctaatggacacaaagttacagccagatgggaggaataaattctagtgttctgtagcactgggtagggtgaatacggttaacaataatttagtgttattttcaaaagctagaagaaaggattttgaatgttcacaacacaaagaaatgataaatgtttgaggtgatggaaacgctaactattctgatttgagtattgcacaccatatgttgaaatatcacctgtaccacagaaatatgtacaattattatgtgtcaactaaaaataaaatgaaaagaaaaaatatattctcccaggacctggcagcaaatatcccattgaaagaaaaccggattcccaattttgcttttataaaaatctctgatattcatcttctcgagcaataatagcatctttgtctagggaaaaaacatctggtttatttatatggtttgacttatatctggtaaggagaggagtagcaggtagtcagtgctcatgagtatcatggaatcagtacagtggagcaattaagagcttagactttagagtctgaaacactagggtccctttcccagttcagccactcatgcaccatgtggacacagactagttacttatcctcttattgccaacacctgactcagagtgttggcaatgaaatgacttcatgaaagccaagtgcaggataaagaacctcgtgcatagtgagcatataaaacattatcatcatcatcatcatcagccatcaacaaccgcaaacttccaatcgcctgctacattcaaagacctgcccaaggcactgagagatgttcacagttctttttaggaagaatgtttgagagatttgagaggtatttgtcaagtataacaatggatttaaagatatccaggaaaaactatcagtataatcacttttctaaactacaagcaaattgcataacataagcattatcttttaactatacaaataatgcaaactaactagtttagaaagcaaggaggcacaaggaagcatccatttgcctggacatttgttcgctggttgctcctatgcttaagttagttgtttcttaggggctggccacagtcccattggatgagaagcttacaaccatcatagtcttacttctgctcctttaatttccaagttcctaggggcaacactatagctaaatatcaggactagagatgaatgctcaactacacacacacacacacacacacacacacacacacaccctcccctctatgacatcccacgtcaccatcaccctcaatggcaactttctatggaattttatccacttctctggttctttgttctgggatatcctccctttttcaccaaacatggagtcatgtcagctactcttgtttattatcatacagaatggctcatacctcgtaatgtaggaatgttctgtgctattgctgcaaaccattaaactttaaagcatagaatagctttcatgtttcttcttctttggaagaagacaaagcactgacttcactgccatttgtttcataacttactcacattacagccctgaaaacattctactgttttggcccaaatggcttccttgagtgaagagcataggtttctacagcagaaccagcaggttagctctcagggtcaaccaatgcacacaatggactctggctcccaacagctagtgcttcagtccccagattaagggccattactgtagatgagccatccttaccacccatacagcaatggaccaatttggaaggagccactggtcagctttatacttagaagacagttacaagaggagcaacagagagtagtgaccttactgaatgctctttgtacttatactcatccagggacctacgaggctgtgagtagccgaaactgatgtgctgaaaagtagagcgaaatggaaatagatctgttatgagacagaaggtcttatagcccaaaattaacttactgcaaacatccatctttgctcccagtccaaaagtcatccaacataactcagccaatgccgacgtccagagaattaacgagtagctgctagtttctgctagatcattctttatcagaacataattctgtaagccccctgttaaattttcagaatcctaaagggagggagcctatctcctctatctttacattccagttcttagcacaaatggctggtatagagcaagctcaccatagatatttgcaacatgagttgaggaaaagcaaacatcatcctcctgagcttagtgttctcaggaatccccaagcttttgaagaatggaggaatgaccttctaactccagtcacatcatgactagagatgaatgttcagcacacacaggaacacacagatacacacacacacacacacacactccctccatgacaccccattgtttccctaaaccagagtcaagtactaggatgcaggctttctggaatgcacctccctggaattcccagcctatgttgattctatgagtaaccatcagacactggctaccactatctgtcatcagataatatccttttcctcccactagccaactggattttgaacctgaaatacccttagaaggatattttcattttagttcgtagtctggctgcagcctcagccaggcaggcgggcaggatacaagggtcaccacacattcctgctggctctggaaggcagagccatggcctgtcaccctcagggccttgccagccaagatccacccatctcaacagcattcttctttccaagggcctctctctccagccaacttcctcttcaacctattattctgaggcacttggctctcccttgttcctgtggggtagcctaagtgggtggctactttttacatgtcacaaaattgcacttggttttctaccatctggccttctccaatacactggctatatgttctggtttgctactctctctccagtgtgatttacaaatttctttcccgaatgtgctttccagatacgaggctccagtgtggagaaacaggtgtagacttcttgtcaaaactgccaaaggctaacaccactgacaggcaagtgtctcctcactccccagggactccgcacccttggaatggaacaaggaggaaagctataactgggtcccctagagcacagactcaggactggggcccatttcgctggggttctggggtgactagattcatacctcttcattaatttgattgccaagaattcaagagtgtatccattacttcttttcaaagattttatcttctttatctgttactgcttttatgattgaattttttgttacagattacttgttaatatctgaatatttctatggatttcctatggaaagatatgaaaataattctttctgcggtgcatttacagtttcgtaggctgcattatcaagtatatactggacaagagacagcttatattttgacaaggcattgatgacagttgaatcttcagcttaaaattttacatatctgatgatgggaagaatttgtcacagaatagcttctggccccttccatgtcaaaccttgatcatcttctattacccacacacttctggtgccaggtccttaaatgcctgttcacctcagctcagtcatggaactggttgagtcagcacaatcggcattagaagcatttctgtaaactactcacacgagtggctacaaatagttaactatacacagaagcaactgtgaacctcataaatatatacctctaatccaaactaaatgtctgcttgactccgcttcccttattctgatcccaaaaatgcctgcagtcaccaattcaagaagggagtatattggagaggaaatcgcactagaaagagactgtggtcttaaccaattatagatcatttatcttacttgtataaattttacaaaaacctataagcatgtgaacagtttactggaccctcacatggctgtgaaggtgaaggagcctgagccgaggctttgattatctttattggaaatccactctgtcaatcagaacagatgtagctgatgagcaatcagctccattacccggcacctactggctgaacaagcatccctgaatgttgactgctaacgttcataaacatctgtacgtgtttatgactaaacactaggttctcactctaacttgttttaagttctgttttgccatccttttctttcattatatgttattgcagccttgatctgtacatttaggcatttttaaatatgtggtatgtattaaggggctttctgggatcacagaatatatctctctacaaaggagggtgtaagaatagcttggatgaaagggcaaaatccaagcatccctgaatgttgactactgacagtcataagcatctgtaggtgtttatgaataaaggttaggttctcactctaagtcgtttcaagttgttttgccattttttttctttcattaaacagttccttcttgccttcctttaaatgctcatttgctgtggtctcaacctcttgcatttttatgttattgaagccttgatctgtgcacagtaggtatttttaaatatgtggtgtatactaaggggctttataaagacaggattacagaacatatctatctccaaaggaggatgtaagaatagcttggattaaagggcaaaacatgtagatcaggtaaaggaaggtattaagcagtcaactgatgagccaaccaaccaagccaccgagagtcctaggaagcatttcctgccctcagatcaggtcaggagccagacattggtgtctgtgtgttggtttctcctctactggaatgcacgtgtgttgacagcaggacctgcatccttcatctcatgtgtccagcatggtacatgtgcaatcagctttatcaaatgaatgaatgaatgaatgaatgacaaaacatggagaatggtctgttttgttgacggttaggattgttgatgattaggagtcactggaaaccttggcaagtgtgattctggcaaaggtgatgcagaggaaatcagatcagagaaattccggaagcatgttgtttatgaaggaaactcattgtggatgcatgctacaggatatagggagtgagggggacaggaactgcagttctgaacagggccaaatatctgggttttattttataaaagaaggtatccaaaaagagaggctgggacccaaagaaaagaagaagagagctggaggcggggtgcaagaggcagaacagggatgtgtctagatgatgacaaaagaccttcctgaagctggtgacttagtgggcttgtatgatgcagggtcctggaccttggtctcctgtagggaaatgcttacctcacgggccacaacaccagcacaagcaaatgagcttcctggtaaaaatgagcgacaccatcagagagacatcagaagggaggcatcagaggcaccaggtaacgggaggggaagcaacatgcagcacccacagatggcaacagtggaatgagaatgcaccagaaggtcctggtgggtggcaagcaggattctgcctccgccaactcatcaacacaacacgggttcttttcgtctttcctctaaccacaaatcattcattaattttctttagtgtcttccgggattgccatcctcccatttccattgaggattcctcaacttaacaaaagtgttcgttgggttagaaccagacctgaaagcagcgagggaggagcacgcacacacatttcattatgaatttgtagcttacatgcacccagtagttcttcctcagatggatgcatattttatctatgtgaattaccctggagttgtgactttctaattttgtcttaattaaacgtgtttcctttcccaattagccaggtctatgttgagttttaaggtaactctccaaggtgccaacattcccccaacctactgtcacacacaaatgtccacaccttccacttattcaagtaaaagaaccagaaggaaggatgttcattcccttttttttttttttttttttttgagacagagtctcattctgtcaccaggctggagtgcaattgtgcaatctcggctcactgcaacttccacctcccgggttcaagcgattctcctgcctcagcctcccgagtagctgggattacaagcatgcaccaccacgcccagctaatttttggtatttttagtagagacagggtttcatcgtgttggccaggatggtctcaatctcttgaacttgtgatccacctgcctcggcctcccaaagtgctgagattccaggcgtgagccactgcgcccagcccattccctctttaattagctttttctccttatgcctttttgattttttcatctcaacacaaagcgaacacaaatctagaaagagagagagagaacttcatctggaaacaaaagatagaaccctttccatttcattggctggcaataaagactgaaacttcatcaccatgttgcctggcaacccaggaaatattgttgtgattaaacaaaaactatctggagtaaattcacaatgaaacagctgaaaagcattatatcatcctgcattccactatgaagacatgagcagcagataccctgggactgttcaccccccaaaacacaaaaaaacaaatataccgacatcgccaagaggcagcctagaggccaggaaattccctggactaggatcagaagtcctgggcaagtctcataacctttggggcggtcagagtttttttcatctgcagaaagaacaagtagaattaataagctctgacatttcatgtttcaaaagaaatagtaaaaactgggagcatcgtgccagtcatctttttgaacggcagcattcatttaagagccatgaacagtgatccacaggcctaaagggtgaaagtcgcccatcttgccttaaataaaatccacagtgggattggttgggttcccataagctgttgatgccccagttattacaagtaactctcctggcttagaaaagcagaagctcagcattatgagaacagctcatctcattaagacaaaaatatctcctagaaatttctttaaggctattacagcgagcaaccttggaatcaaagagaccaggcaaaattaaagcaacttgtttgtagaaatcacaagtgagtagacttaaaaaaaaaaaaaatctgacaaaagaagctgcagatgaaacctaaaaaccacagcaacaaagctttgaagaatatagtgtggtggctaaaaacattaaaatcaaagactctgggttcaaattctgtctttaccactgattggttggggtgctattgaaactctgcatctccatttatccatctgtatgtgagtatgattactgtaggaatgaaatgagttagtaatatgcttagaagagtggctgacacatagttagcagctgtcgttatttcagcatgagcccataattgttaataccagtgctagagtcagatgggcctggattcaaagcccagcaccactggttattagcagttgacctctgtgcaagcttcttaacctccctctaagtctcggtttttcatcaataagatgggaataatcatataatacctcatagagttgtgaggattaaatgagataatgcttgtgaaatgcacagcagaacatagctgtcacaaatctctactgtccaggattcatcaagaaatttctctgcaatttccctattaatagtttctcactgcttttccatgccataaaaactaacaatgagccagtcacggtgcctcatgcctgtaatcttggtgggaggatcgctagagcccaggagttcgagagcagcctgggcaacaaagtgaaaccctttctctacaaaaaatttaaaaattacctgggcttggtggtgtacacctgtagtcccagctacttgggaggctgaggtgggagaatcacctgagcccagtaggtcaaggctgcagtgagccatgatcatgccaccgcactccagcctaggcaacagagtgagaccttgtctcaaaaacaaacaaaccaacaaacaaaaaaacccaaacaataaatggttaagatggtaaattttatgttatatatattttactacaacatatttacattggaaaaggaaaacatcggctatcacgacatttcaatgagggaaaaaatagtcttttcaacaaataatgctgggaaaattggataaccacatgcaaaagaatgaagttggaccctttcctcacacttatacaaaaattacctcaaaatgagtcaaagacctaaatgtgaaagctaaactattaaactcttagaagaaacataggcataagtctttgtggccttggattaagcaatagtgtcttagctattatgccaaaagcacaaataacaaccacaaaaaaatacataaattggacatgatcaaaattacaacttttgcccttcagaggacagcatcaagaaggttaaaaaaaaaaaacctacagaatgggagaaaatattagcaaatcatatatctgataagggacttgtatccagcacatataaataacttttacaactccttaataaaaacacaaattacccaattaataaacgggcaaaggatctgactagatatttctccaaaggagatatattaatggttaataagcacatgactagattctcaacatcattagctcttagggaaaggcaaatcaaagccacagtgatatcacttcataccaccaggatgaatataataaaaaagacagaaataacaagtgttggtgagaatgtggagaaattggaacactcatttacattgctaatgggaataaaaaaatgatgcagccatttgtttggaaaacagtcttgacagttcctcaaaaagttaaacatagagttaccatatgatccagcaattcaagccctagttacatacccaagagaactaaaaacatgtccatacaaatattgtacacaaatcctcttagcagcattattcataattatcaaaaagtgtaaacaactaaaatttccaccaactgatgaataaatgtactatatccagaaaatggaatagtattcaacaataaaaaggaatgaaatgctaataaatgctgcagtatgactgaaacttgaaaatcttgaaagaagccagtcacaaaagaccacacaaattgtatgattccacgaaatcatacaatccatcaggataggcaagtccatcagcaggaggaagtaaatcagttgtttcctagaggtgggggtatgggggatactgattatgggaaatggggaatgactgctgataggtacagggtttccttctggagtgacgaaaatgctctaaaactgatcgtggcaatgactacacaattgtgaatatactaacaaccactgaattgtacactttaaatgagtgaattgtatggcacgcgaattatcttttaaaagctgttatacccagtaatgggattgctgggtcaaatgatatttctggttctaggtttctgaggaatcaccaactgttttccacaatggttgagctaatttacactcccaccaacagtgtaaaagcgttcctatttctccacagcctcgccagcatctgttgtttcttggctttttaataattgccattccgactggtgtgagatgatatctcattgtggtttgatttgcatttctctaacgatcggtgatgttgagatttttttcatgtttgttggccgcataaatgtcttattttgagaagtgtctgttcatgtcctttgctcactgtttaatggggttgttttttttttcttataaatttgtttaagcttcttgtagattctgaatattagccctttgtcagatggatagattgcaaaaattttctcccattctgtaggttgtctgtttactctgatgatactttttttttttttttttgctatgcagaagctctttaattagataccatttgtcaattttggcttttgttgcaattgcttttgaagttttcatcatgaaatctttgcccatgcctatatcctgaatggtactgcctagattttcttctagggtttttatagtttggggttttacatttaagtctttaatccatataaagttaatttttgcataaggtgtaaggaaggggtccagtttccatttcctgtgtatggctagccagttttcccagcaccatttattaaatagggaatcctttccccattgcttgttattgtcaggtttgttgaagatcagatggttgtagatgtgcagtcttatttctgagatctctattctgttccactggtccataaaggaatataaatcattctattataaatatacatgcacatgtatgttcattgcaacactattcacaatagcaaagacatagattcaacccaaatgcccatcagtgatagactggataaagaaaatatggtacaaatacaccgtggaatactgtacagccataaaaaggaacgagatcatgtcctttgcagggacatggatgaagctggaagccattaacctcagcaaagtaacacagggacagaaaaccaaacaccacacatgttctcacttataagtgggagttgaacaatgagaatacatggacacagggaggggaacattacacactggggcctgtccgggggcagggggaaggagaacatcaggaaggatagctaatggatgctgggctgaatacctaggtgatgggttggtaggtgcagcaaaccaccatggcacacatttacctatgtaacaatcttgcacggcctgcacatgtatccaggaacttaaaataaaataaaattaatattttttaaaagacaaaaaaattaaaaagctgttataaataaaaaattaacaatggaaattatcggaagcctcttcagcttggaggatcaattctgtagaccttcagatgggcccaggccatatcccagcataagcagtaggggctgacaatgggactgtccggaaggcccccgaggtggagagaacctgggagagattccagaccagttgctgaatgtgtgcaagttccctgcaccctttcccttcttcagtttcatgggtgaaaggttgttcagtttcacgggtgaatgaagtatggagatgcagataaactgagcacccagccctctttcccccagtaaaatagaactggtcacaccacaagtagtcattcatcttccttgctcaagctccatcccatgaatcccatctacctgtaagaatccgcaggagagcgccacgaggtagactgtgctttggaggatggcatcccaagggagttgaaggtgaggaaactagcagtgagccactggtcaacagtgtgcaaactgtgaagatctctgctggggtatttgaagcttacctcaaaaaggagtcccaaggctttgtgtaaaacattgtctactcatagtattactgcagattcctcctaagaacctactagttaaaattttgtgtgtgtgaggttgcaggaaaagagcacaatattagagcagaaaagataagagactcaaatagaaatggaaaatttttttaaatcttctttctcactttctattactcctttctttcttgggtttcatgtcttctttcttcctttgcctctctttcccttttctggcctgcaatcacctcgctctgtcatgtctggtcacaagatgtttcagtaagcagcttgtgagcatctcagaaaatgtgtgtctctctgtctctgtatgctgatacctaccgtggcacctcacatgaaatgggagctcaaaaataattactcttgtttgagttaaatgctacagcacagtgatcatcagttacagagctcgagaccaatttctgtgggttgatgccatttccttgggttttgaagcagaagtcctctgagggatgtaccttagaccctagcccttatgtttgactggttattttccaagctgttacctgttcatatgtgtattcctattctttccaaggctaatcctgtgaaaacagatcaaagcatttcattcttctaagtcagagactgggtcagactgtattttccaaagatagccacatttttgtggatccattcttaccatgtgaaaaacattgtctacacatagtattaccgcagattcctcctaagaacctactaaaattttgtgtgtgtaagtttggcatcaagaaatggggtctatgttccctccctttggacgtgactcctctaccaataaagtatggctatgtgatctctgaggttaggatatcaaaggtaatacagcttccatttggatctccttctcttgggacatatgaacttgtattcattagccaccatgtaagacatttggccctcaaagctactatgagggagagacaatatggagacagcacatagagagtgccaaggagccccagctgttccagcccccaactctttgtgtcttcccagcccagtcaccagacatatgagtgagtgagccttcagaggactccaacttcagccttcaagccaccctattcaatactaagtggaatagcaacaagctatccttgcccagactgaagatttgtgagcaaaataaatgtttttaagccaccacgttttggagtgaatattacagagccatatgactggaagagtgtcctcccctaggccgggagaaagtaagctcttctctgaagtataaatcttcagctcctccatcactccttaaaaagtctctaatctgtaagtcaccatcgtctgacagaacctcctgccacagaatgtgttactatggggcctgcccccaagtcactgtcaggcagcagctgctcttcggacagggctggaacagagagaagaaggttaatctagtgcctctgaaatacctcccaggtgtcatccacaggaggtgatatctccctccctatgttttagggatacaaacatatatggtaaaattatgagaaaaaagcaagagaatgatcaataagaaattcagtgtagggcagcagatgaggtcaggcccacaggtagtgaatgctaagttcgagggtgctcatttgactattacacttcctaacttacatatacattacctatgttcctttgtgtgtataaaatattgcatagcaaaaaaatgactaaaaataaatgttaggttaataaacatttctaacttaaaaaaaaaaaaaaacaagaaccacttggccccatccaatgagttgccctgccctgccctcactatatattttgtttcgtgctgacttctccattcttgccccaatcacgtggctctatccaacttccagtgctggtcccctcttgctgtggcctaactggtttcctgtacccatttcttcttcccatgacatgttctgctgtccagttagccttcttagccttctttttttttttttttttttctttttgagacagggtcttgctctgtcaatcaggctgaagtgcagtggtgccattattgctcattgcagcctcaacctcctgggctcaaggatcctcccacctcagcctcccatgtagctgggaccacaggtgtgcaccaccatacccagctaaatttttaaaaaattttatagagacagagttctcattttgttgcccaggctagactcgaactcctaggctcaagggatcctctcacctccatctcccaaagtgctgtgattataggcataagccaccacaaccccacccagttagctttcttaaacaccattctaatcctgcctttcacagctcagtctctttcagagcccctcatggccccagcattaaaatctagagcccaggctgggcacagtggctcatccctgtaatcccagcactttgggaggccgaagcgggcagataacttgaggccaggagtttgagaccagcctggccaacatggcagaaaccccatctctattaaaaatacaaaaaattagctgggcatggtggtgcgtgcctgtagtcccagctactcaggagtctgaggcaggagaattgcttgaacccaagagacagtgaacctgtatcatgccactatactccagcctggggaacagtgagactctttctcaaaaaaaaaaataataataataataataatctagagcctgacttccttagcctggcagtcaaagcccccacaatccagatgcttcctgttcatgacactccagccaagctatgccatttcccattcatgtctcctgatctcccacacaagtgtctttgttctgtgattccacttgtctctctcctacttctccatgtttccatcatatccatccttgaaaacccagttccagtatctccactttcatgagaccttttctgatctaccctagggtagatatatgcacagcattctcactgcttctcgccagcagggctctaagtgttatggacagggaacactcctcactttctgacctgcatacaggtagtccatgcccgttcctttccccggtgagattgcaggttcatttagggcaggggccgtaactgattcattttgtttgcccttaaaatttcttaacacatcaggcagggcatggtggctcatgcccgtaatcccagcattttgggaggccaaggggggtggatcacctgaggttgggagttcgagaccagcctgaccaacatggagaaaccccgtctctactaaaaatacgaaattagccgggcatggtggcacatgcctgtaatcccagctacttgggaggttgaggcaggagaatcccttgaacctgggaggcggaggttgcagtgagccgagatcacgccattgtactccagccagggcggtaagagcaaaactccatcaaaaaaaaaaatgtcttaacacatcaaacattctatatttttagaatgaatgaatgggtcactaaatgaatgaattttacgtcaaaataatgaatgaattctacatcaagagccaacctaggaacactataaagtgaagaaaatttgtctttagtgtctccagcctcctagccagttgccctcccctgctaggagtttacctcttcccatccagctacctaggaactgcatatctacttgcccaagcagaacctgcctttggaaaaatacctgataaattcatttacactcctacataaaccactgacaaggcttctgaggttactgttcttttactgagaagcacttattttgttaacagaagacaaggtggaagactatatcagtattggattgaatagcgtagtcccaaaatttgcttccccccaacctcagaaggtgaccttatttggaaagagggcctttgcagatgttagttaagatgggatcatactggactggggggaccctaagtccaatgactggtatctttataaaaagatcatgaaagacacagagacagagaaaagacagctgcacgaagagatggaaattggagtgacgcagctgaggaatactaaggattgcctgcaacaccagaagctagggacaggcaagaaaggattcttccctagagcctttagacactttgatttcagacttctggcctccagaactgtgagagaatgcatttctgttgttttaagccacccagtttgttgtactttgttacagcagcccaggaaactaatataatgtctaaaaatctgaaatactggcttctatggcacaactggacccttcagagaggtatattgggagaaggctcttggtgccccacaagagacccacaccacctgtcctacctatcccaaccagacggcttggcaggtgaggggaaggagcaaggctgagaggtgaacagaccctcagccatcaccatcgacaacttgtaaaaatgtggggaccaacaaacacccactaacctctttttgcactgggcttgttcagctgcctgctgagtgggctgagaacaaagtcagctgcagtcatgaatacatgagccaatgcagtggttattaacattttggtgtcattgatcctcaaagaacatggtgtgacctagggactttctccccaggagacacatgcagatactcactgaaatttgcatacagtttcaggggtttcacaaccccctgaagcctctccatagaggtaagaacctttgatcttctaatcgaacaatgatctgtccaaatttaaacttacagaagaggtacagttccaacattggtgagtagttttgtttctgtgtatgagcattgagtacagagtagaagctcaccaagtcaaatcccagcactttcctttcaatgagaaatgtacttaaacttctcagcctcggttgtcttgtctgaaaaatgagaaatagtgatactacttcccagagctactgtcaggattaaatcaaataatgtcagctatagactcctgaagcaccctggacttccccttctaaaccctgcatccccttctaatcattcaacttaagcagttgttcagtagccataacccagtaaattgtaagcttcaggaaagctttattcacaactgtattccctggggctcagactgtctcgttcagcatggtgcccggcgcatggcttctgctcagtaaatggtagctcttatgaatatccagctcaaactggtaatgacaaggaagcattgctagacaacgaaagggtatctgctaaaatgtctgccttcggaaacctattgtggactccatggaagaagaacaagtgctgtcttctttctttgttgctatcctcaaacaaagaagtgaaggattgttgcaagactcaaagtctgtcactcccacagagcaccaggaaatgagcctcttccctcagattcccccaccccagttctgatccacatagaggcttctgagactcaaccccatctgtgagtctaaatggacaagacagcagctgctgagtgggaggcagcaccatctccggagagaggccccagccctttcccaagaaggtgttacttttgatttccttcaagtgtgatcaaggtgggtgaagggtggctgctggaagtctaggcgaggtgtgggctggctgagtcagggctggccacgttccccttgggaaattcccatagggagggagcaggtggcagttgtcaactgggaaattaacctggcgtgactttaagatcaatgggtagattgtaatctgcccacagaaaaacctgggtctaattaagggacagcactctgggtggaagtgagatcctatgtttggaatgaagtccttcaccttggccttctctgtttccacctctctagttcacaggcatgttgttagaataaatcaaatgaaatgataaatacatacatttgaaaactgaaaaagtgctcatggagtagattaataaaatagtatataaaagaataaggcagattttcatactgttactaaaaaagtttaattaaaatgctattgaaaagtattaatgcaatttattattattaatttgcctccacttagcaccagggagcaatttccccattttaggggatggaggcctggccaaggaatcaggatctgtaggtgactcttatttgattagccatgtttgcttcagggcaccaaatcacaaaggaataaaaaataccagagctgcccaacaatgaaaagatttcttagagacattttaggcttcctctcaaatcctcgtgttttacatatattacaaattcttagcccaagtccaaaagatggactataaataaacttgcagacaagcattaaaaggtagaaggttcagggtgacatgggaccccatgaatgaaatctagagatagggacttgttcctcccggaccaagataaactcccagggaaaacttctacaacctggagacaaagcaggactatttcccaggagaggagaacaaacagctttttatcaataatgactaccattgtgttggatatcaactatgcactagataccttctctgcatcacttctaaccctcaaacaagtcccagtttataaatgagattgagagagctcacatgaagtgtaagatcacagaggctaaagaaaggtgggctccaggtttgaaccaaggcctacctgttctgtcagctcacccttctcagccgtgctgcggttattcaccatgagacccagaggaggtgacactgcctgccgtggcgaatgggtgtgatcacatgaggtccagccgggcatttttgcaggctgggctgtgcctcttccctaatctgggacagttatactgccagaagttcaaaattaggctagacaacccattttcttagcttccatccagtaaaataaaagttttaaaaccagacatgaaaaaatgtgggtttttttaactttttattatggaaattttcaaatacacaccaaagttaagagaatggtaaaagttatcccccctgtgccataacccaccttcaactaccatcagcattttaccattcttgtttcatctattcctcctattttctggaatattttaggtaatcccagacctcaaatcatttcacctataaacatttcagtattgaccctaatacataatgacttaaatttaacatgaccgcaagtccactatcactcttaagaaaagtaataattccttaatgtgtttgatttttccccagttgtctccaaaatgtcttcttatagttggtttgaatctggtccacatattacaaaatttggttgttttagtcctgtgcaatttcttttatgtaaaaaatattttgtaaatacgggaacatgattgctgggtggtctaagagatttctttcacaatgaatgtaggaagacagaaccacccaagcaaatcaaactacagtatccaagcagtgtacttcatgttagttgaaattatttcagcattaagaattgattcctattcttgcggtaggcacagagtggattttccttataatgaagactgtgtgcaccaacgagggaaacagaatgtgcatggaacggatgtgaagtgaacttggtgatcaccttaacagtccatgcagttgttctgaagtaaaagaactgtttcttaaaaaataaaaacagtatatgcagcaccaacaataatggcaatcagttgatatttgcaaatactttaaaaaattaacaatcagttttatactctccctcctttagaaaataaggcatacgtgttgacgtcatttttgtgttttgtaattaacacatgagaagatgatgcaaggataaacaatatttgtacactcccaggcctcagtttctttagcttcgaaatggtggtgtctggtgtcgaggtgttggtgatgatctttaaagggatcttccagttaatcatcagtagtgaattaccatggtgtgccacccagacaccccttcaagactgagacactcatttcccaggttgcctggagtcttggcagctgatggctcacagttaagtttctccccaagaatgactcttggcccaagcacatcccttttccagggcccacccacaaccattgactagttgatgtggaaggtgttaaggcccaggcctcatgcttcatttgagacaattctaaaaggccatccctctttaggatggtcagggcctctgctgcaactgtatcagagtccagtactcccctctgcgcactactgctttccttactccttacaggtaatgttcaaaagagcactccccaataaacttctcacacacaaatctgagtttcagtctgtttcctgggaactgacctacaatagcttctataattccatgatctgcttctgcaggtcatcagccgagaccctactacatttatctggtgcccaaaccccaacatttatggctcaagtgcaatgggctgacggccagaaagaagatggcttcctttggaatacaagagttctgagcccacaaagcagaagagaaccacacccaggccaaactgatatcccaaattcctcaggggtcagatcattttcataatcctgcacagctaaaactgccatcacagttgtgaacccagaaaaagaatgtcagcaaaactacccagaaatgataaaggcaacaatatttccatgtactaagtaacacagcagccagagtgagccttttaaaattaaagccaggtcatgtcacccccaaactcaaaaccctccagtggaaagtcgttcttctcatctcactcataatataatcccaaatttctaccttggactccaaaacctaacatgctgctgcttatctctctgacctcatattctaccactctttcccttattcagtctgctacaaccaacactggtcttctcgctgtttccagaacattccaagaccactcctgcctcagtgtttttgcccttgaggtttcttctgcctggatttctcttcccccagtagccacatggtttcacctgcatttccttcaggtctattatcaaatgccatcttatcaaggatgccttcctgccttttccatagatgggtcttcaaaataaggtgcttgctcctcggttcacaaaatctttccaaggagtacctgggcacttaggtagtttaagggaaataattttcatgagcctcaagctctgcctgcattcattcctaaatttgagtatcactacggtcaagccatttctcacccctgctttcataagagatccttttcccaccttacaaaagaaatatttacttgaccctcatttcaaatcttataatgatgcattgtctatgcaaaacctccagggtgactggcaaaggtttatttgaatgttgaggttgtttttgagaaagtgcaatgactctgatgactaataaaatatctttttgcaattcaagtagtttctaactcattactttcaacaaaatgaaaggagtctctaatagagttattcatgatagatacctaaaaataattttgatgaaagatcaccaagtgatttctggcgtttaactcagaaggaattcagagacttgagtaacactgctctaacagaaactttccatgcttatcttcttagggatgcagacaagatttctttaggacttccatctacaaaaaccaagatagtaatataattggtgttgagccttgtatcattcaagcagtaagtcatactcagccatgggtatatgaactaattatgatttaaaagggagacctagactatttcataacaagatgcatttcccatgaaattgtgctttttatgttacaagaaattattaaggtttctaagcataaaaataagatatattaagataaaaatctgggggaggagtaaaatggaaatacaagttcggagagaaaatgggatgatgttaggtgttctcaccactaaaaatggtaagtatgtgagataatgcatattttaattagctcaactgagccattccacaatgtatacgtttcaaatcatgttgtacacgataaccagatataattttatttatcaatttaaagtaaaataaaagaaaactgatgtaatatttccaataaagacgaccttttttatgagctttttaaataaatagataaatagatgatggtagatattaaattaatatgacatttagattccattagatactttttttttttttttttgagaaggagtctcgctttgtcactaggctggagtgcagtggtgcgatctcagctcactgcaacctccacctcatgggttcaagggattctcttgcctcagcctcctgagtagctgggactacaggcacatgccaccacgcctagctaatttttgtatttttagtagacacggggtttcaccattggccaggatggtctagatctcctgaccttgtgacctgcccgccctggcctccaaaagtgctgggattacagacgtgagccaccgcgcctggcccattagatacattttaagaaaatatataatcatttaatttttcagcaaaagcaatacattttacaatatatagaaagttaattctttacaactactaatgataaaatttagaagtccatttaaaaatggtaagaattgtcactattaatgccatggaaattaaaaggacaataaaggaatgttatgaaaaattttatgcccacaaacttgataacttagatgaaatgtaccaattccttaaagacacaaactatcatatttcacaaaggagaaacagataatctgaatacatttatatctataagataaattgaataaataattaataaccttctacaacgaaagcactaggcccagatggtgaattctaccaaacatgtcaggaagaaatgatattaattctccacaatctcttccagaaaaactgaagcagagagaacacttcctaactcattctaaaaagtcaacattaccttaaggaggaataagttctagtattctctaacactgtaggatgactatagttaacaataatatatagtttaaaatagctagaaggaggatattgaaggttcccaatacaaggaaatgatctttgagataatggaatgctaattaccctgatctgatcattatatattatatgtattgcaacttcaatatgtagcccataaatatgtataattattattgtcaataaaaaaatttaatgaaaaaaatatattaccagaaaggaatacagattaccagatacagaccagtatctctcatgaacacagatgcaaaaatcctcaataaaacattagtaaattgaattcgacaatgtataaaaaggattataaaccatggccaagtgggacttcttcctccagatatgcaaggctggttcaacattcaaaactcaatcaatgtaatttaccatattaacagactaaagaagaaaaatcataagattttattaattgatggataaaagtcatttgacaaaacccaacactcacttatgatttttaaaactctcagcaaactgggaacagagagaaactacctcaacttgataaataaaaaaaaaccctcaaaaatcctgcagctattatatttaatgatgaaaaactagacactttcctctaagtaccttgggaacaaggtaagggtgtcctttctcattactcataatcagcattgtactagaagacttagctagtgcaataagacaggcaaaggaaagaaaaggtatgtagaatatgaaggaggaaataaaactgtctttgttcacagatgacataattgtctatacagaaaatcccaaagaatcactaaaaatctcttaggactaacaagctaatatagcaagtttgcagacttactatagaacagtccattgtttttctataccagcaattaaaaaatcataatttgaagttgaaaaaaacaatataatttacaatagcactaaaaaaaagaaaatttatgtataactctgacaaaatatgtacatagtctatatgcagaaaactataaaactgtgatgaaagaaatcaaagagaaaaataaatggagagattccatgttcacagattggaagactcaatattgttaagatgtcaattcttccaaacatgatctatagatttaatgcaatcccaatcaaaaattcccagtaagctactttgtagatgttgacataatgattccaaagtttatatggaaaggcaaagacctggctgggcaaagtgggtggcttatgcctgtaatcccaccactttaggaagccaaggcaggtgaatcacttgagctcaggagctcaagaccagcatgggcaacatggtgaaaccccttctctaccaaaaatacaaaaaattagccaggcgtgatggcatgcacctgtggtcccagctacacgaggggctgaagtaggaggattgcttaagcccgggaggcagaggttgcagtgagccgagatcatgccactgcactccagcctgggtgacagagtgagactttgtctcaaagtaaaataaaatacatttaaaaaaggcaaaaacctagaaggaagactaattgggaaaactcacacaacctgatttcaacattactttaaagctacagtaatgaagacagcatggtattggcaaaagagcagaaacatagatcaatagaacagaatagagagcccagaaatagattaacacaaacataaccaactgatctttgacaaaggagcaaaggcagttcagtagagaaaggatagtctttttgccaaatggtgctggaaaaaaatgaacatccatatgcaaaaacatggacctagatctaatacctttcatgaaaattaactcaaaatcaattagagacctgtatctaaaatgaaactaaaaaaaatctagaaggaaacatagaaatagtctaggtgatcttgattttggcaatgagtttttagatacaacactaaaagcatgatccatggggaaaaaataataaattagacatttttaaagttaaaaacttctgttctaggccggcacagtggctcaagcctgtaatcccagcactttgggaggccgaggcgggcagatcacgaggtcaggtgttcgagaccatcctggcgaacgtggtgaaaccccgtctctactaaaaatacaaaaattagttgggcatggtggcgtgtgcctgtaatcccagctacttgggaggctgaggcaggagaatcgcttgaacctgggatgtggaggttgcagtgaaccgagatcacaccactgcagtctagcctggccaacagactgagactctgtctgaaaaacaaaaacaaaaacaaaaaacttctgttcttcaaaagacactgttaagacaagtgaaagccatgccacagactaggaaaaaatatttgtaaaacacatatctgataacagtcttacatgcaaacatacaaagaactctaaaaactgaacaataagaaaataaacagcccaatttttaaaatggcaaaaaatctgaacagactccccactaaagtaaatatatacatgaaaaataagcaagtgaaaacattataaacatcatttgtcataagggcattggaaattaaaacgagatactactacatacttattagaatagctaaaattagaaaaaaaactgaactaattgttgatgagcatgtgagcaataggcactctcattcattgctgctaggaatgcaaaatggaacagacactttcaaagatagttgggcaagttcttaaaaatccaaacatagtctcacccaacaatccagcaactgcacttctagacagttaccaaactgatttggaaacttatattcacacaatggcccacacctgtagtcccagcaatttgggaggcagaggtgggtggatcgtctgagcccaggagttcaaggccagcctggctaacatggtgaaaccccatctctactaaaaacacaaaaattagccaggcgtggtggcacatgcctgtagtctcagctactcgggaggctgaggaatgagaatcacttgaacccaggaggtggaggttgtagtgagctgagatcacaccactgcactccagcctgggtgacagtgagacgctgtctcaaaaaaaataaagacaacttatatccacacaaaaatgtgcatgtgaatgtttatagcagctttattcataatcaccataaacgggaagcatccagtatgtctttgaatagtgagtgcataaacaaacttttgcatatccatgcaatggaatattattcagcgctgaaaagaaatgagatatcaagctacaaaaagacatggacaaatcttaagtgcatattgtcaagtgaaagaagctagtttggaaaaggcaaatctataaatgcaataaaaagattagtggttggctgagcgtggtggctcatgcctgcaatcccagcactttgggaagcagaggtggatggatcacctgaggtcaggagttcgagaccagctggccaacatggtgaaaccccatctctactaatattagaaaaattagccaggcatggtggcacacccctgtaatcccagctacttgagccgctgaggcaggagaatcgcttgaactcaggaagtggaggttgcagtgagccaagattgcaccattgccccccagcctgggcagcaagagcaaaactccgtccgtctccaaaaaaaaaaagaaaaagaaaaaaaaagatcagtggtttccagaggtttagtgtaggaaaggagggattaataggtgttgcacaggagattttttttaagagtggtgaaactactctgtatgacactgtaattgtggatacatgacctcatttatcaagacccactgaacttaacagcacaaagaataagccttaaggtatgaaatttttaaaatatcatttaggagcctggggaattcttggatggaatgcagtaagtgacaaaagaatctaactgtattaaaaatgcatcaaatgacctcactgaagtagatgtgggaaaaagttgttgtcctaaaaaactttggaaatgagtggaatctgtaagactaacagcaaagaaactacacataagcactgtattctggctgataaagttgcttcccacatgcatgctggttaacaattctgatagtgctatgcatgtatactggaaatgaataagcaaatggatggctggtgtagtgggagattacagacaagcaacaggaggatgctggaatgatctgtgtgtgtggtaatggctagagttggagaggtgtgtatgaatccatgtttagcttaaaatgaacacgtggttacataaagaattatttaatagatgttcttatatacactggttagtgtacacatgtatttccttgctttgtcagctgagaaaagtaataacacaccagaatcagtaagcacacctattgcctaggtattggtttctaataccattctccaataaatagaaccagtgtttcttagaaaaatggctgattgtagaactggagcaggaaatagatgagatgaacctggacattttatagtgccattgagtaaggaagcgcttttaaaaaaatgactggggtatgtcaaagggacatagaagccaagtgaaagagctcccaacagccaaagctgaaataatttgagcaacaaaataaataaaatagtactgattataatccaaagtataaaagaaatatctatcagtccattctaatatagataaatgactaaatgaataaatggagagaagagagaaatctcctatgcagaataatttaataataacttatgtagatattccacccttaaagacatggagcatcactctccactccttatgtgtggactgtacagagtgacctccttctaaagaacacagtatagaaaacagggggggtaggaagagtagctttactgtggaaaagcctgacaaacactatctcagttaggtcaccaaggtcaaaatcaacagtgataattcctgttgctagtacatacccttgatatgatgtgatgagaatggcacttctgtggttttcctctccaaacccataatcccataatcccagtctaaacatgagaaaaacatcagacaactcccaagtgaataacattttacaaccttactcgtactcttcaaagctgtcaacgtcttaaaaacaaagaaagtctgagaaactgtcgcggtcaagaggaggctaagggaacatggcaactaaaggtcgtatgaggccgggcacagtggctcatggctgtaatctcagcactttgggaggccgaggcgggcggatcacctgaggtcgggagtttgagaccagccggaccaacatggagaaaccctgtctctactaaaaatacaaaattagccgggtgtggtggcatatgcctgtaatcccagctactcgggaggctgaggcaggagaattgcttgaaccggggagacagaggttgcggtgagccaagatcaagccattgcactccagcctgggcaacaagagcgaaactccatctcaaaaaaaataaataaataaaaacaaatataggtcatatgatatgctgaatgggatcctggaacagaaaatgtactttaggtaaaaactaacaaaatctgaataaagtttggacttcagctaatgatactaatagtataccaatattagttcactaattataacaaatgtgctacgcgaatgtaaggtgttaataacagggaaaacagggtgtggggtatatggaagctctctgtactgtcttctcaactttgcactagaggttctaaccagtgtaatgaggcaaagagatagagaaggagggaggaggagagaagggcagccgagaagggtacagaaggaaagaaattaaaggcatgtacgctggggaggaagaggtaaaactgttttttatagtcaatacagcctgtatagaattctaaggaatacacacacacacacacacacacacacacacccctactagatttaataaacaagttcaccaaggtcacagaatatgatcaatatacaaaagtcagttgtatttctacatactaggaaccatctgaaaataaaactaaaaaaactgttatattcacactagcatgaaaaatgaataaaataggaataaatttagcaagaaagttcaagatgtgtacactaaaactatgaaatattgctgagagaaatcaaagaaggtctaaataaatggagaggcattacatgctaatggataggaagactcaatattgttaagatggcaacactacctagtcatctcagattcaatgcaaaccctagcagaaatcccagcagacacttttgcagaaattgtcaagctgattttaaaacttatatggaaatgcaaaggatctggagtacccaaaacaacactgaaaaataacaaagttgaagacttacatctcccattttcaaaacttattatgaaactgtagtaaccaagacaggttggtgtaaaaataggactaaacatgaatgaaggtaaattaagagtcaagaaatcctatgctcatgttcaattaattttcaacaaaaacaccaaggcaattccattggaaaaagatggccttttcaacaaatggtgctgggtgcttttgggggcaatggaaatgttcaaaatctaattctggtgatggttgtaccactctattaagtttattaatagttatttaacttaaacttaaaatgggggaatttatgatgtataaattatgccacaataaagctgttaaacaaaaaaggcacttcctaaaagttgaaagtgaaccaaagcaaacactgaaacatttatctttaatgatctaaaactcagcgttgttgctgggcatggtggcacgtgcctgtagtctcagctacttcaggctgaggcaggaagatcccttaagcccaggagtttaagtccagcctgggcaacagtgagaccccccatgtctaaatttaaaaaacaaacacaaaaaactttctgtacactccctagtagaagatcctgggaaacaacaacaacaacaacaaaaacctttaaaaagcttaaactgttttcagtaagcatattgtttgtagtagtactggtatagtttttctaagacttctgtgtgtgctgatcaagtaaataagtgatcatattggtgtggttgaaaatgagaacactcaaagtggaggactaggatacaaatgtaagatcaactgggctaaataaaaacttatggtcctgaattggaatcgaaagtaacagtataaacaactgatgtattttatcttaaacattttttcaactttgtctactaaaagtcctagtgaaaaatgacctacccagtatttatgagccccctagcacccaaactgtggtctctaatacgattttccactgaaaagaaccaatgcttcttgaagaagtgatcgattctagatctgtgatacaaaatgtaccagataagtcatgaaatgtttgtctaaccacaaagaaaagaaactaccaaaaactactagcgtcatgtccaaaagaactgaggtgccaccaacttgactagattcccactggtcaaagatggaacaactaagtaagcatcaaaaagaataataaccgcaatcgactgaaacactttcagtatgcttaagtctccggctttataatgacactaaaaaacaaaacaaaacccactggttgccttggaacgatgctgggaaatcaactcattattttgaaaaatggtagaattaaacattcatcttgccttacatattcaaattaaatgttagaataactgaatggtttaaaaggagaagtttatctttagagaaatgatccaggtaataaagcaagaaggaaaggtgaaattagaaaatcaccattttgggctgggcgtggtggctcacgcctgtaatcttagcactttgggaggccgaggccggtggatcacgaggtcaggaattcaaaaccagcctggccaacatggcaaaaccccgtctctactaaacacaaaaaacaaaaactaggcaggcgtggtggctacttgggaggctgaggcaggagaatcacttgaagccaggaagtggagattgcagtgagctgagatcgtaccactgcactgcagcctgggcaacagggcgagactccatctcaaaaaaaaaaaaaaaaaaaaagaaagaaaaagaaaagaagatcaccattttacaattttacaaccctaatgaaataatgaatttgtgcaataattatcaaagactgctaacatccagaagagagaaataatcacacaacatggcatcctatctgaagtacacaacaccctctatgatgtatgtgctaaaaaaaaatttaacctcaatctgatcgggcctccaaacccaatttacaggaaataaggggcagagggacatgttaaatagcactacaatgatgcagttgacaaaatctagacttttggaaattctaaagacaaagacacatttctacactgaaaaaaaagcgtggaaaaatgagagggcaaaccaatagattaaaagagactgaaaagacaaccaatcacagcccacgagccctaataaaattctgatgcaaacaaaccatttaaaatacataaatgctctaaacctggattgtggcgatgtttgcacaactgtttaaatttactaacaataggccggcgtggtggctcacgcctgtaatcccaacactttgggaggccgaggcaggtggatcacaaggtcaagagatggagaccatcctggccagcatggtgaaatcccatctctactaaaaatagaaaaattagctgggcatggtggcgcacacttgtagtcccagctactggggaggctgaggcaggagaatggcttgaacccgggaggcagaggttacagttagccgagattgcaccactgcactccagcctggagacagagcaagattatgtctcaaagaaaaaaaaattactaacaatcaaacggtatatttacaatgggtgaagtttacagcttgtaaattatacctcaataaaactgtgtcaggctatcagggaaatatgaagactaatgaacaataaggaattattgttgatttttaaggcattatcatattgtggttttttttaaaatacttcttatcttttaaagacaaatactgaagtatttacaaatatttgcagataattcaaagcatttgtttccaaacattctggtgtggaggcgatggggacaaaaggtaatgagcacacaggcattattacactattctacatttgtgcacattcgaaatgttccctaataaaaagtggagcggctgggcgcggtggctcacagctgtaattccagcactttgggaggccaaggcatgcagaacatctgaggtcaggagttcaagaccagcctggccaacacggtgaaaccctgtctctaataaaaatacaaaaattagccaggcgtggtggcacggcctgtggtcccagctactcgggaggctgaggcagaagaattgcttcgccgcactgcagcctgggtgacagagcaaaactccttctcaaaaataaaaaaataaataaataatagtagagcattaaaagacaatttgaaaacaagaaaagagaaacagtaaggaagagagaaaggcttttaattaattactttgctctctcttaattatttagctctcagctttctacctttgctattaacacaattgatgtgtggaaatagatggcatataaataataataaataaatttttataataatataaaaaccaaataaccataacttacgtcccgcgtcttcaaacccatacagagcgtggaactgctgcctcccatccctgggatgttgcaaaggaaatggaaaccaaccaccaacacaaggatatgacccacacatgggagaggacgtgctgagcagggatctggaggtgttttagtcatggtttgtgaccactgtggtgctgcacacagcctgtgccttggcatcccaccaccatttataacagtcaacccagtgaaatcagatccattaaacagcttatttttaaagaaaatactttacattgctgcacacggctgggcgaggtggctcacacctgtaatcccaacactttgggaggccgaggcaggtggatcacttgaggccaggagttcgagaccaacctggccaacatggtgaaactccgtctctactaaaaatacaaaaaattagccaggtgtggtggcgtgtgcctgtagtctcagctgctcaagaggctgaggcagaagaattgcttgaacccaggaggtcaaggttgcagcgagccgagatcgcgccactgcacttcagcctgggcaacagaacgagactccgtctcaaaaataaataaataaataaatggttgcatgaacatcaaagcttacatattcacgagtaatgttatttaagtttacactaaaaatgggtgaatttatgatatgtaaattatacttcaatgaagctgttaaacaaaaaaggcacttcctaaaaattgaaagtgacacctgtcaggtgagtaacaggttttttcatatctgagtgtggatatcagtcgcttgctctggacacagagccaaagaaaatgctgaacacattctctggatttatctgagtgacgcaacatagcatggtggtaaagaacgtggccttcggggttggacagatgggctgtgttcagcaagcttaagtaaatgcttaacctttccaatcccagactcctcttcaggaaaacaggaataaaaacaccttccttgcaggacagatgcagggattaaatgaggtaatgcagtaaagtttggcatctaagatttcaacccaaaccagtggctatgatggcttctaacaccaaggcttgcacaaggagactgaacaaaagggggacttgcagcgtgtttcactggccaaaaaaaattaaaaataggccgggcacggtgcctcatgcctgtaatcccagcactttgggaggccaaggtgggcagatcacgaagtcaggagttcaagaccagcttgaccaaaatggtgaaatcccatctctactaaaaatacaaaaattagcaggcgtggtggcacatgcctgtaatcccagctactcaggaggctgaggcaggagaatcgcttgaacccgggaggcggaggttgcagtgagccgagatggtgccactgcactccagcctgggtgacagagcgagacttcgtctcaaaaaatattaaaaataaaaataaaaaaatagagcacttgagctgccagatgacctggcagggcacacatctgacgaaaagaattttccagtgatgattctgaaatgatgaagaagtttaaaagagcttcaaagggctgcggccgtgtctcgagcccacacagaccggtcagccctgtcacctccagaaccggcctggcaccatggaaagggcacggaaagggctgccaaagccgtcctcgcgcccacgcacgaaaccaccacctccgcagccgggcccagcagctccactccatctccccttttcaaaatgaagaccctaagatctccttcgaggagatgagcagaaagcccagccgcagagctgcggacgctaacgccagcgccaagcgggtgccgacactccctgtgctgttccggccccacaccatctggaaaacaaggtcgtcttaccctgtttagtccatgaggaaagaaaggctcagctcagggaggacatttgcccaaggttacataactggtgggtgcgcgggccaggcctgacatcgggtccacccagatgccaaccttccttactgctcctctccagcgcctcagccagctcccagcctgggacccagaaaggcccagagcccgcgctcatgccagcacacgatatcttcggtactaatccccggatttcattaatctctatcacaggtccaaagaggaggggtcgctgaggctgggctaatctccctcccgagtttgacttccaactttccatgaaggccttagccctattgcatcccatgggaccaagtaaaaaccttaggctcccagaagatcaaggggatgtttatctggcatctagggatcaacttctggaagaaaaaaatacagcaatatatctaaatccatttcttcaggaaattaatgaatggaagggctgctcttagcagagtctccagaactgaatatgcagagggcttaagggttccttttctaagtaagagctgtctcactgcttcctttttttattttttttttttttttattttttatttttgtgagacagggtcttgctttgccacccaggccggagtgcagtggcacaatcatggctcactgtatcctggacctcctgggctcacacaatcctccttcctcagctcccaagtagctaagactacaggcacgtgcccccacacctggctctttttttttttctttctttctttcttttttttttttttttttttttttttttttttttttgtagagagggggtttcgctatgtttcccaggctggtctctaattcctgacctcaagtgatccgcccaccttggcctcccaaagcgctggggttacaggcgtgaggttacaggccaagcccttaaattattcaaagctaaagttctactcccaagaccccaaggttaaccgaagtccagaagtcctccggtacctgaaatacctcacagctgctaggctttatggctgttgtcagactgttcaaacacaaacagagccaaatatcctgccagccagcacggacctgctcccaagaatcatgtgttatggtttccatcacacccagccatcaagtcctgtttgagcttgtcatccctgcaagccatgtgactgctggcacctacctgggtcacatttgcctcttcccttgggacacagctttttgcaaaaaggccatagccacttgctaggatgagtcagaagttcctcaaatctcctgacacaactcaggggcaaagagaaagggacagcaaacaggcccagcaggggctgtctagccatgacataagaagccagcacatatctttagaggagcgttcagctccgaatcccaacctgcttcacaaacacctggggcaaactccagagatggcatttccactggcaatgacaggaatcgggccaaacaccacacatccccctggacactcttgacgttcaatacattcacagaagcttccttgaccactcctgggccctgtgaccctatcaggccaaggagctggttcacagaaagtgaaagattctgacaagcagagtattttccctctgagcaggtgtggttcctcactgaaacaggaatcctctttattccacaagcgagacacagaacaaacagtgccccaggccggagaactgaggccagacctgcttcccaggtgaccccggtgtccacaaaataaatgcccctgtaggatggggatcatccgcctgcctctttgcacacactagtctcctggccattctcctgcgaaggcctcaacctcccaaagccctttaaaagataacattttttccatccccttttaattatcttgagccaatggggacaggttcagactctgtccctgattactttgatgggtaaatcccctgctgctcggctgaggagggctctcagtaacctcagtccagccatccagctccccacagccccgccgccaggaagagcctggctccacaaccccgtgccaggcccttgacttccagccaagcgtacccactcactcttttcctgtgctttcctgatttttaaaagagctggcacgggggctcatgcttgtaatcctggcactttgggaggccaagaccagaggatctcttgagcccaggagttcgagaccagcctggccaacatagagagactcccatctctgcaaaacaattaaaatagaaagattattgggtgggtgcagcataccaatatggcacatgtatacatatgtaacaaacccacacattgtgcacatgtaccctagaacttaaagtataataataataataataatatatatataaaagattattggggccagacgtggtgattcatgcctgtaatcccagcactttgggaagctgaggcaggcagatcatctgaggtcaggagttcgagacaagcctggccaacatggtgaaaccccatttctactaaaaatacaaaaatcatccaagtgtggtggtgggctcctgtagtcccagctacttgggaggctgaggcaggagaattgcttgaacccaggaggcagagattgcagcgagttgagatcacgccactgcattccagcctgggcaacagagcgagactccctctcaaaaaaaaaaaaaagattattgggtgtggtggtgcgtacctgtaatgccagacacttgggaggctggggcaggagaatccattgagtgcaggagtttgagtctgcagtgagccatgacagtgacactgaactccagctggggcaacagagtgagactctgtcttggggaaaaaaaaagtaggaaagagagtttttacatacccttcatccagcttctcctactgttaatgacttacatactgatagtacaataatcaaaaccaagaaattaactctggtatgatactgttacctatacttggatttcaccagattctccactaatgtcttctttttctgtttcaagatccaatccaggatcctttgctgcatttatcctcatgtgctctgcaagctgagacagttcctctgtgttttcttgtccttcaggaccttgacaatttgtaagagtcctagtcagatattttgtaggatatcccttaacttgggtttgtctgatgtgttttctcaccattaaacaggttatacatttctggcaagattcccacagaggtgacgtgcccttttcagtgcatcatataagaaagtatatgaggaaactgaggcccaagagcttaaataatttcctcaaaggcaaatggctaataatggacagagctggtactcaagtttgcacaactaaaaaggcgttggtctttttacctttccctaacttccagaatgtagaaaccatactttaagcaatatacaggttatgtaatacatgaaacacagtgtgctatattattgcaggtacaatatggatatacaggccaggcgcggtggctcacgcctgtaatcccaacactttgggaggccaagtagggtggatcatttgaggccaggagttcaagaccagcctgtccaacatggtgaaaccctgtctctactaaaaatacaaaaattagccaggcgtggtggcatgtgcctgtaatcccagctactagggaggctgaggcacgagaatcacttgagcctgggaggtggaggttgcagtgagctgagatggcaccactgcactccagcctgggcaacagagtgagaccctgtctcaaaaaaaaagtacatgatgtcgatttatcttaccactggtgatgataatcttgatcatttggcaaaagtggtatcttccaggtttttccactgtaatctcattcttttccccctttataattagaaaatatttgaggggagatgctttgtagatttggagatgctttgattatgtagatatcctatttctcccttttgccctctaacttaccattcatcagtagatctttctaaggcaattattactgtgatattttaagggtgatcttccatttccctcttatgcaatagaagaaaagtaacgggtaactattgtgtataaacagggtgtccacgtgatttgtcattcaaaccaggacacttttgaaagtgaaagagggtactgttaataactacagtatggcaacaagcgtaagtttgtcctgggaaaactgggatgcacagtcactctatgtgtaaaattgactctccagctcaaaacaacagagacgggtcaacatttactgaaagtatctgtatcttcgagaaaatcaacagcaatctttggtggggttttgaggggaaacagatcatcttatagctgagttaaatgtgcaaaggaatagaaactgctggcttgtggaagataattgtgaaagagaatcaagggctaggaagcagaagccataagcagcctaatatacaagaaataatccccctcgtccaatcaagagagaatgcaaacctgcctatgaaccagctgaaaagtatctgttcctgcgaaagggactagtatgtcgcataaactcattagtctttcaaaccctaaacactttcttctctcatatcaaggccaattttgagtattctgtttaataatttccttcacacatctagtcacttagatcatttccttttagaagacactaagccacgaagaaggtaaaatggggaatctcaccagggagggcgtgttccctctgatggtgttctcctatatttatttggaaaaggtttcagaccccagcatctgcccaagctgtctccagttggtctatagtgggaaacacctctttggcacaaagtcatgacccagtattattttttcccattctactgaggaggaaacggagcctttgtgaggggcaaaggatctgtttaaattcctgacttgacacagtaagcggccagagtagggatgactcatgctgtagctatgggcctcctctttcaactttaatgggaatagtcaacatcctattatttgaatgtttatcctgggttcatattatttcacacagcgaaaggcatttaatggtagaaatattttcaaacctaaaaagttaaaggagaggaaaatcttccacatatccatactggagacaatggcgtggaagaaacccgtacggaagatcagagattgtttgataaatctgtcaccttatgtggaaagccatagtgtctatgaataataatttccagctcagaggatctgatgagtgcttcagttagaccctgcccccagagtgctcagaacataatgattatttttcttgttgttgtaaatattaataagcaacaactgtagcctaacactgtgcggaaaacttaaaaactagtgatacaaagcagataaataactctagaaattattccgggcattcctggagctattcaagatagaggatagggcatccaaatagtcatttcaaggaattataaccacaagagttttcagctaatgaatttagaagaaatggtagaactgggccaggcatggtggctcatgcctgtaatcccagcactttgactgaggcaggcggatcacctgaggtcaggagttcaagaccagcctggccaacatggcggacacccatctctattcaaaatacaaaaattagctgggtgtgctggcatgtgcctgtagtcccagctacttgggaggctgaggcacgagaatcacttgaagctggaacccaggaggcagaggttgcagtgagctgagatcacgccagtgctctccagcctgggagacagaccaagactctgtctcaaacaaaaaaaaaggaagaagaaatggtagaattagaatatcaccattttgtaatcttcatgaaataatgacaataacaatggtcatcaatggctgctaatatcatacaaaaggcaagtggacatcatgtgcttcccaccctgtctagtcgcagaatactataaagtattcttgacaaagactggacctaggctaggcgcagtggctcacgcctgtaatcccagcacttgggaggccaaggtgggtggatcacctgaagtcaggagttcgagaccagcctgaccaacatggcgaaaccctgtctctactaaaaatacatcaattagctgggtgtagtggcaggtgcctgtaatcccagctactcaggaggctgaggcaggagaatcgcttgaacctgggaggcggaggttgcagtgagctgagagcttaccattgcactccagcctgggtgacaagagcaagactccatctccaaaaaagaaagaaaaaaaaaaagaaaaaaaagactggacctaaatatgaccaagcctctagatctagttttcaggttacacaggggcagagaaatatactaatggcaccatgaggataaaatcagcaaagtccaaactatgagacacgctacaaatgacacagtttcttaaaaacagtaccaaaaaaaaaaatgggggtgacctgtacactaagaaaaactcttagaatacatatcaaaaaaagcaatgtattgccaggcataatggctcacgcctgtaatcccagcactttgggaggccgaggcaggcagatcacgaggtcaggagttcaagaccagcctggccaacatggtgaaaccctgtctctactaaaaatacaaaaaaattagccaggcgtgcacctgtaatcccagctactcgggaggctaaggcaggagaattgcttgaacctggaaggcggaggttgcagtgagccgagattgtaccactgcactccagcctggatgacagaataagactctgtctcagaaaaaaaaaaaaaagcaatgtattataatatggatgttatctggattctaatttgtattaacaaatcataagaaaaacctaaaaagtaagtgagaaaatgtgaacattgtgctaactgggtatttgataatattaagaaattttattctttatgtattatgctgcgttttgtggttatgcttttcttgttgttgctttttttagtttctgtgcacatatataaacacaatgtcattagaagaaaacataagagaatacaggggaaagtaaagatttcttgatgaagacacagaaagcacaaatcacaaaagaaaaaaagtaataaattgaacttcatcaaaatttaaaattgttcatcaaaaggcactcaagaaaataggtaacattaggagaaaatatgtgcaacacctgtgtctgaatatatattatatctaatctatatcatgtacaaagatattacatacttatatacacatacattcctatagcttatatgcagaatatatacagacctcctacaactcaataaaaaaacaaaaaataataaaataataaaaagacaatgcaatttaaacatggataaaatacttgaatagacacttcacaagacatacaaatggtcaataagcacatgaaaaagcattcaccatcataatcatcagggaaatgcaagttaaaatcataataagataccactacaaacactaaaatagctaaaattaacaagatgaaaaataccagattttggagaggacatggaacaaccagaactctcatgcattgctggtgggagtgtaaactggtacagccactttggaaaaccatttggcattttcttaaaaaattgaatatacctatgatcctgcaatcacattcctaagtatcccactcaagagaaatgaaaatataatgcccacaaaaaaaatgtgtacaaaagtgtgtatagcacctttatccataatagtcaaaaattggaaatagcccagatgtctatcaacagaagaatggataaaccaactggtatatctacacattgcaatactacttaaaaataaaaaggacctagctgggcgtggtggctcacgcctgtaatcccagcactttgggaggctgaggtgagtggatcacttgaggtcaggagtttgagaccagcctggccaacatagtctatactaaaaataagaaaatttttagtatagactaaaaataagaaaaattttagtctatactaaaaataagaaaattagctgggtgtggtggtgcatgcctgtaatcccagctacttgggaggctgaggcaggagaatcccttgaacccggggggcggagcttgcagtgagctgagttcgcacccttgtacccaagctgggcaacagaatgagacttcatctcaaaacaataataataaaaataaataaaaaggaccaaattattgatacaagcaacaacatgaacgaatttcaaaaataatacgcaagtaaaagaagccaggagcaaaaaaatgtacatagtaaatgatatgattccatttatttcaaattctagaataataaccaaggattattgaggatgaggatacagtcacgtactgcataacgttttggtcagagatggaccacacatgacagtgatcttacaagataatagagctgaacattgtctatcacctggtaacatggtagctgttgtactgccctagagcaatgcatacttgtgtgtttgtggtgatgcttgtatgaaccaacctaccgcactgccagtcatacaaaagtacagcacatacaattatgtacaatacataatccttgataatgataataaatgaccatgttactgttttttatggtttagagtgtactccttctacatatatatatattttaaatgttaactgtaagacagcctcaggcaggtcctgcaggaggtatccagaagaaggccttgttatcataataggagatgacagctctatgcatgtaattgcccctgcagaccttccagtgggacaagatgtggagacgaaagacagtgatattgatgatcctgaccctgtgaaggcctaggctaatgtgtgtgtttgtgtcttcgtttttaacaaaaacatttaaaaagtaaaaatataggccaggtacagtggctcacacttgtaatcccaacaccttaggaggccaagacaggaggattgcttgaggccaggagttcaagaccaacttgggtaatgtagtgagaacttgtctccacccaaaaaaaaagtaaaaaaattaaacaatttaagaatagaaaaaaccttatagaataaggatacaaagaaagtattttagacagctatacaatgtatgcattaagtgttgttaaaagagtcaaaaagccaaaaaaaatttcaagttaataaaggtacagtaagctaaggttaatttattattgaagagggaaactatctggtacaaacgtagcgtagcctaagtgcacagcatctatcaagtctccagaagtatacagtaatatcccgggccttcacattcactcaccactcactcactcactcaccagagcaactgccggtcctgcaagctccatgcatgttaagtgccctatagaggtgtaccatttttgtcttttataccatatttttactgtaccttttctatgctatgtttagatatgtttagataacaaataccactgtgctatagttgcctacagtattcagtacagtaatatgctgtacaggtgtgtagcctaggagccacaggctgtaccattataccccaggtgtgtagtaggctataccatctagatttgtccaagtgcactctacgatgtccacgtaacaacagaattgcttaaccatacatttctcagaacacatccctgttgttaagcgacgcttgactgtgtatgaagcaagtttagccatgagctgataattattcaacccaagtaaggagaactcccagcactttgggaggccaaggcaggcggatcacctgaggtcaggagttcaagaccagcctaaccaatatggagaaaccctgtctctattaaaaatacaaaaaattagccaggtgtggtggcgcatgcctgtaatcccagctactcaggaggctgaggcaggagaatcgcttgaaccagggaggcggaggttgcagtgagccaagatcacaccactgcactccagcctcggcaacaagagcgaaactctgtctcaaaaaaaaaaaaaaagaagaagaactcatggggctttattatatttttaattctttctaccttttttttatgtttcaaattttccatgataaagaataagtgagagacagagagagagtagggagttggaaggattgagggaggaagagaggaaggaaggcagaaagggagggaaggaaggggggagaggagagagagaaggcaagggaagggggtaggacagagtccaaaaacaggagcgacctccacagccctgaggacatcgctgaacaccaactctgcgccatcacagatgttcctaatgacgcccctgaggcatcaggaaaggtcagattgtattggatatgatccttgattctttttgcaacagagattgatttatgtccactttgggggacattttacaaacaacatacaaaaaatccaggcatcctccttcaagtgttcctcagcgtttgtagcatgaaacagagctcggcctgaggacaccacccaaatgaagtgtcaaagtgttatcatcatggagtgtctggccctgccccaggcggctcccacctcggctgctgctccctcaccaggggtttggaagttgccctggagctgcctctgccctggagttggcctggagcaaggtggtgtctgcccagcctggagtatgggaaactcatcccagcaccaacaactgggtctagcttatgctccctcaaagatcttgcaagaggagttgcttctctttcgcagctttaagaaaagagaggcccatttccaatggaaaacagaccctccgcgggggctgggttgttattttcctcagacctggatgcatttaactcagccatgtggtccccccggatcaaataagccggtttccagatctgcctttcgctcaaacggtttcaatgccactccacagtgttattcagggattgatccttgtgctggcaagaccagaggagaggccaaagcaggcccagatgcgcaagctcctggagcaggaggccaggctgtccaactcacttatgcagcacccacagtaggtcaggcagggaaaagcctctgatgaatgatgagattttcagtttcatggcctgctatcagcccagtatttatttgatccaaggagcctatttttacagaatacttcatgacatctttctgctaacccacactacacactaaagagcagcagaagactgcaagcctcatgaggaaagacagcgcgtctgtcccgatcaccacataggatgtccccagcatcttgcatagggcctgctacacagcggatactcagtaggtaaatgtaattattgaatgaatgaatggcagaaaatattacagcatttctgtagtctaagagcagttctcaaatttcagtgttcataaaaatcacccggaataattaaaatatagatttctccaccatcacaccccgatccaagattctgtttctccttctcagaggttctggaatttgcattttttacaaatctttccaagtaattctgttgccaacagttagtagctcacattttgagaaagtcttatctctgaagttcccttacaacaggttccctcagggtcttgggtaactaaactccccccgcccaggggactcacttttcacttctgcatggtccacggcgaataggtttgctctactcttttaaattcaaggagaggctgaggaattagcgttggcagaggtggctggtatccttggatggaaggtattataaatgcaaagcgctattaaaatcacaaaaccttttgaataaaaagcctttcttaataatccatccacttttcttaatcatagtttttcttctacaagtcttagaagtaccctggaaaaaaaaaatcagcttattttgcagagaaacaacaaattccaacacttgctttatgctggtcaatgtccagccttgctgcttccaaacatttcatatatggggcctctattctctatagtctacaagatgacaggcacctccctgtcaggggtaagcctgcagctctctttctggatgacacattggaggcagtgggaagcttggtttcagaatgcttactaaggtcaaagcagcacctttgggagctgattcaaatgtcttctaatcccagaggggccattattgtccgtaacgaacacagaactttcattcatacaattcatagcagtctccccaacactcagatccagcagtggggaacatggctgagttttgagccaactctttaagcaaggaaaggtaactcaaatgctggaagtattacatgatagaatgcccaggcctggaaacattctgaagtctttttttagttattcagaaatgacaaaggaaattatttactccagaaaggtttgcagattggtgtggctgagggatccaagaaagcatttttcctatgtcttcctccctctccctactcctgccagtaaccaagtgacaacaatattgctagtcatctatttttttaatcatgtgattttcttacaaaagacaaggacaattgctcagattgttgtttccaaaaaaaaggcacatgatggttagatgagattccatacagctgttaaatgcttccagccagtcctatccaggattttgaaaattatagccatgtttttaatggaataacaattattgaagacagaaaaatggagtcagaggggaactagaaacttacagataatattgatttaaaaaatatagctcatagggctctaagaacttttgagtctcagaagatgtgtttacaagtacacatgaagttttctattcaggttttttgggaggttttttgtttgtttttgtttttgttttgagatggagtctcgctctgatgccgaggctggagtacagtggtgcgatctcagctcactacaacctctgcctcccgagttcaagcaattctcctgcttcagcctcccgagtagctaggattataggcatgcaccaccacgcctggctaattttcatatttttggtagagacggggttttgccgtgttggccagcctggtctggaactcctgacctcaagtgatccgcctgcctctgcctcccaaagtgctgggactacaggcgtgagccactgtgcccaaccaattcagggtatgttttatcacgacttccaattatttctaaacagaattgcttgacctcaggaggtcctccttttcaccaagacattgttttggtaggtgtagggaaataaaacaggaaaaacttttctgtcttgcaaaggagaattaattattttcctttcaaaataatatttaattctaaaatatttcaaaaatatttgaatatttcaagtgtttcaaattaaattttttttaaaagtcagaacatgaaatccacatactttatccaatcccattaggctggggagagatggagacacacccccatcacacaaccgaggcaaaaactacaaataacactgcggtgtccttctcagatgaggtggcttgaaaacaaatcacatatctatttaattaagggtggccagttgtcttgttaaaaaataaacgaacaaactcagagactataactgtcccaagatgagcacatcctagctgtgtctatagacatgcaacactttctgggggaaagtagataaactggcatttcagtcttgttaatggcaattttggaagtaggagctaagtgaaagggctgactctgtccctggagcccagagaaaaatctatatgtaaagaaaggattctgcagccctggagatggctggctggagggcaggccaatgatcccttttagacatttcatcattgcccatacctttctctcttgccattgtacttgcctcggttgaagtaatagcagctccagacttgtcaaaatacttgggggttcttggtctgcttttaatttggtggaatgttggcagatgtgggctggctcaccaaagaagaatgtctttggctgtgtccagtggtcaactgcactggccagttgcttcaggctcagtggaaggctgttgatgacccaaagtcaggcaggcctggctccaaacttcttgttaggatggctacagggctgcctcaggagaattgttagtatttagccagggctaaacacagccacaaggctatatttgggaaaggagtcttaaatgcttccagttcacctgtgtaactactctgacactaggggttggggtggactttaatgataggggaaggctttgagctggactttgataaggaagggaggagaaagacattccagataaacagacattctggataaacagaccttccagcatgcaaaaaggctggaagcataaaagggaatggagtgtgactggtgcatatggtggagatgcaaaggcaaaggttggttgggaaggaccttgcatgctgtctgagtaccttcaggctgctataataaaataccataatccaggtggcttagaaaccacagaaatttatttccctgttttagaggctgggaaatccaagaccaaggcctctccctttcctggttcacagatggcactttctaggaagaggtacctagagctaggtacctcttttgggtttcttttgtgagggcactaatcccattcatgagggctccactctcatgaccgaattacctcccaaaggccccacctcctaaccccatcaccacaagggtcaggatttcaacatttgcaacatttaaatggggcggtagaggtacacaaacattcagatggtagtatgtgtcatagattcaagtttatgctgagacaccaggctaacattcctttagaagaataaccctccagcctgtgaaagattcttccagggggcctctgagtcctctcacccactgggtgctcttggtatgtccactgtgaggtgagggttccaggaagtaattaaaaagcagtcatttgttaatagggtgaacatataattaatcacccaaacctgaacactttgagtaacaagaggaacttaaccataactgtgctgggacaacatcttttcctaagcaaatcagaacatttgattgctctcattttgtgagccctttctatatgccaagcactaccatagggggttaactcaggttatttaatttccacagtaaccccagtatgcaggtataattcctcccatcaaaaatgagtctaaaaagcagaactggcatcctctgcattccttttccagttccagaatcttcctcttgcaccctcatgttaaaagctgtatccatgcttacagcatcagcctaacctgctgtgtgcccttcccagtcactgacatctagcagctactggctctgcatttctcccccaaattaaaggcactggcacttaaatgtgactcctctccaccccaagtcccttggttagctctgaaatctaatttgcatgctacattcaatcttgaggccctatcatcccctaacctcttctactctagggccctggccttcacagcttctcagacacctgctgccatgacctcaccccagaccctccctcaacctcctattctatctttcccttactcccattctgcctgttattgtcaccaaaatcattagtcctttaatgccttcatacacccagttggtgatgtgttggccaatgtttaacaacctgctctgtggggaaataacgtgtgcctgtatttacgtacataaattaagaatttactgatataaaagatgagtaacaatttacaaataataaaacatacaatactctctattgtaaattatattaggtcaattgattctcacagaattctttcactgatttttatggtcaacttttatccgtagccaacatatggtggcaatccaaccaggacttgacaaatggactcgcatcccaatgcattttttttctcagatttactttctcaatcaactgatgtgatttaactgttaaaccatttctcactctcacccaaattatattagtgaagctgaaactctgcttagtgtcagcacagcagcagtgtaacagtgaaacagcacaagagctaacataactaactccattttggtttaagtggcccttacccatttctgcacataggcaaggataattttagagtactattaatatgcaaaaacagcaatcatgtagttttaaaaactaactctgggattaaaggagaagtatgtaaacaactatgtttttgttaaagatttataggagcgttgtgacctgaccaaggacaaagaagttccttgaacacttgctggcacccagatgtcggtggttatctgttacctcttgatctcaatcccctccccttccttctgcccttaacataaaaagagcctaaaatttgtactgtctgaagatggtactttagaaggctagttccccatcttctcggtttcctggctttccaattaatcctgcttttcctcccaccaacacttgtctctcgaatctggctttcaagcagtgagcagacacacctggggtcagttatggtagcacaccattacacagcatcctcaccatgcaacacagtcgctgccaacaacctcgatggtggacaagactaacatgaatacaataattacaaagtgaagagttttgaggacttactatctttgtttttaaatataatagtttatctgacttgttgataatgaaggtatttaaaattggctcacaaaacttctgcaagtttaaccattcatttttgtggaccaggtgactgggctgcaacacacactactgtggccccatcgacctcaggcttttcctctcctctcctctctccctatcttacagatggagtcccacagagtctattctagactgggatgaggtcaaggtcaagaaagcttaaatgtctgtaaatttccttagtacgggtccatgttggggaacttcttggggaataaatatcaatactagtttttattgggcagatataggtttacagttttactactgataatactttagagttgctgaagaaaaacaggcctattcactcttggaaatggccctgtaaactgtctacactctcctgcttaagaaacgaaacacagcaaatacgaaagcagaaaaacactggcggccgggcacggaggctcatgcctgtaatcccagcactttgggaggccaaggcaggcagatcacttgggaggccaaggcacgcagatcacttgggaggccaaggcaggcaggagtttgagaccatcctggccaacatggtgaaacaccatcactactaaaaatacaaaaattagcctggcgtggtggtgcatgcctgtagtcccagctactcgggaggctggagcatgacaatcaaccaaaccatggaggtggaggttgcagtgagtggagattgcaccactgcattccagcccgggtgacagagtgagactttgtctcaaacaaaacaaaacaaaacaaacaaaaaacagaaaaacattggggatgaaccaaatagttctctcacttatcctgcagggagatgctgtcagaagccccactacggaaacatcccaaggcctactattacctaaggtgacaccactcagctgtgcaggctttctccctgacacaggaaaccattcgcagacattacctcatcgctctaatctcctatcaaacctgtgagacaggtaacagaaggtatcctcaatttacctgtggggaaattgctgcccaagcatcagagcttcccactctgcaaacactgcaagtgtccctgacaccagcacagactaagaagtgggcatctctggcttattctgggaccaagtgctaaactgcaaatggacctcctctctatcccaattcatcaggggagaaaaatctggtttaaaatgtgagccttattctaagcagctgtctcatctaaggtcatccgacttgggcagcaattttagtactttacaagccaagtatgtttgcagaaactctagcaactacaagaacacagcagggctcctatgctgccatctgcaatatgtttttgtaggaattctttctcaaagttgcttgttcggggatttaagctcacagaagttaatatgtaaaggacaaataacaagcgaccttcttcctgaaggatgtaaatctctactttccaccagtggcttccaagaaaacaagagtcactttggggagatatggcataagtaaggtactaaaggcaagaaatttccttcagccttggagttcgtggaaatatgggggccagggcctaggggtggaaaagtgtcctgccaccagtcaaggaagaaaagctggccccaactgttttactctgcttcttctaacaggtgaatgccttctcagtacagagttccctcctctcacagccacatcaccaaagccaagcacttgaacagaaagccccctctccccgttggcttcaaaagctctctagctttcggatgcccccacgacactccatagcttcctcccaaggcctacggctccacttcacgtctggtttcctgatgtattacccaccaccacccaggactacttgttcttctcctttatccctgcatatagttacctccctttccagtccactggaaattccatttttttctagttaaactaaaaaacaccccagagtctatgatttgaaaagtggacttgtaccccaatccgctttttcccaataattttctcaataaatgtaactggtataatttaagtgttaaactatttctcaccaaagcaacttttataccaaaacaacaaactgtaataaggaaacctaccaggaatataccttcatacacctgggcccagaatgagcaccactagatgatacaaggtttgatgtgtacgtgatgatgtctgcttcagagactgccacttttaaacatggtgtatccagcggaacagccctccacctaccttacctaacccaccaaccagtgtagtgtcattgttataggtcacctgaaacatggagaaacaatagccaaggcaaaggtcttccagtgtggccgattcacagatcaagaaacaagcctaggtacacatcctgattctactatcagctctggtcacatcaagggcctagataactgtccaaggaaggaagcctgtccggctacaaagtctaacactgagctcctcctatgaggtctcccagggaaaccttcctgctatatgttgcttatcaattaatgtaaaacttggaaactggcctcaagtaatgacattggatgtgcagttttgtatatatgtgcagagttatgaaaggctagctggttagagttccagggtataagcaaggggtttttcctcatttggactacatctacagttttcacactgaactgtgcatgagccccaggggatgggggtagatactttcatctcttctatacattgggcttctggctatcacgtcttttaaagaaagggtttccacttccaaaagtgggtaaattttaaaatactctgaaagtgggatggaccctcagtgtctacacagataaacagaataatctttttccttgcttctccagctcattcacttgtctggtcagaaagtcagaagttaggagaaagtgggcttcacaatgattttaaaatgcatcttaaccatcttaatctaatcctggctcattcctcagacatcttctgaaaagagcaaacataaacttcccacctacagccacttaaaggagggctgatcctcccccttcagcaaggtgtgcagtagtgactggaggagcacttatgaccttagccatggggttctgccactccatccaccgcatctgctctgtgacctcctagccagaccctcctaacttgccctcaaggtgtttttacctttagcagagtctgttctaacataagacttaatatgcctagtaattactgaaccggatgtactttcagacattccaaagatgaagtattccaggattgttatcaaggattgtacttgttccccatctcaggggactatagtttggtcccagaggggctgttccccttttcctccaaaggaaataccagatttgaaccaatgacaacattgtggctgacaagacttaactcaagtatttaatagcttcacaaaaaattcctaataaagagcttattctgcataattagaaaagaaagacaccaagccatttaaacataatttatgtacatttatggctttatacaattatagcaaagattgttcttgtgtctgtaagtacatcaacatcaggcacttctcagagtatcggaacaagaacgtggaatctgcactgttactaaactcgggtagcgaaatgcaggaggcatgactacgtcctgatgggacttacatggccacccctggccacactgccaggctgtgcccacctcaaggagaggccaactgtaatgccaggttggtctgttcgcataaaccacaatacattttttttaatgaatgattattcccaaactaaaaccagaaaagaaacttctcttttaaaattagttataaattaagaactcttaggagcttgaatgtaagaattttaagttggggctggggttattggtagcatatatccagcagttgaacaagtccaatttgtatatcgttggagaatgatttccattttaagcatccttatcctcttcttgggatgttccattgatttactgctcactgggatacatgtgctcatttagactttgtcagtttgtcaaagcagaactttccaagtaatacatctattacctaaatatattccatacgtctatattacggaaacaatacatctttatatttaaaatatctgaatagctctataatacaatatgcttttaataacagtacaaaccagagaaaataaatcaaacaaggctgcataggtgatatcatttgcacatttcacaaagcaatcatgtacaataactgatatatactcattactccagaaagtcagtattcttacaggaaaaaaactaccagaggccacataatgtttgctttccagacagaccagatgcctttccctggacttcactgttctcagagagctaccaaggattcatgacaggatttcaacacacaatgggggcttgggagaggtataattacccagactcaggaggaagatatattttcctaagagctactccatgaagtagtaagattttaacagtgattttggctgtagttgcctctttaatgaacaaatgggggctctgaggttccttgtattatgatgcagtaatggcacgggaggaaagtgacagtacgtagtaatagaaattagtacacaagtactttggcaccaagttcagttacatacccgggaggctgtgcttagaggaacttgggtttctaaaaccagctatgtcttggactgccccaaaatgaggatgatagagtggtggctgttcaatgaatcttcaaaaaaatgatcatcacagtgggaagcttacaatagagctggcttactgtaggaaatcttatcaggaacacttgtgttcttgttaaacatttaggaaataccaagccaatgaagatgcaattaacatacaagacaaagcaagtgtgatgtgggctatatacagaaaaattagatccttctcaagaacacaagaggaacagtgctgtgcacctgttctcttcattgtgatgactttgggctttccacatgacttgaaaatactgatggactaaataggacacaaagccaattaatttggtctgtcagttacaggtaattggaaagtaataaaacataatgataggaattacagtttaggttgctacaggctaaagaaattttcaaattcttaagccaaggcttttaacataatctcaatgcacaacttacagctggttttcaaataaatctccccaatttttaagtaagttctattccatttgctacccatctgaacttatgaacacaaattctacaaaccactcaagtcccatttttaaattccctccttccacttaaacttccacagtgtgctaagtaatctaatctgcagggcagaagggagaatgagatgaagtatgagtgttgacataattcctcaaggcagaactacaaaaccaacctccacctggactgaaacaagagcaaagaattatgaggggaaacttttgctaaagctcaactcaaaatggtgaagtggatcaaaatccctcgtttgacaaaggaccattgctttagatgcagatctcccttttctgatctacaaacattatgaggcctcccaggactacagaggtctctagagaagacttgatgctatgcagtacgcatagttcagtagaagcagatgaaatttctttaaaatacatacataaaaacatattaagttatcctaaataagaaacgcaaagtgtccataactatacatcactttcctgcccaaccagggcctgaaacgttgaatatgcaagtactaattacaatgatttaagattagtcagaaacatcactaagtagcatcccaaagtgtacaaaccagttaagcatgtataaaattagtactaatccagttagaatacaaaatgaaaattatgaatgctgccccaaatacctgtggttccacaaaatttacaagctgactatgtaacaaagtagactctagttttaagaaaacattattacagttcaatatctattccaaaaatgttcttaagtcccaacaataacatcaaaaatcatttatctggaaattagaaccatttaaatgtttgtacaaatttgcaaataacaaaataaacaaaaaaaaatagaaaagacctgtacaaagctggcatttaatctttttttttccaaaagtttaacaagtccattaatttagcagattgataacaggctacttggttctcatgtgaattctgtggcaacgtgaacaggtccaaggctgttcaatggagatgcagaatggagattcagttctttgtgatccgtcagttccgcagaaaacaggtagtacaaacaaaagtttaacttatcaagacatgaggcccatcacagtattacaaaaagagtataaactttccttggaccaattggatatttagaaaaaccaaaaacacacacaaatacaatctgtatctactgcttatatacaaaacttgaaagcacaccaggatctgaaaatcttttctgcaattatatggtgtagtgagtttggcacttcattgtaatgaaatttccaatggcacagtccttatctacagcagcacataacctgcacacattgggcaaacatcctgtacaggaaaaatgtctttgctgccaagtctgacgaaaggaaaaaaggagggtttttttttttgtttttttttttaaccaagaaaactaaaagggagttggtgaaagacatctttggactgcttctctcagttcctgctgtcagacaatctgaagtacttttaagtgtaacctaggaaaaaacacatacatacgcacacacacatacacacacaatgaaaatatagccaaattaaaatcaattcaacttaacatgttaagagtgacagacatacttaggggcaaaaagctagagctttctcaaacagctctaaaatcattcaatggggaaaattctactttacaaaaaacccttcagcatttgatttatatcaaatgtattcatttattgaagagctactaaaaagatgcagccatcgaactgtcaaaaagaaatctttaaagcagttaaaggaagcttccttctgtgtaagctcagaaggaaaactgtaagctgcaaaaaggacagagaatgaatgataaaagatccctctctgcaagggacagtcagttgacatcaaagatgtgctaaccatggcaagttactgtgttcctcgcttttaagttctatttttcaaaaggtcttttgatattggggtgaacttacctgctcactaaccctcagcctgacacccagctatgtgtcgttgtcttgacactgtgtgggaagctttggttgggcaacacattgtcaaagttaaaatccaatgtatctccatccatgaggtcattccgaatgatggattccatgtcacagtctaagcgctcaatgaacatgccatccaagtcacttgggagcttctcctggtggagaaggcccattctgccatagccattgcagctgctcacggaggagtagccccccagggcactcatctgcatggggtggggcagaggcacttgtacaggtgtcttcacttgggtcaggcggttcatacccgaggtgtggggcatggtgcttaccgtgtggggcaggggacgcccgttaactgcagatgtctgctgagcatgtccagggtgggtatgggagctgggattcatcattttgttatgagatgcctggctgccataggttgacatgaccgaattagggcccatcatgacgttctggcccagaacccggctgttgggctgggctaccccaggatcaactggtgtcataatgtcattatggggaggagagtcagaagtcagcaactccttcaagagtccaggcgcacagttatactgactcatacctccataactcgacttattgtcctgaagtgtttgtataggcatctggggcaaagggctcatgctggattggccatatgtatatttttggtagtttgggctgggtgaattcaaactggtgtttggtggcgcaaacgagtagcacggcgtctgctgcatcatggtgccaggtgaggactgggtcgaaacagttaatgatgttggtgatgagagaaggttgagattatccaaaagattttccatgttttcgggattgcttatctcagacagactgggtaaagtagaggccatctttgcggcagatggcgggtacaccatagaatgcacatccccttctccaagatcatcctgttcggtcataatgggtgagagtctcccactaatagtactagcatttgagctagttcgagggcgaaatgtactccagttatcaaagtcatcattgctgtgagagccagggcttgcaggccatttggaaaactgtgatccagggctgtccccagcaccctcctggccagactggagagatgctttcttcttggcagctcggcttcggctcttagcaaatttactgttgttgtccatggatgcagctcttctcctaggagatttcccgctcttgccaccctctggattgagcatccaccaagaactttttccagttccttcattctgcacacgaatgaacttgctgtgtagggacagattatgacgaattgaattctgtaaggcaaaacatcttattagaagtacaatacttctctgcttgcaaaacttcctattctacatgtattacatggaaaacaagtaaaaaatcttaagagtgtgtgctacagatttccatctgaacagtcctaatggctctgaagccactacaaaagatctcaaatagcacaggaataaatagtatcttatcttaaaaacaatatctgtggctgggtgcggtggctcacgcctgtaatcctagcactttgcgaggcccaggcaagcggatcatgagatcaggagatcaagagcatcctggctaacacagtgaaaccccatctctactaaaaatacaaaaaattagccaggcatggtggtgcaaacctgtagtcccagctactcgggaggctggggcaggagaatggcgtgaacctgggaggcggagcttgcagtgaggcgagatcgtgccactgcactccagcctgggagacagagtgagactcgatctcaaaaaaaaaaaaaaaaaaattctatatcttaatttaatgaagggacaaaatttaataaagagtattgtaaataccttcttttatacagctacattttatggaaaaatcaaaggaattggttttaataaccgcttaaattttgcttagctacaatagtactctgtatcaaagtgctatcaaaaaccccttccattctactatccttaaaactactgccaattctcttcagtttgaacctgtgccatttacataaagaagttttatattactgggcccacatacttacagaaacaaaaaagacaaaagaatatagaatatatagaatatagaatataggccaggcatggtggttcacacctataatcccagcactgtaggaggccaaggcaggcagatcacctgaggtcaggagttcaagaccagcctagccaacatggtgaaaccccatctctactaaaaatacaaaaattagtcgggtgtggtggcaggcgccagtaatcccagctacttggcaggctgaggcaggagaaggagactgcggtgagctgagatcactccagcctgggcaacaagagttaaacactctgtcgccaaaaaaaaaaaaaaaaaaagaatatagaaatatagagctgatcaagaattaaaggcccccaaattaataagacttggattcattcacacctttaaagcccattaagcaaatacaagtgaatgtaaggaaaacagagtcattgcttttgtatttgagaaagctgacctgccaaaagaaatttttttttaattcaagtagtgcccctaccctccagttctaccaatgaccagtagtatgagcaggatgcaccaactaactccatgacacacctccacgtagccaggggctacactgtccaaacagacaacctgggatgggaagaaatgacagagaacgcaaagagctctaactctcaagctaccgcagcttcataactaatcatgccatgtttatcatccctaggccaactagggaagaaaaaccaacaatctttcttttgagtacttcctgggtggctctgctacttacttacctaggtgaccttgggaagctgcctagcccctaatgtgtcttaagtttcctcacctgtaaagcagggctaaattacagagccttatcagggttgttacatgtactaaatgagatacataaaaatgctcagcggtgcctggcatgtaagcagtcaccatgaagggaatattagaccccaacttagaatagtggtatcctgcgccccaaagtcctgcttctctattcctattcagtgtggtatgtataggagcttagaagtagtacagatacaaacccacaactgcaaatatatggtgaaaggggccagaggtggtctctccaagtttcagcagaaacaccagagccaggctgcagatgagaaagccatggtttgattcacctcctctacaacacagagtaagatggtgttcaggggagtccgtgggacacgtggaaaaggagacgagggaaacgctgtgagctccccagaaggaagggccttgtcttatagcttctggcccccagcacagtacagggcacacagccactacaccttgttcattcagcagcctctttcctcagaggtctgctcccaaggagtgggattctgggtgccctaagaccctggaatgtgcacagtctcccagctttcttggcctcctctgccaactggatgcaaggctcagctgaccatgccccctgcatctctgcggcccctcttctcaaccacaaaaaggctctggctggatttgtggtcacccaggggtgcagccacagcgcccacatcctcatgccattgacatgggacgcccgggcccgagtgccaaccactgcgcctgagcagagcctctgcacagcaggatgaggcctggctccaacacaaactgggagagaagtcttctctcattaaaaggtggtagaagagagaaaatggaggggtctcactttctaaagggagatgcaaaagtcagggtaaggcccagcagtcagggctgagaaatccacatttcaaaacgccctctgactctctgtactgcattccgcctaaagatttcaacacagcagctacgtgacaagccctcctgccagagcatacagtgaagtgtgagagcggggaagacaccaccggagccccagattcccggctggaacggagcaggtgtgtggtgatggcagtgactgtctcctgttcccaagaatccccaccttcctccacacccaagatctaccctcacctcgagacacgctgtgaggagggccaggggcttagagtaggtacaagaatccctaaaagaggccagggagtacatttccctcccatcctattgcattcccctaagatccccaaattcctatgggaaggcgccacacacacacatgtatgctcacagagccacagccttgtctgctgtacccaccaaccccagccgaaccgagttcttaattcctccttaagatcagcaggcccgcacttggggtagcactggaatgcagccctgcagtctgaccctgacattttctatacactggaagtccaggcatttgcacaatattccatcatgacagttttgttctttgaacacaatagacacacagataagctccgatgaaatctctggaggagaggaagcttgactcctgtccctgtcacatttagttaatgataaagggggaagaaagatcttcccagatagaagcttcctggttgttgcattgacttggggagagggggtgaagctctctaacattcatgataagcctgtcagatcactggcaagcccagctgggggtcatttttaaaaagactgcaggagacataataaggaaatctttaaaacattcaagaagcgttcactaactcaggtgggacatatactaatttagactttaaaaaaaaaaaagccacagcagtctcctacttatcaaaacatcatattacatatttttctaagaggacatttcaggtcgctctttgagtaacagagctgtttcctaactttgccaacaattaaaattttttccgaacaggaaaaggtttgctgtgcaggacttgttacataaattcctgtttttcacacagccagcgggacattaaagaagctacggtttctagggggtggggtttgaaaaggtaaattttgtaaaaatgtgttgctattaacgacgttgtgtctgcactcccctactggccacaggagaggctggatggaagagcagttcaccagaaggacttcgcagcagagccgcgtgagactgctgggctctgaaatattatgcccttgaactctcaacaaatattacctgaggacagaggcaggatgtcaggacagaggttcatgccctgtcaatcacttgcccaaatccagcgtttctacatgacggcactagagaaacacaagccagccaatctcctctccactagcttgtttctctgcagccccactcacaagcctctgcacacaccccatctgccatctgcatgcctggccaccccaagcagtgcagcatgtgcttcctgggaagcctgacccaatgagctccacagatgggggagtcggggaaccccgacatggtgtagtcggggaaccccgacatggtgtacttgcttgttcaacctgctctgctggctgttctatgttcagattctgagttccttaaagagcaaatgggctaaagcttgtctttaatttctaatatcatagcctcaataactgtttgttgcttgacccccaaaaaaattacaaggaagatatggtgtcttacacaatacacatcttttaaccatccatttgagtaccaattcatgtcaactaacatttactggaaactattttgtggaaggagtagcgaaagacatgaaggaatgagacacagaacatgccctccagaagcttttgatctacctggggagaaaataagtacacgtaaagagccacttaataggatgacacaacccatagactgtccaggaacacggaccttttctctccaaaggctgccaccctgccctccatgccccagcttctgtctcagcccaactggcccctccagaagcatttcttgatgacctcatcccatcctgcagctctaacatgggaccttacttactcacccctctttatgattccactatgtctgatccctggggcggtgggggggcatgcctgacttcccactacactgtgagctgctcaagtgagcacagggacctttgtctgtcttcttgtacactgtatcctcacagcaccaacaccataggggcactcaagtatctgttgaacagattagtatttcctacatttacaaagttggtgcaaagattaaatgagatagtatgcgtggaaaggcttaccttaatctctattagctaatgttactgttatcactactggcataatagcatccataaaataacatatgtctgtgttttacagacctatgtatgtcataaacattagtcttatttctttataaccacacactgcactgctctcacttaacatgaggcttttttatatgttaattactggaaagattgactggtttgggaaaaacagttcatttttctcttgacactagatattgcctcagaactgattcaaatactaaggtgaggctgtcagtgccctggtcagccaatgtcactagaatatttaagtcttctcaaggtgctgcagccaagccacatgtgcaggcatcacacattgctggggccaggggcctccgagctctggacacagccagcatgtgcagagcagcagcaggggttggcagagcagggacctcaacaggccagttgggaagctccatgaaggatggttctgatgttctgtctctgtggctggaagaagtgaggtgctgaggctggtccccagagacccctgaggacacatgccctccccaggatgctcccagacccactgtctaaggcaatcatcagccactgaagtgcaggatgaaatctttacaactttcattgactttcattttttttttttttttaaagacagagtctcactctgttgcccaggctggagtgcagtggcttgatcttggctcactgcaacctctgcctcccaggttcaagcgattctcctgcctcagcctcctgagtagctgggattacagtcacctgtcaccacgcctggctaattatttgtatttttagtacaggcggggtttcaccatgttggccaggctggtctcgaactcctgacctcgtgatctgcctgcctcagtctccacaaagcgctgggattacaggcgtgagccactgcgcctggcctactttaaattttttatctcattcttttaaaattcttatttgtgaatgtattatataattacacaatatatttaaagtgtataaacaaatacatgttttatcaaaaagggtatgtgatttttttaataaaaaccatttacagaccactagtcagtctatcacggtagtcttctaggagcctgaaggcccaataaagatgatcaagtgaacagaactagctctaaatcaagtctaggttgactttgcccccatccctcaagactgggttgaaaaaagagacctggtcccaccctctgcttgcagctctctgcctcctaagagctgagcctggctgccttcccagccacttctcttcaccctggcctggactctcacatccccaactcctgtcttccaacctgagctgccacttgacatgcatctagcctgtccctcagcctatatgaagaccaccacctgtcagccacgggtctccacaccactgctacattctacatttctttctgcttggcagttctatgattaccctggtctttatatttaaccaaaaataatgcaaaacctcaacttaaggctgaatacaccttgctcatgaaacccttagatggccttcataccccgtgttttatatttttgtatttatttcatagtttattatataaactatgtattttatagtttactgctgtcaatacatctcattccatccttgcaacagccctataaggcaggtattactggcttcactttagaaatggaaaaggaaaaattaagactcagaaaatgatctgtccagttagggttcaaagcaaagctctgtgattctacctgcaaccccactgctggctgaaaaaactatccccttgccttcaccactgttaagaagaatcaaaggaacatacttaaggctgaggttacttgtgtgcaccttgagggagcagaaataattctgcttactagtttacaaagctcattttctgccttaacaggtgataaatttacacaatgtgggcgggcgtggtggctcacacctgtaatcctggcactttgggaggctgaggagggcagatcacaagatcaggagttcgagaccagcctgggcaatatggtgaaaccccatctctactaaagatacaaaaattagctgggcatggtggtgggcacctgtagtcccaggtactcgggagactgaggcaggagaatcacttgaacctgggaggcagaggttgcagtgagccgagatcgcaccactgcactctagactgggcaacagagcaagactccgtcttaaaaaaaaaaaatttacacaatgtgatttgctcttattctagtgggttcttctttatggcaggaatccatagcagctgaagcgtgcatttcagatgtgagcatcatcctagggaaaacctgtggggactcacagggaaagcggaaaggtccccagagacccccagctacctagaactgcccaccaccctgcgtgaaggtgtgagcaacagccaccaaatccaacaaaaagaacttcacactcagaaactggaacatatgattaaatgaactcattgtcccagaaattctagaaattctttcaaaatgctagacaaactacattttcccaaagcatttaatctaatttctgtgaactttctcaatgtgtgcgattgttatgcaggctcccggcatggcctttattccctccctcctccttcctctcttttacaccagctcttcctgcacttccacaagtgaaaacaaactgaactaggaaaatctattcaacagagttcccattaagagttactaataaaacaacaacttttaaaaataatccattttgtttgcaaacagaaggaaaacatgaccttttgccaaccctttttttacaagagttgtcagtagacacacgttagcaatagacagtatgtaaatcaatgttagaaagtgtttaacacaagatctgctgagaatagctaatctacatgcttacaccctagatccttccataaggctggttcatttcccagaatcgtttccttcttgcccgaatatcctcaaagaccactataccccccactgctacccccactgtgcagaggtcttaaagcatctccactgatcccagggctgtggacagagactggcggcctggtaaaaccggaaggtacttcgaaggtcatctggtctaacgctcttgttttatgttagggaaacaaagttcagagagattacaacgcagatgggaaacttatgggtgttcatttacaaaaaatagaaccacatggagctttagtactggaagaaatgtaaaacaagtaccaagaacatgcaatattcctcccctagccaagccaatccttacctatggtctcaaaccgctatagacacaaatttagttacacagctttatctctaactctagtcagtcattccaaaggaagggaaaatatgactatccactgcaaaaggaatgtaggagattatgcttgcatgtcaaatagtactaaaaagacaaatggaagaactcataggtgtcaggagaagcttcatggacttgggaagtacactgtgaggcagaaccggaggtgccggctctggaggcagagttactgctgggcccttctgagtaggtcctggatctcatcactaagcctgttttcacatctgtaaaacagttacatgtacggatggcatgatatacatgatatacatgaagttgcctggtgcatcacctgacacaatgacaataaacactggctattttgttttaggaagtgaaagaatacataaacaacaattttttaagccattatgaatggttgtaacttgattaaaagtcactcatcacaaacttcctgtttaaaggcagccagccttcctcaggcttatttccaatgtcctcacaaccgagctgcaatccgtcatttacagaaaaattgtgttttctccctgttaagaaaattttaaatgaaagaatttgagcatttaactagcatattctgtcggtttttgaggtgacctatgtcagaacacgtgtgtccaggatgttgttcaagttaagggagatacagcagttgtctgataatagattaatttttacatttaaacaattttttaaatagattgggttttgctatgctgcccatgctggtctccaactcctggcctcaactgatcctcccacctcagcctcccaaagtgctgggattacaggcctgcaccactgcacctggactgatgacaaattatatccaggatggtgattattagaatgatgttctttctcatctcttcacaaacactagtcacccatgactatttactttatggaaaacaaactctaaaagagcccctaggccaggcgcagtggctcatgcctgtaatcacagcactttgggaggccgaggcaggcagatcacgagggtgaagagatggagaccatcctggccaacatggtgaaaccccctctactaaaaatacaaaaattggccgggtgtggtggcacgtgcctgtaatcccagctacttgggaggctgaggcaagaaaattgcttgaactcgggaggcggaggttgcagtaagccaagatcgcgccactgcactccagcccggcaacagagcaagactctgtctccaaaaaaaaaaataaaataaaataaaaaaaagacccctaagaggtgaggaggtcaaggagtgtaagaacgtactacaggacaaaagaggtgcgttacaagtaaatgggactacggtattgaggaacaaagaaggaagaagggggccaccactagcccacaagaccgggggcagaaagctttacaacggaggatgttctctggtttgtctgatctttattagccaaaggtctaaatatttcagagtaacatttcagccaataacctcatacatttaggattgaagaaaaccccttcagggacagaacagaaaatgtacttaatgatattacaccataccaaagcttttgcatttcagaaggtagtaattaaaaagcagcactacaaaatttcactgtgtcccacatgagaaccctgtattaaaggaatctacagttttgtgaaaggaagggcaaagccctttaattttcaggaagtgaaatggaagtctcctgtaccattcaatactatgggctctatgcactatcagaaacaaactaccccaaaaagacaaatcccaaaacaatccaggtgaggcagaaacgagcaatccccttagacaccagctccagatcacaaggcattcatcttaatcactttccttctataacccctctgtatcaggtgctaatgtggacccctatttaagcaaagcctggaaaacagaaactatctcacactgtcatacgcttgggtttaatgataccacacaacccaaacaaggccagctctcaaatgaatgtcatcaaccctagctaataaggtccctgtggtggatatccagagactaaatttcatctagctaaaattcttctaaatgccttgtttgaagagatctgtaggcggaaggggaacatcacacaccggggcctgtcatggggtggggggaagggggagggatagcattaggagatatacctaatgtaaatgacgagtaaatgggtgcagcacactaacatggcacatgtatacctatgtaacaagcctgcacattgtgcacatgtaccctagaacttaaagtactataaaaaaagtaaataaaaaaagagatctgtaggctaccaaggatttcaaagtggagcttgtttcccctaggattgatttagttttgatgcagcctgcagttacccctggggaccctttaacccactcaccagctcctccccagggaggcacagaggccaggtactgccaaatccacagcagacagccacaactcccccatcttgcccatcagtgacctaaaggggccttcctgaaacttcgactgaattaactactggaatacccatgctttttgctgcttccgcctaatggctgtctcagatgcaaaaggccccaccacaggagaatattaagaggaaactcatttgacgctgaagtaattctgctgttcctaatgaaaatctttgtctgttttataggccatacaatttttctaatctgcagtggtcctataaacgcacagcattataacgcaattaactaccttatctatttggctaccagaagactaaggcacaacaaagttaaaaccaaaaacaaagaacgcattaggatctactctcttctgatgaagaatttaaattaggcataaaataaagcatagccataccaatactttgatccattttaaagctttctaaaattttaaaggactaaagtgaattttaaagtattttgtcagcattacattgatgagcctgttaatcctgttcatgctaggtaaatgtatattcaaggtatgttcccgaattgtttacagaagccagtgaaaaactttatggatataaattcagaagcaagaacactgaaactttgacagattaaaatccctaggacaatatcccacccatagcatgtactacgtagaactgtttttatcctaaatatgtttgctatctggaaaatctagggaagaatttatctattggatacatagtctgtttactaagaattcttagtaaacagagtacaaagtctagatttatgtgttttttcgcatagtctgtttactaagaattcttagtaaacagagtaccaagtctagatttatgtgttttttctattttgggacctagatatgataatccagattacaaaaacaacagcaaactgcaataaagtgtaacactctgaattacactacctgcaatgttgggttttcctgtagggtttacgtagaatcttgacaccagcttgcccattactctgtctaggaagcctaatgcaacaacgactcgagactgccgaatatatatgtttgtttatataccacccaaatattattcaaaggttgtctcaaatcaaatagcttcccaaatgggttgacccaataatagcaaaactatttgggcccaggtttatgctaaagagaaactcccaccatcacagagattgagcccaagtcagggctgtggcccagcttcccacagacatcagggatccacctgaggaggcagagcacaattacactctaagacacagtaggtctgctgcgcaacagccctgctgtccacaccttccttctaagtaatacaaaagacatggtccccctcacaaactgctgctccctcagcatcaccagaagcccaggcgtgtttggggactccaaaagcagctcacataaatgtttcagtaatgctgctttcattaacatacctaaaaagcctccatgactcctcctggccctcctcaatgtgcccacactaaagccacacatccccatcagcacacacctaacatgaatgaagcctacattttgcttatttgtaaggccaaatttccaccccagtggaagcacctgtgctgagagctgcatgttcatgtctgtttgaaaactcagcacccactgagcagaaaagaagcctgcagagcagctttcaccactgcgcagtcactggcactccaccagatgtgggcacatctgtgtcagaggtgcccaccaggactttcagcttaaatgcagtctcaggtcaaagcaagccagcccaggaagaatgtgcttccccaagatcactcctgggctaaaggaattctggaaggctccaagttgagtctgccctggaaccacatttagatgacttgaggacatcccactaggaattctttgggctccagagagaagggagaatgtcaggtaggaaaaaagggatccctgaaccacctgagggtccccacttgaatgactaagcaaaccttaccatatggacagtgttccttgtattaaatattaaatgttttattctaatgctgcagttcgaatcatgtcttttttggaaacatggatgatattgttgtcatacgttaagacaagactatctttataaacctccaaagaccaaaacaaaagaaaacgacaaacaaacaaacaaaacaaaaaaacctcacagttgcctttggaagttatcgacatcattttaagaaaagtcttgatcttttaaaacacactggctatgcgcaatacacatttgtgtttgaggatgaaaacacaaagataatcttaataacttcgggcaaactagcaaaggcagaaggaatgaatgattaaatgaaccattttttaggatgactcaaaccaacagaaaattagaatctcccacacaagccaataatttgcgatggtacaccttaaactcctctttggaattttagtcctcattgtttcagcgttttcactttcaatttcctccaaaagggaactgaatatcaactattgtggctagaatcttgcacacaagtacaaacgtttttttatctcttccaagctactattcaaggatactctgcacatgtatcccaggacttaaagtaaaataaaaaatttttaaaaaggatactctgacctgctgttagttttccaccacaatgtatgtattagcacatttggagatgccttttctctacttctcttaaaactacgaagttgccaatatggtccagtaggaagagtactagaagtcagggcgtgtatgtctgtgtccaagttagatcattactgcgcgtgtgaatctgagctgtatgatgccctggtgtctccgtaccaaataactgaatggtgcattgtgaagattaaatgagaacatgtttggaaaacataaaacagattatacatgtgaagaatgctaccaatttcaagcatattcgagaattattctataaactcatgatattctagaacaaaatgcaaggtttttattagaaattattggctctactgtcacagatacttatataacaaagagatgagcagtaaggtcagtctaacagattacttcagcatttcaactctcaaagatcacttttctctgaaccaacatgtagtctctggtatttcaatttattttcattttgattactgagaaaactaatttagctaaattctgacagcctagttaagattgcaatggatgacttagaactgctgttgactgaacaaagtgtaaaacaatcattcttcagtggtaccctaccacccccaaaaagaaaagtttcacattttaatcatttaaaaaatctatcacacataataaatagccaaacctagaaaactcttttaaagaaatattttgttcgaaaattgcttgctattcctagcttaatttatagctactttgaagactaaaatggttatccaatatattgaggtctatcttcatgaagtctctgacagaaatatatgatagactttaaaaggaccatttgggccaggcatgttggctcacaccggtaatcccagcactttcggaggcaaaggagggaggattgcttgagcacaggagtttaagaccagcctgggcaacacaatgagaccatcctgtctctacattaaaaaaaaaaaaatcaaaaagttaggtgtggtgttgcacatttgtagtcccagcaacacagaaggcagaggcaggaggatagcttgagcccaggaagttgagcctggaatgagccaagttcacaacaatgcactctagcctgggtgacaaaaataaataaataagggaccattcagagaatcaggactggaactgaacatgtccagttcatcctgcccaagtcagtgttagagcacttgccaggggtgggggtaggtggagtgaagggcaccaaggaggaagggtctcaaaggaccctgtgtcagttatttttattgggaatacaaaccaaagatcaatttttatcttcatttttgtcactggaaaatctgtgggcctacctaatgtaaagtatttcaatcaactgacaatttcagaagttaatttatttccattcacatttcaataacataaattaggatcttttgatttggtcaaatcaataccgatcaatgtaattttcaatgaacaattatttactaagcccctactgtatactgtggaaataacaagtaggcattaaggctcaaggctctccctgcctcccatggtcttacacatatgtacggaaggctgacaacacagaaacgttaaggtgcagcacacgcaaaacaagaaaggaaaggccctacgctggaattgggacgtgaagcaaaggacgacttggattgctagataaaacgggatgggaattcttgaggtagggcagagcatgaaccaatgttgacagacaaactatgtggtggtgcagaacatgtgtgctagaaccagactggcccagttcaaacccagttacggcctgagtgctcttggataaatggcttgcgatctttgggcttggttcccttgtctgcaagaaggaaatactaacagtacttactgaccactgtgcagaatgtccgataaatatgagctattagtgtttgtgaggaaacttttttaaaaacactagtaaggtatgtctggagaaaagagaagaggtcagtatggccatgtatgagtttagacacagaaagggaggagagagagagaggaggtacggtgggtggggccttaacacagcagcatgttttttaccctacatgcaactcacaggacagccagtggaagatcagaggacaacagagtaaagttataatgcagaacctagagcaaagcgccaaacctgtcttcccacctggatgataggaggagagtttgggctctgctgggaaagcagaaagatatttctgattatccacaaatgtaactgtgagtgggtgtctgtatttttgcatacatctacattgctcttgataagtaaaagcatctccaggagctgctgtccttggctgtggtgcttctcccacctaacaggaagctgctgcagctagtgctgagagaagggcctccagaaacaagttaccttcaggccctcctccctgtctccctcgctgaaaatgacagggttttcgattcaagctttggcttctgtctcatgacttgaaggatacttgattgttttcaaacttacggcataatctgatattttcatagccaaaggagggcaggatgctggggccaggaccatttgttttgaaaacagattttaaaagtctccctccatgaagctgactgctttcatacattttatccatcattcacaagatttggcataaaaatttggttcttacattttgaaggtttatttttgttccttgatgtcattgtctaggctcaactataacatctttcaggttgttttgaacagctaaaaggaaattaaaggaaataatggcctacaatgtaaccatggattgttccacacaaacatggataaagctgcaacaaaatactcatgcattagtcagtaccctggtggatgcacaggagattcagggccaaggctgtggggtactgcaggggcatgaggataagctgcagtggcatcagactccccccacccacccacccctcctcctcaatgtgaaaggcatgattaccccccgcccacatgcatactagaagacaagtggtccaattcttgaaaacttttaaaaggttgatgagcactccccacaacagaattcgattataaacattttatgtgatgttaaccttaccctcaacagatcccatcctcctttcttcttccaccagccagatgccctgacctctaactgcttcctttccttcctgttacaaaccaagtgtgtgccatgcaacttaagacagggtctaaaactcacagttactagcaaacaaagaaaccttagcagacagttcaaatattttgtagaatgggtcacagagtctaatactctgtccactttagaagaacataaaaccactttatggaggatagctaacagatacctgcagacaggaacaccacaccttaggttattaacttttcctatttcatagcacttcttccagccactcctcctactaggatcattttattctcctcaccagcccaaactaagtaaactaatcacctccattaatctaaagtttttgtcgtcgggatttaaaaatattatacatgaactttttgatctatactcaatgcctagaacagaacagagccaagcagaacataacagaatgaaacagaatgaacagaagaggagaaaagatagatcaagggtgatatccatgaccagttcttaggaggttagacttgcttccttagtttcagatatcaatgcaaaataatttatcctttctgcttggctggaacaaacttacttcaaaataaaagagttttatcaagttctatttctgctaaaagacagaagagctgattaagaacatggatgcagaatgtgcccactgactggcacctttaccaccaacttctcttccacccttccctcaattgccatctagtaaaagcaaaattgcacgcaaagttgaacattaagtactaaagaaagggcagtggagcgggggttgatgcagatggcctcactcagggaatgtgccttgtcaaacttcaggccaagatgcagcagcatgctggctgtactgggtccaaatttcttaagtccatccctaagccaataaactctgcagctgtcactcaggctacagttcatggagctttacctaacaaagctgacaactggtcctagaatgctgatcctgtagattgagaacttttgtgcattctggttaaattcctactcggtatgaaatcctggaggcatggtgcttatagtgacattatgacaaagattccctgcagccagcctcccatcccactccaccttcgggacagtctttattcccaaagcatccccagccactgactgtgtatcagcatcctctggactcttccctgcaagttccctgaagatcagattttcctctaaccattgaggtctcctgtagcacctccaaagtagcttcaggacaaagcagcacactatggcctactaaagcattcttcggcatgtgctctacaaaataatggttccttttagggtgatttgaattcactgaaaaaatacctttgggacactctggccacacagaattaaacaggattcctaactgtacagttttttagagccttgagtacacaaaacaacacaaaacaaacaagagcaaaactgttcccttagactttgttttgttttgttggtgggatcacatgcatgcacatgcacacccctccacgcacatacacatttctttgcccgcgcttcttgacagactataccatgaaactgatgttcagcagcacacattttggaaaatgctgatctaatggcaagacggtggtaatgaggaagaaaatctaagtctggctctatctttctgactggacacatttttacatcctttatgtctaagctttcttgtctataaagtaggaaaacaatgtctgtcctaaatgccccacagaattgtaatgggtataagtgcttcaaaaagcataaagggctacgtattggtgagattttatgattatgccaaggtagaaggaggggctctcactgaaagccccagtgctgcccaaacttcctaccaaataacacacctgccctaggtagctcagaaagcccaggtgttctgtgggacttgctgctagaagtaattgaaccatgccttactctttgatggatgaaggaggagaccagacaatccacgccaggtcggattactccgtgcgaagcaagacccacagtagacctctttctcctacatcccattccccaacagtcaacatcatcttcagaaatacacaggcagagttatgacaggagaagaatgggccaaatcttttccatctccttaaatgcttctgtaaaaagacaagcaaggtataggaaggaacaagcaaagaagggggaaagaagacaggagaagagtgattctgaagttgactgctgagaaggcagcagaatgaaaaaaaaagggggcgggggcggtacaatcctaagacttctcccaggccaggaaaacactctagccttggctgtgacactcctcctcatgctgttaggagccatgatgtgagcacataggcagtttctagggtcaccacaatagagcttggaagatgaggaacctgtacacaaggtttccccattagtgtaatatgtggtgggatcagtgtagaacctaactaggcaaaaacaccatctgggattggaaagtttatttacaacacctgacagtgaacatcaatcatgacacccctgaaacctattgcacactatttgcaactaaaatacagggtgctctttattaccaattatacgagctctgtatggtcaattacttcttttacaagacaattttgatgaatacaataatgttgcttccaggtggtgaatataatggggctttttactttgtagattacctttgcatgttgtcttttttgctgctgctgttaaagaaagagcattttacctttcataatgttgctacattggggtaacaaacaaaaacccaggcattttcctttctcatatattcattcaaaaacaaagcagttcctatcaagtggaatatatccaagtgaaatatatataatgtttatacaacacacacacacctgcataaccaaataataagttgtagtttgcaaactatatgctaacatttttgtttttccaggaaacaatatatctttccttaagcaggagacggggaaagagaacaacaattttacacaaaactagtggctgaggagcgtgggcttgctgtcacacaaacctggaatctacatccagtactggcacttagcaaatgtgagaccttggctgagtcactttacctctccaggcttcaatctcctcatctacaaaatggggataaacaacttccattccaaagcatttttgtaaggactaaaatgagataatcctacaaagcacttataaatattagatattatgggcacaaaatctcaagcaaatgtctagcccctggctccaagcaaggcacacctcatctgacctcatgtcacctccctgcacacattcaaagaaaacccagtgctggcatgttccttaagcaaaacacatagaggacacttgtcctcaatgtttacgcaatcactattagcagtagcaacaaaagatgctgtcatttgaaggtgaaagtcatccaggacacaatcaagcaaaataagttcaagtccctaacatctcatggccagaagctcaaagaccctgaagaacaaggtgaggctccaggaaagtatctacagcactgcttagccttcgcctacacacttaaatacccggcgcttccgctagctagatgtgggccttcttgggttatggtcagggcaacaacattggaaagcctgccaagagacggagttgagataagtaagaaaaactacaaaaggaaatgaaatgcttgggcacttttcttggagacagaaagagctttagacttttctgggacacaacaggtgtccagagagcatcactgaaaatctggccaggttttgtgatcccttaacccccttttttggaaaaacctgaagtgacactgcttgaaggcaaaaaaggggagcgagcacaaacagggccacaacagccttcacacttgttgctggaacacatgccttcacctttgaaagatactcatgagaacttgcagagggctgtcttcatacaatagtacaaattgtgtttaaattgagaaaccagctgctcgctccttgatcagtcatccttttatcatcaacagaactttaattagcccccatctgcttcctgttttatgctacaaatcttaactttcacctgtttgaaccaaactgcagtaactacacccatagtaaattaaaacaattaactttccatacaacatgcaattaatcctcattaagctgttattaggctattcaaaataacacagaattcaaatcaactagtttcccacaaatgacaatgttctatacaaaaattcaacagaaactctatcccacccacttcttgcatttttttccattaagaaggttttcaagctgtctggcttcaatttcctgatttaactattaagtatggggccatatctggtcatgtaagaacaatacatctcaaaaatatcatgctgacttttattaaagaaaatcaagttacagaatggtgtttaccttaaatgataacatttatgtaaagctttttttaaaaaggggatcctacaaagaatttgtggaccccatctatcagcacagccagggtacgggcttctggcaggaaaggtgcccttcaacacacaaactctggaattagtggctacctctgggacaaggaggggaagaattatatttatagctaaaacagagaggtagaatatgggtactaattatattggtctctatgcctttcttcatgtatgaaatacaggcctaccttagagatacctcaagttcacttccagaataccacaataaagcaaatatcacaataaagtaaaaacaaatttttgtttccctgtgcataaaaggtatgcattatattgtagcctattaagtgtgcaatagccatattttaaaaaaataatgtacacatcttaattaaaaacttttattgttaaaatatgctaataatcatctgagccttcaacgagttgtgatcggttgctggagggcctttgcctcaatgttaattactgcagtctgatcagggtggtggtagctaaaagctgggatcgctttggtaatttcttaaaacaacacaattaaatttgcctgattgattgactctttctttcacgaaaaatttctctgtagcatgtgatgctgtttgatagcattttactcacagcagaacttctttcaaaattagagtcaatcctctcaaaccctgccaccgctttatgtaatattctaaagcctttactgtcatttcaaccatgttcattcacagcatcttcaccagaagtagattccatctcaagaaaccactctctttgctcatccgtaagaagcaagtcctcatgagttcaagttttatcatgagattgctgcaattcaatcacatcttcaggctccacttctaattctagttcttttgatgttttcaccacatctgcatctacttcctcttctgaaatcttgaacccctcccaggtcatccatgaagactggaatcagcttcttccaaatttctattaatattgctattatgacctcctcccatgaaccacaaatttcttaatggcatctacaatgctaaatcctttcttgaagatttttaattttactttgcccagatccatcagaggaatcactatggcaacttgggccttaataaaatatatttcttaaataataagacttgaaagtcaaaattatttcttgacccatgggctgcagaacagatgttgtgttagcagacaagaaaacaccactaatctgcttgtacatctccatcaaagctcttgtgtgaggaggtacattatcattgagcagtttaatattttgaatctttcatcctgagcagtaggtctcaactgtgggcttaaaatattcagtaagccatgctgtaaacagatgtgctgtcgctcaggctttgttgttccatttacagagcacagatagagttgatttagcatacttcttaagggcactagaattttctgaatggtccatgagcattggcttcaacttcaagccaccagctgcattacccccctaataagagaatcacaacctgttctttgaagcttggcattaacttctcctctctagctatgaaagtcctagatggcatcttcttccaatagaatgccacttcatctacattgaaaatctgttgtttagtgtggccaccttcatcaatggtcttatctacatcttctggataacttgctgctccttcactttgtactttcatgttatggagatggcttctttccttacacctcatgaaccaacaacctctgctagtttcaaacttttcttctgcagcttcctcacctccctcaaccttcacagaatttaagagttacggccttgctctgaacatggctttggcttaaaggaatgttgtgactgttttgatcttctatacaaaccactaaaactttctccagatcagcaataaggctgttttgctttcttataatttgtgttcactggaatggcatttttaatttccttcaagaactttccctttgcattcacaacttggctgactggcataagaggcctagcttttggacaatctgggctttatacatgccttcctcactaagctgaatcatttctagcctttgatttacagtgagtgagatcagatggtgtgactcttccttttatttgaacatgtagaagccattgtgggggttttaatggcctaatctcaatattgttttgtctcagggatagggaaccctgaagagggggagacagatggggaatggcaggttggtggagcagtgagaacaaacatttatcagttaagtttgcagtcttatatgggtattagaattttttttaataaaaagctcctcaagtgagtctaattccactctctaaaactcatcccttgagaaaggctgaataacaatccacatatacctccaaggcagagagaccttgctcacccatctcaaaactgcccccactcacctacctagtcagtacctgaaatgtaaatattatttggggctgggcatggtggctcacacctgtaatcctagcactttgggaggtcaaggtaggcatatggcttgagcccaggagttcaagaccagcctgggcaacatggagaaattctatctccacaaaaaatgcaaaaaaaaaaaaaaaaaaaaaaaaaaaaaaaagccagatgcagtggcacgtgtctatagtcctagctattcaggaggctgaggtaggaggatcacctgagcccgggtaggttgaggctgcagtgagctgtgattgtgccactgcactccagccaggggggcaaagtgagaccccatctcaaacaaacattatatatatatttggatattatttggatgaatctacagagacaataagatttcttgtcctgctattaatcagcccaataaccaagcacataaattcccctttcctgaaggcaaccgaataagcgagtagttatccctccagtctaatggtccgactcttctaggaagcttcggatgttatgattcactaggtatgaagcgcagcttggcaatctattaaagcagtcatggtactggagccaggtttgggaacacctgaactactttcatgtgtaagattcttttcagttctactattctaagaaaataaggtaactatgttattccaggtagattctgatttaacaagaggaagatgaagtcccagaatattcttaacaagtatcttatatgacaggcaagtatgagaaacactatgttagtggtacttttggtcattaacaccaaataataaaaggcaattcattagatatttatgaaaggatgtctaaaaaacacaactgtaatcttacggataaaaagccagttggttctgggatcaaattttaagtcatcattgtttttcagaaagaaaaacagaagcaagagttaagagaataaggaatgtcaacctcaccttgcaatttcctggaattttcctcccccgctttcccctttagtatgtaagtatttcctctgcgcgcgcgcacacacacacacacacacacacacacacagccaacttcacaatggagttttgaaaagattactgctccatatgccaacaggcaagtcagggactcagtggaaaggacactattccagagcacagccttctcccagccagatcacaccagcttcagctgttccagctctgcagagaaagggtaatcacttcttatcaaacattgataacacctaaaattcctttacagttctgacttcagggtggaagtgcaattcgtatttgccctgaagacatgaaaagtggaatgcgctttcatgagatgaaagcttctgcggaaataattgattcaggtgagccctactcaggttaatctcaaaagaaagaagcaagaaacctcatccaggaaagtggacccagcagctgcccattttcaagggttgtatacaaaagctaaacgacaagatgtccagatggatgaaaaaccctatcctagctagtctgtgccagcaagacttaaaaaacaaacggtgtcttttgggtctgtttgatttagtacgtaagtttaactagttccatgtttgagaccaatccagagaggggctacttaaaaactggctcagcccaaatcattgtgtgttcaagtgactgacctgtgaactccctcctcatttcccatatatggccaattctccatatatggattcatctacctgtttcccctaacttcaaggctgctgccatgacacaaaggtcttgaaagaatgtgggaaagccctcaggctaaaactctggatcacaatccataaaatagtgaaaccaattgagaggattgtggctagcatttctgtaaataataacaaaacagtcttacataaatggctaagcacagtactattttgtaaaactcttctatcattgtgtgcatatgtgcactgagtcatactgtaaaatggatttctcactatgcatcaagatgggaagaaactgagaaagccacagaaacagaaggaaacatactacttcctacaggatatgctttctctctctaagaagggcttaataacaaaagcccaataaaatggtggcacagtcccatccccgggtttccagggagaccccaatcccatcaagaacacctactcctcacaggcaacagaggcacccccttgtgaagctgttcagcagcctgcacagaagatatgactcttgcagtctggaataaaaggcaccaaatgggaaatagtgtgtagggataaaaggtaccaaatgggaaatagtgtgtagtatcagttttgacaatttttgtaaccaagtaacttttgagcaagttactcatttctcatttgcttatcaacagaatgatcatggaatgctaaacctctacagggtgcaatcttaaggaaatgttactacttaaaccttttacctgcacaagactgcccctctgtctttcctctctgatgggtacggaagttactgacatgcaaagtcagcacaagggaaccgtggctcaggcaaacgaggaaaaatgaatttagattatgtttacagccaaggaaaggagacacgttgaacaatcctctactggaaacattgctaaagtgtttttaaactgaagattataccaccacttaagatattttttgtctgctattttacccagcatattacaaaactgcatctaggactgaaatagcagattgcctcaagagcaaatgacaatatttgtaccagaaatgttggcaaccagcagcacagatgggtttctgcacagcaatcttcaaactgggactccaagaataactccacctactgcaccaatgttaaattgctgaatccaaagtcagaagggctcattattccatatttttccaccaccttcttcccaaaggcacgtgtacctgcctgacctcctctgcctgagaagggctcagaacaaagtaaaaaaaaaaaaaaaaaaagtgggagtgggcagggcggagcaggagaccacaataagaagcaaatacgaacagatagtgaaagattgattatccgtgaaaggaaggaaaacaaaaatgactggaaagtccagataagccaaacagctatttacatgactagttttaaacttccccttcaaatacaaataagaaaaaataaagatttatcttaatttcatctcctctccaaggctgggtacccttgcttgaggagtcaaataaaaacttatttttgctaaaagactcaaggacagagagagaagctgccattaaccatgttgattactaggatggccccaaagacagtccatctatacctaaagcacggctcaagtgcttggagaaaatctttgttgcttcttccacatctgctcttcctgcctgccaactgagatgcactgttctccctccattcctctgcatttctaccgaatggtctggaaagccaaatgaaacggaagtcttcacttaatgagacattaattatgaagtccatccaactaaagtgctgtcttcagtgttcacagtagcctctccccaccttttaaaagggccagagggttgatggtggtaatgggtctctgcctctgtgccaccctaggttgacttccaggggtaaactttaaggcctttcatgtgaaagagagtcaatgcactaacattttcgggctagaacggcacttttcaaattgcataacacagagtacagagcactactgcattatgctccatatcctcacatctgctatggtgcgggaggaagcccaggatagaaaggattcaattcaattaacagaaccttgggagttcaggcaagcagaatcctacatttaaataaatgcccatttaaccctaaagaaactgagtagaggaggattagggagtgctcatcttccacctttcctctccaacaatcaaggtgttccttgctcaggctctacttacaattccctgaactgcacagtcaggaagtttgagtgtatctgcacaagacttctctagcttcattaccaaaccttgagtcacctgaatccgaacaggccaactgatgttttaagtggaacaaaattccctgcctaccttttctttttccatttattgggctaaaaaggtagtgaaaatgtgggcggttaaaccctccataaccatcactaacagaagcaaacaaatgttcacagaatcccaaagtccaggaacaaattatatttaagttttcacccttaaactgagtttaagattttgggggggacatttactccaagccaaaaagttatcctaagaagacccctcacttacaggggctgggaagcactatgattattttcctgttatccatctaatctcaacccaccccggcagaggccccagcctaatgaacaaccctcaaccaaatcttcctgaaagaattcagaatgagcaactatggaggtctccttggtagaataaagggcctgtccctcataaagacaacataaaaagagtcaaggacacaagtgatttaaaagtgtcactgattgaccaggagtgatgactcactcctgtaatcccagcactttgggaggccgaggtgggcagattgctggaagtcaggagttcaagaccagcctggccaacatggtaaaaccccatctctattaaaaatgcaaaaattagccaggcatagtggtgcatgcctgtaatcccggctactttggaggctgaggcacaagaatcacttgaatccagcaggcagaggttgcagtgagcctgagatcgaacgactgcattccagcctgggcgacagagcgagactctgtctaaaaaaaaataaataagtaaataaatgaaagtgtcactgatgccaactgtccataagacagtcaaggcagaccatcaagaaatggctgcaagaatattctacattcaaagacatctcaaaagtaactatctattcacataaacagtttaatacaactcaatccaattcttgccaattctaaacaagaaaagactggcataaaatataaatcttctccccaatcaaggccaacaatgaaattaaagaaaaaaaactctcacatgagtacagtctgtattatttatagaaacaactttcatatccatttcaagttacttaaattcaaaacttgctaataatagaaacagtatgtaagtgtcactaaaaccggaaactgctgcaaaataacagaatatttcagagtcaaattcaaggatctgtgttgtaaaatatttcgtctttgttactctatcagcatttaatttataaaaagtgaacatgttctactttggttaattaaccactaacataagtcaaataatgaatgctgctgcctcctaaattaatcagaatagattaacagaatcctttgagcttattgtttcagaacaaatttcaaagccaccacagtaactttctggaagttaagaaagaggaaatgtgcttctcatgtcaacagcagagcagttttcaggagtcccattgtttcagtgcagggagctcagctgtcctggactgtcctgagtcaagacaggaagagctgtcagacttctggggctgatcactcaagcatgactggacaagaccagaagcagcagatgtttaaagggtgatgggaaacaactatgcaaagaaggaaacactagtaacttgaagagttaccaaagcctcactctgttgacataatttgcaatcaataaatacgttttaataaaagtctgcaagtttgtacgatgggagcctctctctccctgctgctgtggcccctacccaactcctcccaataacagcagtactattttacaacccctagagcaggtcttaaaatgtaagagagattttaaaaccatcatttctgtccaagaatgactattctggcatagtgacgcaaagaaaagccattcagataaacaagaaacctattctccaagaacaaggaattggattagactagtaatatctaataacatctaagcccaatgatgcaaacaaaacaacacaacaggaatgtgtactatactatgggccaaatgccgcaaacagaaaccttctccttgctaagactcttcggtctcttcttacataaagactccaggcaattactgtccccaaaatagctttctttccaaaatgaccattaaccaaatgcccctcttgcggagttacagaagaggatagatgtcaagtgttccatcaagtggaacaagaactaaaatatggaaccttgaaaccacaactgctgatataccaaggatgaatcccaataaaccagaaaactcactcaaaagtttagttttccatctccacagcatgggttatcccagcagtctcaaaggctcacacctgtttcactggctcagctttgccgtcaacgggagatgtggagatatgctgcaatatcgttccagtttcaataacataccacgctggactaatgccttctgtgtggctttttttttcttttttaagaatatcaaaatgctaggggcttgagagagatttaaacatttcacctggtacaagtagcattaggactttcaaaaataccaaattgttcacatcacaatgtttcacttaacgctacactttacgagctggccatcaaaatcctcttctacttcatacctactctcctcatttatcactttctggtttctaaggtactaaagtattgaaaaagaaaaacacaatgctcaggttctggaaggcctctcggaggatggggcctggggacagatggaggacccctttataccaaaggcaagaggactagcagtcccaagtggagagggaggactgcttcagagttcaacagaggtccatcgtttctgatctgcaaatcagctcagaaataaaagagactcttcctgccaaaaaaaatacaaagcaagaaggggagcaatgagaaatccaacagggtcaaacaccttgaaagggggcaagctgtagcttgctgctactgctaggagggcagcagtgttgagtttcctagccgggtggctcccacgttctggacacggcaccatgaggaggtctaggcagaaagtagctcatagggaagaggcaaggctcacaaagagaaggatcatcagcagtgcacttcagtcaaagttggtgcaattgaattttgagcagctgaaggtccagagacctccaggaatggagaagtacaaagcagccagaggcccagaacaggaaacctggtgccatacttactgggcaggccagccaggtagggcgcccaagagggatgatggaaaggacagacagcagagtggagactagcagatgatacattctgggtggctataaataagaacgctttagaccataaaggccaattgttttataattttactagtcttgttactttcataaaactatagcaaaaactactaaaaatatatatattttttgagacagagtctcactctatcgcccaggctagagtgaggtggctcgatcttggctcactgcaacctccacctcccaggtccaagcaattctcatacctcagcctcctgagtagctgagatatttttacagctgtgtgccaccacgccaggctaatttttgcattcttagtagagacagggtctcatgatgttggtcaggctggtctcgagttccgggcctcaagtgatccacccgccttgacctcccaaagtgctgagattacagacgtgagccaccgcactcagccctattagaaattttttgtttctacagctccataagtaaattagagctctgccagtagattaaatgaaataaatcactacacttgaattctcacaaactgtgacatctgtatcctcacccatcaacacaacctgtatattacctatgcattactcttccaaactgggtaaaccagaatgtgcaatccccatcttattcaatcttcatgctactctgatctccaatctccagcactccgcttactaaattccagacaaactaattgaggacctgtatcctgatcatgatttaaaaaaaacaacttcatcaaaactcaggacagagaaagttgctctcagctcactgtacaatttgttttgtgaactagacctgcaatatctttgaaggagttaccttaaattattaaaagcaaaagacccatctatatctcaaagttccagaacaaagcttttcactttctgaatagcagcgaagcagaaaagacaacttaaaccagaagggtgccctgattactacattcctcccaaacatgttctgaatatctccaattctcctctcctgcctcttggaggaacacaaccagaactacagcatcaggttaaccttgtcttgaatgtaagctcctgaagatctaaatattttgtctcacactttgtctttctgcaatacttagcacagtcaggaaaccagacttttaataactaaaacagaatttaaattactccctcactttttccagtttcaataatcccaatccctattttccaatcctttacactttattgcttcacagtgatggcaggcccctattgtcttcccaagaaatggtaaaggcgtgtacaggaggcatttctgggtctcacatgatcaaacataattaaaggtatatggtttctagtaccaaaccaataagcaatcacttcacagcctatataagataataattatgtttataacaccattaaaacatcaactatgcctcaagaataaagggaagcattttgttttgggggcttttttgttttgttttgtttctgagacagggtctcactctgtcacccacattggagtgcagtggcgtgatcattgcttactgcagcctcaaactcccaggctcaggtgatggccccacctcagcctcccgaatagctgggaccataggcacatgtcaccacgcctggctaatttttgttggttttttttatagagacagggtctccctatgttgcccaggctggtctcgaactcctgggatcaagtgatccgcccacaatggcctcacaaagtgctagaattacaggcatgagccaccgtgtccagcctaaggaaatattttggaattagactatttaaaatctaagactcaaaggggagaagtattgaacctcacatcatcctgccactggaaaacagttcacttccagggtttcaagcaccaatttacaatcattccaggatgtcactgtcttcttcctaggtaatctaaaactgcagcaaagaaaagttcttaccactgtagactgtgctttaaaaatatttcaagttcacacttcaactatggtaaaatgtaagtaatacatattacttacttaatacctattacttactaaacataccaacctatggcttagttctatttataccaaaggtaaagggaaaaaaaatagttttattgtttgctattttttcaaatgggagttaattacgtaaagaatcctctggcttgcagtaaatctaccccaatataatgtaacaaaaaaatcaggactttggatccttctctgacatccttctgtgctccttaaatagatatttcattggctttcaagtgctcaacttttggctctgagataatttgcatttagttaagacattttaagccaccctgtcaccattatagagaactgcctaatgaggtccccttagacgaggtctgatttgacaaccacccacaattttaagactaaatttaatactaaaatgatccaaggttttctaatttctctgaatttgaaaggatttggtgaatgccattccctaaagatggggcagtggggaggtcatatttcattaaggaatatcttcagtttgaaacacttccaagtcaactatataattatcaagtgaacagaaaatcagataaactcacaatttcacctctgactccttgaacacagcatctccctccttgaaaagttaatggatagtgaacaaaaagacccacctgatcacttctatgctcttctggagtttaagggggccaatgggggcagcgggagccaagcaaaagtcagccaggatggaggaagaactgaagagcaggaaggagtcgcaggtgctcaagagctggccagagaatgcaaagcgctggaatctaaccccttcatttcagggttaaggaaactgaggcccagggagacaaagttatttgcccagtcacaaggccaggaagtgatgggaaacaggcccaggttacctaaatctagttactgaaagagcagaatgcatggacattaattaacaaaaacaaacgttcaacctgccacagtggggagcacctttctgtgcgttcacctcacacttttctccaataaagagcacaagatgaaggcaggggagaaggcgtcagggagcgagggttctggataatacacacgggcttctctcctccatgccatctacaggagattctgttttagagacagggtcttgctctgacacccaggctggaatgcagtggtacaatcatggctcacttgcagcttccaactcctaggctcaagctatcctcttgcctcagcctcccaagtagctaggactacaggtgcaagccaccaagccagctaatttcttttattttttctagagacaaggtctcactatgttgcccagactagtctcaaacttctgggctcaagcgaccctcctactttgacctcccaaagtgctgagattataggtatgagccaccgcaccagcatacagtagactttatatatgcttatttggttttgatttttatacttttatgagaactaagatggaatctatccctccttttccctcacaaaaggaacatcctaatagcttcacattgcaaatgaaatacaacgtaaacagaaaaaactgagatggagcgattaggaggtttaataagtcagactttgctagaaatgcaaaacagccctgatgctaaacaggtacacttggacttttgttctctaaagcctagctttaaaagagcttgacacactttgtaaagaataaagcctccattctataagcctaaccagtaagttggagggggactgagtaccataaaaatcagtgcttctcatacttgaacatacaagggatcatcagggatctatctatcctgtcaaaacgcagatcctcgttcagtattgtctgggggtgggcctgagatttcctggtgatactgatgtcaatggtccatgctacaattttatctaaactgacacatgataattaaacataattatggagtactgagtaacactatgatacatgtatacagtgtataatgatcaaatcagggtaaaacggggcaggggtggtaatatttcataaaggggcatattctgttagaagggccactaagacaactataaaattatcaagtgaacagtaacagaaattcaaataaattcacaatttcctctgattccttgaacacagaatctccatccttgaacggttaacaaaatgacccaccctgatcacttctatgctcttctgagcatatcacctcaaacatttgtcatttctctgtgggccataaaatacaggaggtattttatgaccacatttcaaagtatgtttatttcacaatttggactgctggctacaaacagtgacatgtgagtctctttccctctggttagtcgtaggccctgtagaaatgtcagctaattttttttttttttttttttgcgggaaggaggtaggagtcaagtccaataaataagtgtaaaaacattcagtacatggcatggttatttaatacaacagaatttgctctgagttggaaggacaggggtttcagcctatgtgtttatgatacaacaaagggacttttaggctgataaagttatggaacatgagacttcagtcttcttattaaatggccaaatggaccaagtgtttgcatgaaagctaatctttcctttcatgaaaaggaaattaaacccacttgctcccgaatgggatgattttcaggagtcctgagccatgttctggcagaaagctggggtctgtgaccataaagcaggactgctgtcatccaggcagataattattatcaggaacgcctaacattgcttctttctgcagtttcatgtgccttggtgaagatgtaagctttctgaagactaccttgcatacagcctttgtgggctactccatatatgagaaatgaaattttaaaactagctttaggaagagatgtagctttggagatcctgactcaaatccctgccagttattagttacatgatcttgggcaaattacttaagctttctctttctcaactataaaaggaggacaacagatacctagtgaggttccagtgagatcctgtacttgtgcccagccagtgagcatctagggttaggattatcactgtcaccatcagggccatccttctgcaactgtcttactgtactaaatatacacgtcactaagcacgctctgttctcaatgaaaacggaagttccatgccagcaacatctaattttcaaacatcactgataactcttgatttctgcatacacatctaagcactgtagtatactgaaaagaaagaccgtaaatcatatgcacaaccattctctccactgtccccagtgccatctcatcactgatcctcccccgccttcctaccacctcctctcatcctcattctgtcaaaagacagcaaggtaccctaccccaaaggggaggaagacagcgcctaaatcctcattccacctccctacatcaagaagaatgtgtccttcatgagccagcagcaacttatctccccaagcatggtctaataagaatggactgctcttttgctgtcagtttagtattgatcacacgggggagcctatttactaaaagcaaaaaactacaaaaccgctgtttacagacagttacacgtgattaatgctttaatatctagtctttccttatacattctcaatcaatcaccaccataaccccagaatgtattaggactattataattattattaccacagataaagacaaaggctattggagtttgttgccagagatgagttcctggtcacccagccttggagcctgttctcttattttctaaggcagacatcttcccaataagagggtagtgggaacacaaaaacatctttattatcagaatcacctatgtaattcaactacacacatttctgacagagcccaaggcccttttttatcagtccgagctgcatccctaactgtgatcaggacctgtaaaggacagcccaccacctggaggcccttagtcatggcttcaacaaggtcctgtgccaaaatggtaaatggcaatgctgagtcaaggttggagcctaaaccctacatcttcccccggtgaagggtcctgccctagaaagaactttcccctaagtctcttctgccaattcagggcagaaagtaatggtcagccttggaacgctgctgactcgcaccctgggagcttctaaggggccctgttcaccagggtgaaggcgcctctctctcactgcccacacacccttctccagctcaaagggccttttcaaagggattagaggtgtgcttcaaaatcttcattaagtaatttaataatgtgtgtgtccagtacttcagtccccaaacagaaaggaatgtgcccaggagccggcaggcagagccacattcttcctgttaacctgttatggtggcgggcggtgctcgggccaagtcctcagaggctttcccagcctcagagaatcgggctctcgttttcaatttccaacttggacttttctcagtttcaaatcataggctaacagaggttgaagactgacagggaataaaatcctctaccaagtcaagactgtgataggcaaaacggaacaagcgaatgaaagaggccccagttcagaggagggaaatggaaatctactcatggttaagtgagcagacagaacaccggcgaaactggctcttcaggtggaatatggcacagggtagcaactttgtcaagtatgatgcattaaatacagtaacaaatgggcaggatggtagtttttagttcagtttttggggcttttctgttgatgttgttactgtttctttaaagaaggggcattcacacaaataaatttctttccctaaaattctgattgaattcatgaccatttctgatatattatttgcaagagggaacaaaaacaaacgaatgaacaaaaacaaactaatgaaatcaaccagtcttttccactagcacaaaaaaaaaatcacacaacatcaaaactttaaaacacaagttgatactttcttgaatagattctttcaggaatatttacatatatgtggttcacaaggtcactacccacccaaatttgtggggtggtttttatgagctaagttcttgttttgcccttcctaatgtcccatctctgaacctgaatacacccccagctctgctctactcccagtgtggttctgaggccagcagcactggcatcactaggagctggttacaaatgcaggaccttgggcttcagcccagacctactaaatcagaactgacaagatccccaggtgattaatatatacactgaagtttgccatctcgcaaaatggtttattatttcattttcacagctcaattaagaaagtcttccttagtcatatgtcttcctactaagtaccatttatggatgcttctctggtaactagatgacttgggaaaataaatcttgtttgttgtatgaaacacttttaagataaagttctttttgatatgtacaatgttttgggggaagggagaattgcttattccattaagagctttctacaacacaccctactgccattatttctattgatcaaaaatttacactataaacaagaaaaaaaaaaaacaagtatatccacattaaaccaaagataccaactgaacaaaacatggcaataaaagtcaagtgaaaaacacgctgaaaaaaaaaaaaagcttccaaggtctgtttgcagagttagtcttgtcagggaagaatttatctactatacaattcagaatgagagcgactgcttctgtctaaaagagatgggatttcccccacatgccaggccttgccctcagcattttatatactacactatataatttaagcctcaccacagccttacacgattggcactgttttactgaggtctaatttacacacagccaaaggctcaaatgggctgtgtacagctggacgaagttttgtacgtggaccctgtgaaaccaccactcacaggtactgtcacttactagcacttatgttcgttttgtttattgaaatttatacaaatggaatcgtgtggcatgtgtctttgtgagcctggcttttttcattgagtggttctagatagggtgggtacggaaaagggatgccctgctaggagcacagaaaagtgtaaaatacctcaaagggagggagtgcccctcctccggcctcggaggggtggtagaggaatctgtaggaaaggaagctggaaagatgggcctttcagatggtgagtggtcttgatgcccagcaaaaggatttagattttatcctcaaagtagcagagtgtctgaagatgcttcaggaggtgaaatgttataattaaagtgatgtgtcatcttgcccacagcagagtgaaggaggaaactggaggcagcaagccgatgaaaagaccagtgtagtgacccaagtatgaaatgatgaaatggttccagccaaccaggggaagagaaagaggaaaactccaagaagcttcaactccatgctctactgtggaggcaacagagttgaactggagtttttcccactgacccagcgctgaaaactatcctcacctaaaaaattatggtaagtgctattcaaaacctgatgacttcaggaggagaaacccatttcaaagaggaagacaagttcaaggcaacagccagccaactggtccccactgagttgacaaattagaccaaagctcaggagaaaagatggagagaaatggacacgagaggtgaagaacaagatagctggaattaaatcggcctccagaaaccatctgtgtgtgtgtcaaggtgacaggctgaaccagtcagaaggcatcaccacggaagtgcacaggggctttaccttggggggcactcacatagattagtaaaaggagtctgcaacatgacaggaagagcgtaggagtatgataaaaatcaaagactgtagcattagcaacaattcctgccaattaggcatccaaaatttaaagacgccctttctcaactccaactactgcaaatgctgagtcagattctcccaaaaaacacaatatttcagaagcttcattaactccttccagcatcttcaaagtattactttgcaaattactgtctgggtatgctaaacttagtaaattactgtttgggtagactaaatagtagttcagtactctgaaagagttaatggagcttccaaactgtctaatttagtcctaaggtgattttgatagtcaagactctaactcgatttgcatattaccaattagaatttcaaggcaatccaataaactgggcattcaaaatttatgtccaaattggatctaacagacttttatttagacttcctaatcatcataaatcttagatgattacaaccaatcaacaggggtctttcctcaagcaatctactacaaattaaagctaaaaagtgatggaaaaacataaaacctgagatcagggtttgcagttaatgtatgtttggaaacatgagtctgggctatgactggtctgtcgaaaaccatcccacagccacagattattatacctcaatgccccccaccacccgttttctcttctttgcagccatcttccctttcatcagactacagtaacttctgccacatgacaaatttgttcattaaagcccagtctttgaaggatattaaatgagaattcctaagatgaggcacgtatctcttctctaaataaaaacaataaataacataaaaacaagaatttaactttggacttaaaggtgatttttatgtgctcaagtcactttccagttatgctgttaatagtattttacattattcactgactgaactttgttaatcaaaaacaagctggcaagctttatacatacattaaccagtggcttcaaaaagataacgcatagaaaacaaagtggaagcactgctaaaacagaagcagtcattttgtttaattaaaacaatatggctgactcttccctatttttcaaattttctctaatatttttaaattatacatacagatttaaacacgtatttgttctcaatccccaagcaaacctgaataaatcttctgaattgtccaatatactaaatattgatcctgcaatataatactttaaaaaatttctgttaaaattctcagtgattaaatgggttttttggtcacattggcacctttttagacacgtttctaaaagatgttgttcttgctttgttattcttttgaaaaatatagagcaatacctaagcatctttgtactagtactgttttaccactaatgtcttgatttgataaatactttgaaatggaaatatcaccaaagatcccagttcagacctattaattttaaaaaatagaattgtatctacattttcaaatgtttgcattttaaaaatacagtaactagaactctctagagaggtactatgttatcaataataatgaaattacatatgcatagctttcagagccaagaggcactagctgaaactacatgacatagaaagattcatgtaaaccttagtcccatcactaaagcaaaagacaagcattctggttttctcaatttattaatattttgagttccatcacagtagttttttactaactacaaattaagtagccaatctatgccttaattgcaggaataatatgcttaatatgctttccccctccctcactttctgaagatgaatctgagcaaaagaaatgtagcaagaacaaccatgtgacagtgaatctaaacatgttctatggcatttaaattagtcatttgcaagaaactaagccggctatccacagagaaattttcaaaaggaataggtatatgagataactaaaagctttcaaagaaaatgtttaaagtcttttctctttttccccagtctcacttttgaggacaagaaaattttaaaattcaaagcataaaactcattaataccgatcccttaggggattaaatgtggagggtgggggaagatacataatcaatgtacccgaaaaaaagaaagaaattcacataaacaatgtaaaagattatttcaaacatgaagggggagagatttatcttcacctgctaatacagcttaatgctcgtgtttttctacccaaggtcatttacattttttaaaatggttgttttaatttcattccaacacaatgcattctatctagatggcatgatttacaaaaccctgatacagcacctttcaacactacctgccaatcatttaaggcttttccaggatttgtgtcagagatttaggtataggttagcagcaaatccttcttagttgacacatgtgaagatggtcccaaatgcaaaacaaaacaaaacatactaccaagctcacctacctggtaagtcttctgcaagttacactaccataaaattagtagagttcaaggtcccaatccagaggcaacttcatgtaggatgagtgatggatggatgggaatgaacaccacacatgctctgctcatacactcactccctacgtcactccacaactaggccactaatgcagatctcaatctgacagagccatttcctcagttacaattcagggggctgccaatggtccttcaggtctctcccagcttacgatgcctgtaccgtgtatttccattttaggcttctctcaggacatgcttaagataaatcttattttattacagggtaatgaggagaaacaatatgtatcctaaagaaagtaggttagctatggcttttggcagtcaatgctcttaatgctgctattaggtggaaaggtgttatccaatctcaatccaatccaaaccagatggagaccctagttggcagatgaatccaaaaaaaaaaaaaaaaaaaaaggttgagttaaagcacaggattttaaatatatacatatattataaataaaaagtatgtataccttatatatgtgtgtgtgtctgtacatgtgtgtgtgtacatatatatgtattccttaaacatttgccttaaaaatatacaggaaactgtgcttgaggtacagcaaacctttgaaccaagatactctggctaggcttccattctttcttataaaccctaaacccacagtatattgtcaccacagatttacaatttgggtttctttcaagtgtaagaggaatccaactgaacccctttcatatcaatccaactacagagttcttcatggtttcccctaatcttacagggtctgactgcaactaatttatcagcagcttaagtctttcaaggggttcaacttagtttttcctaaagataattattttcacattcatatttaataactaactttttcttaggaaaacaattactactgcacaaacacatctgaaaaagcacaactgagtttcaagaaaactataactcaactactgtactagagcttagctttagcagtcagagtgccatatacaatcatgaagtgtgttttgtcaagggaattaagaactggggttgatgtggtgtgctggggaagcaaagatcaggtgagaaagctggagcagatgatggtgtcgccacagaaatttatcccgaacaattatgtgccaaaatggggcaaagactgggaaaactacagagtggctttttaactgtgtgatttatattgaatgtgacagaattagcctaaattttgcaatttccactaaggaaaaaaaaaaaagaagacaagacatgccacctagaagcactattaacactttaaatgtgtgtcacttgttcttacaagtcaatcttttgaaaaatctagatagtgatactgtatatgtatgtgcatgtacctacatgttatttaaagcatacatatgactgagtgcactcaactatctcataattagtctggtgtcagatctttttttttttttatcattcttgcctctggaataaaccatatgatctgtatgtggttctcttggtaggtttatcttcccatgtgctatttacacttatattagaatggattcatatgcattcagcccagaatcatattggcatcaggcaaggacacctagctaccagcatctatgaccaggcagacacatacacataatctatactacagagaactaactgaaaggtgatgctacttcatcacaagcctttctcggctggaagctttcttctttaaacatgccatgacaacaggagtctaaaccagacaactctatatttttttacctatttgtaaatattactgtcatccctaaaaagtcttatgtataagaatcacacactagattaagatgttatttttttctagacagaggccaaaagtgtattcatttaacattatagacagtaaaacagctatatgttaacatcctttctaaaattcaattggttcctattagacacaaaccctttcctctagttcccagcctcaggaatgcagattttgctatgaataataatttgttaaacgctatagaaacctggaatctttgtttccagaatttaaaaactggtacatatttgatttactgatttactaaaaataaaataaaattagtgatgttctttatcatttacttttaaaaacctgaatatatcatatatatgtatatgttgatatatataaaatacatataaatatatatttttagtcaatggtcatccaatcctcatttttagtcaccaaaaccacacactgcgtgggcaactctataataaaacacagttactaacaaatgtttatagaagtaaataaatagaaaaataaaattcttaaaattcactgctcgaccatatcattttttttcctgatcaaggaaaattccaggatattttgagagaattccagagtacctggagatgctctgttacaacactaagcaccccagcgctcacagttggtgcttaaaactttaacctaacagtattaccgtcagcattacacacacacatttcctactcgatagctccctactctcaaaaagaaatgatggggacatggctcccaattctccagccttaactccaatcacacgaatccaaccacactgtacttctcaattcctcccctttgtccaggctgctcctccccctgaatctcctctcaatctggcccaaaaatacagcctcagcctgttgaaattctacctaaactacagtgctcatcataggcgtgcactctgttttttcctggttccaacccaatggtgaccttttctagcccctaaacccccaaggtactcccttttccacctctctagtcagttgccagcagtacgtatgaatcagtagctacgtaagccctgaacctgcttggaggtgtggaaaactagtgtgtgaaagaaggccacaaattataccagtaatgctgctgacactaaccactaagagatacctcttatcagctgacaagtattgaaaagtagtaggtatgagcctaataatctagaaaacgtacatcgaccaagtaataatgcaaatatcaactaatctgggatgacaaaaaaaaaattataacaataatgtagtggaatttactgaaaggcttgttctacttaaccaaaatactgtagaataacaatttttccaaatgttatctagcaagataaagcaaatgtaaaaattgaagctcaaaataacctccaccactttagtgaccaaggtggttttaaacctatcaagttgacagttttccaaactgagtttctatcactcttcaacacagactacaccatatctctctcatcacccagagctatatagcctaaaacggactacttcagggaccagcaacatggttggttggtttctttctttctttttctttctttcttcttttctttagagatggagtctcactctgtcacccaggctggagtgcagtggcgcaatcttagctcactgcaacctctgcctcctagattcaagtgattctcctgtctcagcctcctgagtagctgggattacaggcacgtgccaccaccacacctggctaatttttgtatttttagtagagatggggtttcaccatgttggccaggctggcctcaaactcctgacctcaagtgatccgcccgcctcggcctcccaaaatgccaggattccaggtgtaagccaccgcgcccggccatgaaaagggggttttaagtgacagcacagcatgttattttctatggtggggctgggggagaggcagggtgccaaaagcgactgaggagggctgtaagagtgattgtccatactagacactacttgccagatgtcagcccatctcatgcccctctgctgtccctccatcctccccaagtcatagtgcagcctgcaggtccctgcaactcccacatccaacttcctcattgccattcctatctcatcacatccctgaccctgctttaaattcctcagtaacttcctttttctatcaggtaaagaccaaagtcatatcatgcaatgctctcagatctaaccctgtctgcctctgaagctttgtctcactttgcctttcccttcagactttgtagttaggcccccaaaaaatattgtgccacttcacccttcccagaaagctctctataagcccgcacatctgcccaacttctccccactcctcaatcaagaccagacccaggtttcttccaagtgagatctccctatgtctcccacgtggctcttctatgccttggttgggcctctggtacagaaggcacagtgcaattctgtttacacatctgtcttccagacaaaaaccggagggcgttgcaaccatgcttcctcgtgctacacccggagcgcctagcaaaatgctggggacacagcatcaaatgtctatgtcaatcttgcttggatgaacactcccaatcctctgaagcagaaagctgtccatcctaggcaataaatataagcaccagaaaaacatcattcttcttggatacactttcaggctagggaattgttcccctactaatttcccacttggggtttcttccttcaaccatttgttcctagagtgctttactataagtcaggcactgtactagatgggtgggagggagggagggaaataaagttatcagggagcttaaagcctataggggagattctataaccccaaacacagcattcgacagtcattactccacactatttagtattgtacacataggtaatacatctctatacactcaatgtttttacttaaccccatttgcctactaaagtcattctgttgccttgagcctacaccaacacaaaggtgagaatggaggtgccaataaatgaaacctgttatctacagataagaaatcaaacctcaattctagtggtagaaagaactaaggagacgggctagcccagtatcttcattttacagaacaaggggcccatgacagaaacaggttacatgaattgcctggggttcccccaattggtacactgctgaaacagattttgaacccagatctcttaagtcttacctcaattcacgtaccctctttcttgtcccttacccagctgttagtaacatgtctctcatggtgtgttacattcggtccaacatccatatgaaaaactgaactagtgtttcttggggcagaggaaatgacaaaagccaaaggcaataagacaccaccatataatctcataaccaaaagctaccctcagctgctaacatttttagcatttgtggtaggacagaattattggtcccaattcttcactccctggtaattgtatttctatggcctcttgtcggtaaagtacacttttctccttcttgattcaagagatgctatggctaatgggatgctagggaatctgatgctggcagagacttgaaacatactcatacagtcaggcttgccctcttgcacatgacactaccatgagaagaacttaccctagtcgctcaccttccagccaaggcctcaaagtgagacacatggagtaggctgctgcagggaatctcatacatgtgagcaagaaataaatacatacagttgcatgccactgagacttttggggttatttgttatggagcaaaagctaactgatacaatgtgttatccttcaagtcaaaaatgcatatttctccttgtctgtcactaatgtaacccctcagagtattagcttgttgttaaagtagcaatcaccttattctttttctattttacattttattgatttctccaggctatctttttttcagattctcttcagaaaagaacattgtctacaaattgaagtgtcatctccaaggcttttcctgattcttaaggtaggtattatataagagggtggcaacaaatgttatcctttcagtgtcacgtcacaaaatgcctcctttttccttcaaagcagtaaagtaagatttgtcatgatcatggttaatttattaaagataattttcagctcatatgatggatcctagagataggtgggaagggggtacgtgtatcttcactgcaggtactaaagatttttaaaagctgttttaaaaccttcagctgaaataaatgttaaaatacaatgacttttggtatttttaatgggcctccaaatcagggtaactttaaacaatgacattcaatgtaaatgtccttcaattgtgccattttcccattccagcacacagctcaatgtcattaaaactactcaaatttaattaattatcgttatcatttgtaatttttgaagctcagtagacctgaaataaaattacgtttggatgacaaaacatattatgcaataaagtcatctggagggtagaataccaaactgggagcctactgcttcttttttcttctgcttgccatgacaaggttaatttgtttgctttctttattcttccttctgttttacaaaggagaggcatacacttactttggaaaggatgtaattttttatatcagtctacactgtattaatatgcctagaatgtgtatagaattatgcatgagtatttgtaaatgtaagtctgtttactcaaaaccatagaaaatacaggtttcagtgcatccttcttttgatgtcaaaggagtatgtgattttctcaggaaaatgaaggctaatttcttcaattctggactgtagataattaggattgactataaaaacaagagttaaacatgtcttcctatttttgaaccaaggccagtagaatagcactgtcttcaaggaaaactttatttgcatatattcaaactcacgcctaaagaaattcttcagggtgggggggaaaaaaattcctcaaggcccaggattttaacctggagcccatggacagaactcaagggattcatgaccttggataggaaaaaacacatttttatgagccgctcattaaaattcagcattttttccaattacgaatgtaggcaacacatcacagtattggcagtacctgtgactttgacaccaatagaaatcggatgccttcacattacagttgctgtcaaaaactcaaaatattgtttattcatctccacctcaaaattatggtgacccgccactaaatattatttaatgtattgataaagaagcacatctattaccctacgacaattttcacaactgtattcgacgtaactgctttcctttgcaatcacatgtaatttaatattatgtaccctgcgacactgaggacacgctgcatccacctgccacaccctcactcctcagctgcccgtttttattaactaaggacatccggggtgctttttgtggaagcatgagcatactgtactgagggaagggagaggagataacaacctatttatatatgtctataacagtgaaattttaaaaaatggtaattatgatgaggcatctgtctatttggcaccatctaaaaccagcaagcaataattgtacaacaagggggtgtttagtgtgtgaggtttaggacattgtgccagaaaacctaaagcatccaagttgtaaaacattgtaataagcaggtaatcctaggcccagcgtccaagtttctgccctaacctgttccttatgattatgattttaaaacatcccagtgtcagcaggttcactgtgagtcagacctgaaataataaatggcttattttccatcctgatggaggaaatacatcatggctcattgtggctcacttaactgaggctgtttttacaggaaaatataaaaataactaagtcattctgccttaccatttttattttaaatttttttattaacaaagctctatactacaatccattttaaaaagaaaaagcatgtttcaatataggctataaaaacaatagctcacaaatatctagaaggaaaaataatataaactcagaaaattatgcttgtaaccaacgaataccctgctttgccaggataaccaattaaatgcattcactacatcaagataaactgctgcttatttaaatggtcaaccacatggtaatgctgttaaaagacagccaaaatcttctaccagtattcattaaggttgccaggccttaaaaaccacatgtatctatacacatacatctacataaattccagaatgcaaagtcttacttgttgcaaactctcaactgaacgtgaggagaaaagttgtatcttcatcaaaaataaatgcttattcagtggcatcaatactgcacataggctgtaaaactcatcgtgactgaggataaaatgagtgagcaatatattctcagaacaatgagttttgttctaccctgttacataaacaagttctatgtgacctcacggcttttagatatgatttatgacaccatgtcagaatgcaatcttatttgttacccaaaactgtgctagagtgctacccctatggtgggttcagacattatttaaaacaaacaaacaaataaacaaacttaagacagcaccactgtaaccaatacaaggttactaggtacacacagtgtgtatttcaggatatgaccaataaatttagaatcatatataaggtcctcagtgtgtaatacaaatttgaagataaaaatattcatcgcttctgctgatttcgtacattaaaacagttacgccataattctatcccatctccttgaaacagtgatgcagaggggaaccctgctagaggggttcacgtggacttaaatgcccattccctcctcacctgactcttcttgtgcccctaaacatggatggcatgatagggaaagaacacatctaaaacacacggaagctgtgtttgggagagaggacggtgctcagcactctctcacgagccctgttatttccctcctcccatcacagctacagtactgtcaacagtaaaatgtaaaaaccctaaaacctaggctgggcacagtggctcacgcctgtaaatcccagcacagtgggaggccaagttgagtggatcacttgagcccaggagttcaaaactaccctgggcaacatggcaaaaccccgtctctactgaaaatacaaaaaatgagccatgtgtggtggtgcatgcctttagtctcagccactgaggaggctgaggtgggaggtttgtttgagcccaggaggcgggggttgagccaagatcacgccactgcactccagcgtgggagacacagtgagaccctgtctcaataaataaataaacaaacaaataaaaataaaaataaaaactctactagagggctaggttttgccctgcctttttacaggcctactgaaaacaaggtcagtagactgaaagggccagcagaaaacacaatgactcaagggttacagttatccatcttccatttatcagctgtcatgccatagagaccttggatctccccaacaaaatccaggcttccccacctctcctacagggttctagaaagctcaaatggacagagcacagcaggcagacagtatatcacagacacagctacgaagataaagtgccatgtatgatggcaaaaatgttacagggtctccatgaaattatcaggatgacacctcaggtttttaacctaagaaaacagaagagacttgtgtgtgtgttacacatatgtacgtatacacacacgtgcgttcgcaagcatgcctaaggagatttctttcaaaaagaaggctggcccaacaatttcagtggccaagaaattttatcatcccaggcacaacatttcttgtttgcttgatgtcaattccatgtacagtagtccttccctgagctttcactttccacctttttgagttacctgcagtacaacacagtaagatattttgagagagagagaaaccacattcatctatcttttattacattatactgttattattggtctgttttattattagttattgttgttaatctcttactctgcctaatgtataactatcataggtatgtaggtatagggaaaaacgtagtatacacagggtctgatactatccagtttcaggcactcactgtgggtcctggaactatctccctcctataaaggaggactactgtgtatcggtttatctacaattttaatggcaacgttttaaaagaggaatgacccacaaactccactttccctgccctcgtattcctttcaccagcaagacagaggtgaagaattaaactttaatcagccacaatttgaagaaggctgtaagatgatctccagtatttgaaccttgaaatctgggtaaaaaagaacacctcatgcctgtaaaccccatctctccatcaggattatcacttggtcaataagagatagcaaagtcaaaagtgtcctctttttggaggtggtgtgtgtgttggagggcagggtctctgtaagaacagctataagtaaaagagatatggtgaaaggtcactagtctgtcatctctctcttcctgaggcacataaggatgtgacatagttacatgtggtttgcaagagggctcctccctttacaatctgcttctccgacacccctaatctaatcaatttttattttcagtttggtgtttaaaaaaaaaaaagttaccacacagaaaggactttaagtctgaaatgttaatcacatcaaagtctggaacttcaaagttgcagttcccacaccaagagcagctccggtccccatctgcagtttgagtgttaatctagatggtagtttctctgatttaagaccttgttttatgtgtacagggagtgtggccaagtcacaggcactacgaatttgaatttcctgactctcacttggtttagtggatgattacggcgtcagcatgtgcatttgaaacaggtccccaaagaggaagcacattcaggtcacttgaacaaacacaagcgtgagccacaccagagccctccagctgactgcctagcagcagttacacggtctcccatcaggaccctgtgaccagaactaccaggcagctttcatggaactgaagttggatcctcacggctggtaccattaaatggcttgtttttctaagaacctgtgaagagctttaacagacagaagaaagtaaatcagacctctccttaaaaagaaaaaataaagggtgaaaaaactagcactcaacccggtattttaactactggcagttgcctttcttctaccatgcaacacagtggtttccaaaggtattttccagaagttctggttcctgatttcagtggctactctatttcaggaataaggacaaaactcaatacagagacaaatgttggaaaagtcccagggaactaacctggcaccagcagttctgtgcaagtccacccggccaggccaggatgcatctaaaagccaaacagtttgctgtgtgcttgcttctcatcgtcttcgtctcctctagcagctggaaattttaaagctagatatgtttaaccaccaggaaacatgctgaccatgagctcagtcctcttcagaaagtcaagagcactgcagggaataggacctcttttcaaagtgtgattctgcaacacaatggcaccatatttaattcatctgaacattctacttagcaagagggacctacaggactcaaggtcactggagttgcaagcagcctgaaaacatggtcaatgacgtttcattttgtaaagaggaaaactaaggaactgaggggacagcaaatcttcacgtagaagattttgttactgagaacaacgccagcaactttctcacagtgcacagtggaagatctcttggccctgcagagaagaaagcacaaggatagtgatgctccccttatctggtggccagccttccaacccctcggcctctgaaacacttagactatttaaacaaatgtgaaccagaaagtcagggctaaaagaaaacaatgaaagccaagtgctaatccacagaactacagagcacagagatcctctcaaatcctcatccagggcccgctggatttaaactgtgtataaaataaggccagttacttaacacactttgttataaagtttctcctgaaaggctcatcccttcctatcttgaaaaccatgctgaagtagctaggaggcaaatcaatgtacacagtaagaggaagtctttgccaagctccagaagacatggcataggtgggtatgcaaaaaacccgaagttcccaatgatcactcccatcactccagtaaggcagaaaagcacacagtgaatgcagaggtagataaaatgcacattcatgcagcaaacaaccgctgagcacctaccaccgtgtgggttcaagataatgaacaaaacagaggatgcttgtccttgtggagcctctgctctatggtgggggagatggacaagaatacacactgggggtaggtggcaacaagtgctatgagaaataaagcagagggggccagacgcagtggctcacgcctgtaaccctagcactctgggaggccgaggcaggcggatcacctgaggtcaggagttggagaccagactggccaacatggtgaaaccccatctctactaaaaatacaatttaaccgggcatgggggtgcgcgcctataatcccagctacttgggaagctgaggcagaactgcttgaacccaggaggtggaggttgcagtgagccaagatcgcaccactgcactctgggtgacagagtgagactccatctcaaatacatacatacatacatacatacatacatacatacatacatacatacagcagaagggatggtgcatggcatataccgggcatgtgaggaggctgtgattatcaacaatgaggtcaaggaagactgctttgaaaaggtgacatctgagtgagcgaggtgaggtgaaggaagtagccagacagacatctggggaagagtgttccaaagagaggcaagggatggtgccaaagccccgaggcagaaggatgcatggcgtgaaaggaggccaagtgaccagagagacatgaaagagaggaaaatgacgtcaggagggctcggctgtaataaagagccttgcagtctgctgcgagaacctcagctttcatgctgagggaggtaggcagccagggcaagtttggagcagaggatccgtctggccttgctgagtacaggctgcaagagaagaaaggacagaagtaagaaaagcagttaggagacagagcaaccaacctgcagagaaactacaggggcttgaaccagacacggaagtggaaggggtaagaagtaaaggaacctggatatattttgaagataaagatgacagcactgctgataaaccggatgtgggataggaagggaaaggaaaaacgccttcttcctaaatctgaaagagctttagttacttggaatatttactcaaaatgaaaaacaagtatctttagctgagacaagaatatctgggaatgatagtaaggaggatttctttttaaatgaaaaaaaaaattaaaacgcaaaaaaagaacactgcacaccctggcacacaacaaaaaattaagtcagagagcgctgcaaagggactaatgtttaaagatgtatgaaggacagagaaaaaatttgaaagacaagaactaaaacaggtactctgaaaagttctgtaaaggaaatgagtctgaaggatgagacgatgctcatctaatgaacaagacaggaaaaaggatttcagaagaagagggaccatggagggccaaacgcatgtggagaagaatgagaagcccattggtaaactcacaggtagcagcagcgggagtggcctgaaaaggccatcatgagggattttatttattgctggaggtatcggaagctactatagggcagaataagactgaaatacaagagggagacgaagttgtgtttctctgcttaggacagagttgatctgtgaggctgcatgcaaggggtgtggagggaagaaggcagaataaaattaagacctgaagtagaccaaggaatgaaaagaaaaactgacactacatggcagtctagatccggagccagagcaaaagggacagatggagaaaggagcaaggaaccaggaaacaacgttctattgcaactcacttccagtgagcttctcggggctcctttttcaatggaaagccctcatgctttagaatctttatgctaacatgtgaatacatacaaaacctgcccacacccgccctactggatccaagtcactcgaaatagaaataactgaacagatatgtttaaatacgataccaaagtattaatttctgcatgaatttctaatgggataacagaagagaaatgacagtttagggaacaatctatccttgaccaataacaaaggtgaaaggccaggcacagtggctcacgcctgtaatcccagcactttgggaggccaaggcggacagatcacctgaggtcaggagttcgagaccagcctgaccaacatggagaagactcgcctctactaaaaatacaaaattagccggacgtggtggcacatgcctgtaatcccagctacctgggaggctgaggcaggagaatcacttgaacccaggaggcggaggttgtggtcacgccactgcactccagcctgggcaacaagagcaaaactccgtctcaaaaaaaaaaaaaagaaaggtgaaaggttactaagaatgtttactactaaaagagagaagggtgggaaatcatatcagaacccacattcttgtgaccaggtaatacgtccccagcatctaggagccagaaaaggaactcagtctcatctaatagagacacagagccacagtacacacgccttaataggtcagcactcctctcctaactatatttgggtgaaggaacaggtggacagaaggaataccaaacatgttggggggaaaaaaaatgacctgaaaataggaaaaaagatgtaagtaacaatgttgaacaataaataagaaggcaaaaactaacatgatatttcctttttaatttcagagattcctaaccaatgaaagcattaagtgttctgtacattgtttgtaatacaacaaatgagatgtatcacactggaaattctctgaagacaaggaaggaaaagctccagagtgcaagcctcaggtgatcagaaacaagaaatggagaagtccagatcccacacatacctcaggcctgatgcattcaccggcaaaacagaaatcaacatgtgacacgcttgccaaaatcacatcatctgccgttctagatatttcttccagcgtactgcaagacctgaaaactttttatttttttttggtgagacacggtcccagctctgtcacccaggctggagtgcagtggcgcaatctcagctcactgcaaccccgcctcccaggctcaagtgatcctcccacctcagcatccagagtagctgggacaacaggcatacgccacacaccctgctaatttttgtagagaaggggtttcaccatgttgcccaggatggtttcaaactcctggactcaagagatccacccatctcaccctacactcccctccaagagctgggattataggcatgagccatgacacctggccctgaaaactttaaatatacatgtagaataccaccaattcatactaaaatacccactcatctttcttcttccaagctcccaagagctgttccacagaacgggattgtattctggtggatgatttggctaagccgagtgatgagggcagagaggacaataattgttattttactgaacagcagagttatgaaaccaagaacagtacagtagttaaaactaagaaccctgaagaccaacaggcctggatttgagttgggaagagatggacagctctccaaaaaggcacaaacaattgaaggatggataccatggcatatgttaaaagcatattgaaaggaaaataagaaagccaggaatctcaggatgaatcagtctagatctagatcagatggtggtggtgacgaaaccttatctcaagaccgtaatcatttgtgaaaatgggagaagatggcagcaagagcatctccacagagaagaggcctgagaactcgatgaagattatcggcttatgagaggaccataatcttttaggctcccctagagaaataacatcagaagaactgcaacagtggttagatggggtcaacaaacaactagcatctcagcctgactcgagaaatggaacaaactggccggacaccgtgactcatgcctgtaatcccagcactttgggaggctgagtgggtggatcacgaggtctggagttcaagaccagcctggccaacatggtgaaaccccatctctactaaacagatataaaaaattagccgggtgtggtggcacatgcctgtaatacctaatcccagctactcaggaggctgaggcaggagaatcgcttgaatctgggaggcggagtttgcagtgagccgagatcatgccattgcactccagcctaggcagcaagagtgaaactccatctcaaaaaaataaaatgaaataaagaaatggaacaaattacagagactcagaagtccccagagaaagttcaaatgaatattctcttctagcatagttgaacacctttcggggcacaggaaatgcaactcaaagtggacaaaatgggaatcaaaattggagagctgtgagtcgaacaaactcgaacagtggagagtttcggtttagtttggaaatccacataaatcatgaaaatagaggatctgaaattcatggagattatacaaacattccactttcagatagtaacagagatcatattacaaataggcaacaaaggtcatctagtcctgtggctaggcgaacaagaagccaaacctcagtgaatttcaatggtggtagttccaacattctaaggactaggcttgcttcaagggggaaaaattcagctgaaggatctttctcaacagtaggaagattaaaaaatggaactgggggatcagctggcattcccagagctagtgcttcacgcactaatttcagtagtcacacaaaccagtcgggtggcagctaactcaggcaaagggaggcacaacagtttaaagcagcacatgtttgggaaaatggggctagatataatgttacagtgagaaatacaaaccaaagattagggccaataagatctactataagtagccgaagctgttcaccaattcagagacacagtggcactgtttgtcataattcacaaagggaaagtagaccagtacagcaaaccactagaagatctgtcaggaggagaggtataactcaagtctttttagagcaagatagagaacacagaggtactgcatataccccattctctaattcaagacttatgtcaagaataacagtagaagaagaatccagcagatcctcaactgctgtactacgacatccaacaatcacactggaccttcaagtgagaaggatccatcccggagaaaatagagatcaggacagtattgcaaacagaactcatccagagtagggctaacagaacatacagtcactattcaaagcaatagtgggggcttctgccgaatcatttctcgtttagagcggtcacgtattcaaacctatgttagtaccataattcttcctaggatttctgagaacgagcttgttgagccatcatcagtggctcttcggtcaatcttaaggcagattatgactgggtctggagaatctagtactctaagggagggttcaaccactagagagaagctctggttctccaagtcagagcttcagagaaatggtcagcatttaccagagatgcattgagaactgagtaaccttaggtacagttactgacagcagccagcacagggaacgggacaggcaggcccaaggagacagcactgaaatgcatggtgtaaatgagaccacccagcctcatacctgaaacagtgacaataggggtagcatgtagttgcaaaattcaaatgatttagtcaaactggaaaactactattcttccccttgctttttttttttttttttgagatggagtctcactcagccacccaggctggagtgcagtggtgcgatcttggctcactgcaatcaccgtctcccgggttcaagctattctcccatctcagcctcccgagtagctgggattacaggaacccgccatcatgcctggctgatttttgtattttagtagacatggggtttcaccatgttggccaggctggtcttcaactcctgacctcaggtgatccgcctgcctcggcctcccaaagtgctaggattacaggcaagagccaccacgcccgcctgaatacatgatttaaccaaagagcagactgacaatctttccacccagcgctagagcataacagtattgatagtgaaccaggtaaaatctgtagtgtttgtatcagtgaccacataactggaaacaagctcaggcaattaccttgcaggcatgaatttcatattcattgtactgaccgatggctctcagagaatttcacttgtccgatctgtcagcagcctgttttagggtccaacatagcaaacaatgggtaaaagtgatgggatctactcaaatattgtattttagtagaactgaatgttcaagcattgttttgctgagttacttgtgatgagctaactaggatgaaaaataacagattatatatagtttgaactatttttgcgtgctttttaaaacttgttataaagaggaaatttatataacatttaaaatacaaacattaaattatccagaaacacaaaataattaacattgctagaaccaaataacctctaaaatgtttttattttggtaattttctcatgctaagcacttttgtatctgcacaattcaataggttaaaaaccaatcttcttttccttaatagcacagcagactttactttcaagtttcataggcttagtatttatgtctagacatttctatctaaataagcttttcattaactttttacgaataataccttttcatgagagtatgtggctgaatgtgtgctatacatgttatttgaaatgttaaatttaatatacagcatatcatatatgtatagttatataattctaaggttaaaatattcagtgtacaagtttggttcttatttaagcttttgggctaatactgcgtatggcacaatgtttaatactggcaagatcatctcagagagaaaagggattcggatataattttaatatagagataatttactgaaacatctctgacaatctgacttattagaaagcaagcaatatataatactgaacaagtatttattcagtaatggaaaatttaggacatacaggttatttaacttgtgttcagcctttctgtaacttttttgaaagtgcaaacaattctttggattattaaataaggtatacaatatgcatggtttctcaaatttagtgttaaaatctaaaaaaagtctataaagaatcgattgcatagataatactttaagttcacttggaggctaaatatttccaatgaaaacaaaaacctttaagagaatgcagtttatataaatacaaagtatgcattgatgatctatttctaccaataaacattaaaacaaacaaaccaaaaaatctcagatttcacaactgtaggaagagctagacttacagagatgtttatttaaccaccaccactaccttcaggtgaactggctgcatctccacaacattctgagacatcaactttgaaatgatagctcactgaaggagtttcttttctagcaaaaggcaaatctgtctttcccaagccaaagaaaatccaaacaaaaatcaccaagcctcctgcctgcttgacataattccaccattgcctgagcctgtgcaaaatggggccaataatgacttgcttcaggcttgtcatgatgagatagtacacagaaaacacacagctctatgcctggcataaaatggtttttcaaagttaaactattttttatcattattcctcagattccaatcccctaaaaattattttccaagtttactcctattttgctcattccctaaggatcactataagtaagcgtggaagaagaagagtgtcctgctctgtaagtaagaaacaactccagacaagagattccttaaggtattatctgcttccagggtgtgattcaaaggtttaagcccatgccaatcatttcatgactgcaagtctgctatggcaacacacttatacagccaaattctcagcagaatcaattccttttatcaaaggtactattaaatcaaaacaaaaccacctgatttgcatttattcacctttctctaagttatccaatgggaatgtttaaaaaaaaaaaaggaatacagttaaaggggaaagaaaaacaaaactggcttctaaaaaataacacagccattatattgagatgcatttcgctccaggccataaaacatttatcccttggtaaggctgctctatgaacacaggctttttttttccaaaagtgacacgggggtccgtgtggggcattagttattactgttgctgactattatgaaaatcaacttttttcctctgcatttacgtctgtgtgtatcacacgacaacccagaagacagatcggtaaacttgccaacaacaagaaataaaataagcaataaaatcaacaacagaattaaattacactgacaagttagaatgctgggtttgaaaatcaacataaaattggaagttcaacagttttttttctttttaatggggaaatgtgtttggaggcaggcacagaaatgtttgctgactgtgtcatatgaaccactgtaagtgacaaaaaggtgtggtagtcttaggctgcattaacaaatgtacaatttccagatcacaggaaattaaagtctcactacactcaaaactggccacactatatctggagaactagatgagttctttattaacacactttaagaaggacattgataaatcagagcgcatcccataatgagaaaggggtccagttctggggaccatggtcaagaagttccccaggccaggcatggtggctcacgcctgtaatcccaacactttgggaagctgaggcaggaggagtttgagaccagcctgggcaacaaagtgagacaccatctcttaaaaaaaaaaaaaaaaattttttttttttttaattagccaggcacggtggcgcacgcctgtagtcccagctacttgggaagctgaggtgggaggatggcttgagcccaggagtttgaggctgtaatgagctgtgatcaaaccactgctcttcagcctgggtgacagcatgagattgtctcaataaataaaaataagaaataaaagactcctaatctctggagataaacaaagcctagacgaccctctgcagaagaagccaaaaggagatatgtggcctaatcccaattctaagatttcatgcacctggggactattatcatctcatagcctgatagtaccaccaacagaaaacaggccaggaatgtgatcaaagctcttaaaaactaatactgcttaaaaaaaaaaaaaaaaaaaaaagatcactcaggacattcctaagagcaaagagaaatatgttactacaggagtttcatgaaaacttacccagaaattgcagcaatgctttgctttataacatctaaaaattgtgcttgcctatctcatccaatcacttataacatgtgttgtaagtgatcagttctgattcataccacatgataagaacagcactctgactaaagggggtggggtgggaaccccagggccagagcactcatctcatcataaactaaatggtagctagccaggcaacttggcggggggaggtgacagatgacactgcataggaatttaatactttttaaagtttatcaagtccactcaaattatttttttggaaattttgagagtatatggaatcaaccactcccccaacctggaatcatttttggtaagcatgtaatggaacatggaattacaattttcaaggagagtatttcgagtaatgaaaataactgtctcactgggaattatgcatatagttttttatgtatataacacagaatatttctggaaatccatcagatagaaaatttaacaatatacattgcaatattaaaatctgttttctacagctctttgccaaccaatcataaaacatggttttggatgctaggtaaaagtaacaaaaagtctagtaatataaaaagttttgattggataaatgtaagtcagtagaaatgaaagtactttttattgtgagagattaagtggattattagtgaagacaaaagtccctaacactttaatgcaatggaattaccacactcagttgagaaaaacacaaattaacatattatgttaatctggattcaacgtggggaaaaaagaggaaataaaagcattatctaactaccacaaatgtggcatgttgataatttattgtgacctagaatatgacatgcacaaatatactaatgattgagtactaaattcatcatccaaaaactctaactcaagggtctctttctccacctaaagaaaataaaaataaatatgggtatcaacaattttatactgcttgtggtctccaatgctgatggattacttttcagcatatccagcaaattctaagtactgctcagtttaagtgtccacaatttcccactgttaacactgaagacagcaagagcagaaaattcgtatgtggcccggtagaaaattctgctataaaacagaggttttttttacaataatccgttattagcttagactcaattacaaagagagtctaggctgctctgcctttggagtagtcattctttattcctttattttaataaacttgctttcactttaaaaaaaaaaaaaaagtttaattttccacagggtgggaatgtgattatatgatcttgtaattttacataaggcaataagcactctaaaatattttaggtataagtcagaggaaaacatggcatatgataggtaatgactttcctcttaccatgtgaaagcaggccttggcacacacattttcaaaagcaatccaaggcagtatagtttatcaatcctactttatagattcttaaattcaaacaaaagagttttaaattatgaaccaggtccctgaccagggaccaggataaagtcatctttgtcttcactacattttattttatcttattttatttattttttgagtcaaggtcttgctatgttgcccaggctggtcatgaactcctggatcaagccaacctcccacctcagcctcccaaagtgctgggattacaggtgtgaaccaccatgcccagccttactttttatttaaaacctaaggctatttaagaaaacatctaatatatgacatattctatttaaatagaacaacagaataacaaatcctagccagcagacattctgataagaggatatatttttaactaattccacttctcaaaacattgtaaaagcttaaaaggattcaatattcacaagtctcctgacaaagcaaccaagtaaggcactggtctcaggcagttgtgatgttttaaaataagtgataaacagtttacaacactgaaagcctaatgacctctaaagctgtcctgctggtgagacagctcatgccccacactgaaatgttctctagtcagacttcataaaagaaagtatagatgcatttttgcattccagaggttactgcatgttactaaacatgcctaaattttctttcctatatagaagattcagaggtaactccttgcacttgataaactgttacacacctacagaaatgataactaggctacataacaaagttggtaagttccaccaatacctcccctttcaaaacccgtccttaaagtgaacgtctccatatgctctctcattggggaaagatgcctagtttcacttgcaaagacactggcccatgaacttccctaaactaggtccatcagacactgccccgatgataccagtctcaattccttaaagctagagaacaaacattcctccatctaaagctatgaacaagtacccaagggtgactttattggcaactgccctacatgcactgaatttcagtctggccactgggtcccaaactcctaaaatttcacaacctttttctaagtagttaccatcagggctatcacagtgtgcagaaagaagaaatgtatgcataacaattcctggacatacaacagccctttcccagttttatctttaaacctccctgctctttatttaattttccagaacacaagcattagaacactgcaatcacctttgcttcttttccaggtccatccctatccaagcaattttaccaacaattcccccaaccacggcttccaccaacctaagcctgtgggaatcagagcacaaagtccactgcctccaacttcctccccaccacctgtatccacctcactcacaactgttcatttttcccaaacccagatagatcacattcacacacctgctaaaacctcaaaacccttggacactttaaaaatagttggtctggcttcttccaaggtgtcaatggcatgaaagactgagaaatgctgaggaaatgttcaaagcaaaggtaactcaagaaaggtaatgctcaaatgcactgtataaccctgtactggattctgtatgaggagaaaaatgtccttgctactaaggagattattaggagactgacaaaactggaacatgaaataaaaaatactgtattaacaataactttcctggccaagcgtggtggctcatgcctgtaatcccagcactttgggaagccaaggtgggcaggtcatctgaggtcgggagttcgagaccagcctggccagcatggtgaaaccccatctctactaaaaacaccaaaattagccaggcatggtggcaggcgtctgtaatcccagctactcgggaagctgagacaggagaatcgcttgaacccgggaggcagaggttgcagtgagccaagatcgcgccattgcactccagcctgggcaacagagtgatactccggctaaaaaaaaaaaaaaacaaacaaacaacagtaactttcctgaatgtgaatgctgtactacagatccataatagactattcttgttctctggaaatacacattgaagcattaaggaatacagcagcatcactcataaaagctacccttgactgggttggcaggggaaccgtgtgtgtgtgcacaaatctatgtacctacaaatacagacatatacacatgtatacatatatacatacataaaggatgcaagcaaattatcaaaatgtcaaaaactggtgaatctgggtaacgggtacataaaagtttttttttattcttcaaacttaccacttgaaaaaatttcaaaataaaaaattttttttaaaaagcccttcttgggggcaggagtaaacttttcagggtgatgaataatgttcgttctcgagcgtggtgatgtttcacaagcatacccatgtcaaaacttaccaaactgtacattctaaatatgtgcagattatacatcagctattcctcaaaagagctgtttacacacacacacacacacacacacacacacacaccccgtgagggtttcagtcttcccgggcactctcgcaacttgtctggacaaaccttgtcactgtacaaccccctcatccctttctgcacttttcacccttcccctccccagtcccaaagaactcaccatgctacctgagtccgtcctcttcagcttttttgttcacgctactaccacttcctagaaaatgtatagtggaatcgactcatacgatctagacccaaatctcagttgcaccaagccacactctcaaagccaagtttcctcatctgtgaaatggggacatggccaacctactgacagaagcagatgagacctggtgggaggtaacaatggtatagaagtactttgaaataatacaaaacactactgggaatcattaccttcacacatccaaagccctgcaggctcaaccttcctctccaggttgtcccccaggcacctgctctgaaacagactcacctctcactcccctgaatcaaacagtaactgtactactacagacaaactgtgagaccacctatggcctaccatgtatatttttacaagtgcatctcgggaataaaatacacttacccaaactcccaaagagcaggacctgtgggtgtcccacctttatgtgccagcccaaagccttgttcattcatcctaagacctcaatacttgaattcaacaagggattgaactaggattggatcacaatggttgaagaggcccaaccaacaaatggcaatgaatagttaaaacaacatgactttttttttttttttcagacagagtttcactcttgttgcccaggctggagtgcagtggtgcaatctcggcccactgcaacctccgcctcccgggttcaagctattctcctgcctcagcctcccgagtagctgggattacaggcatgcgccaccacgcccagctaattttgtatttttagtagagatggggtttctccatgttggtcaggctggtctcgaactcccaacctcaggtgatctgcccgcctcggcctcccaaggtgctgggattacaggcgtgagccactgcacccagccaaacaacatgacttttgaactgcctaagatttcacagcctctagaggtatatcaagtgcagactgactatcccttatccaaaatgattggaaccagaagcattttggactttggattttttcagattttggaacatttgcattaaacttaccagttaagcatccctaatccaaaaatccaaaaccctccactgagcatttcctttgagcatcatgttgccactcaagaagtttcagattttggagcatttaggattttagattttcagattaggaatattcaacctgcatatggacataagacccatccaccaatggcccttgcttcacatgctcagtgggttgtgggcttcggctaaaacctgggaggagatcacagattcaaagtctccttgtggggcactgtgttctgtaagaggaagctacagttgagaaggttcaaggcaactaaatatgtgctagtaaagtgagcataaatcattctgaaaccagaggacctacaacaagtagcctggtttgggcttttcttgtgctcagcagtcaagtgataagaacctttaactacattacatctaacatttttaatttacaaaataatgcccaccacttcaaaaaaattgatagtattatatcttctacctttctatgtccaaaaaataagggaaggaggtttaaaatataagtagctaaaccaggaactccagtcctgccacaatgctaggcatatttgttctaggaattcaagtcctgctaatttaaacagcaaggggaactgaaactcttgagaatctctgattatacagaaaatctcggtgtcgtttacacacagggcaagccaaggggatccttctaaacagtctggggctgtttgcttttgttcttctttttgttcccactgaaaagcaaaaatcatttgtcaacatggaaaaaccagcctggtgcagtagctcacgcctgtaatcctagcatgctgggaggccaaggtggcagattacctgaggtcaggagttgaagaccagcctggccaacatggtgaaaccccgtgtccactaaaaatacaaaaatgtagccaggtgcagtggcgcgcgcctgtaatcccagctactcggaaggctgaggcaggataattgcttgaacccaagaggtggaggttggggtgggccgagatcgcgccactgcactccagactgggcgtgggagcaaaacttctcaaaaaaaaaaaaggaaaaaccaggaaaagcttgtcacttaatgactggcctggcaaatagggaaagagcctaaaactatttttcccttcccatactgtgaagactacaagctttgccaacaccactcctcaacaccactctgtcatttttctttgtctaaatctttttaatttcttaaatgggaaggaagttgccttaaagtataataccaagattcccgcagggcaccactctgcaggaatgtggttcagaaaccaagaatcaaggggcaatgcctccatacaggtgaggattttcccaccccaaagaggcttactaaagttaggggcaattttccacctaacataaattatgttgtggggtggataagtgagaaagaataaagccgttatgaccaatgaggaaaaatgaaatggatataaaaacattattgccaaggtctttgttccagagttctcaatcattcagggccaagagaggctggacttagagtcctgcagggtggagtggcagcattgtggaggagggatccctgcgaaaagtatttatgctgcaacttttcagcataaccaaagcagaccaacaactagagcttaagtttagggccgcattccataaactatgactgtgacctcatggcatataccaaaatcaactcaaaagaatcaaagacctaaatgtaagaactaatacattaaactcttagaagaaaacatagggataaatctttccgatcttggattaggcaatggtttcttagacatgacaccaaaagcacaagctacaaaagaaaaaaaaatagatactttggacttcatcaaaattaagaacatttttgcttcaaaggacaccaccgtttgtacatccatattcacagcagtactattcacaacacccaaaaggtgtccattgagggatgaatggataaacaaaatgtgatatatacatagaatagagtaggacacaagttacaacatggatggaccttgaagacattgtgctaagtgaaataaaccagtcacaaaataggattccactcctataaaggacctaaagtagtcaaattcatagagacagaaagtagaatggtggctgtcaaaagcctgaagaaggaggaaatgcgaagttattgtttaacagacacaaagttacagttttgcaagatgaaaagagttctgaagatggatggtgattacaatgggttggcataacaaaatgaaagtacttaatgtcacggaacagtacgttttaaaacggttaagatagtgtattttatgtatattttaccacaaattttaaaaaaataggacactacctccaaaaaaaatgaaaaaacccagcagggcatggtggctcatgactgtaatcccagcactttgggaggccatggcaggtggatcacgaggtcaggagatggagaccatcctggctaacacagtgaaaccccatctctactaaaaatacaaaaaattagccaggtgtggtggcacatgcctgtagtcccagctactcaggaggctgagacaggagaatagcttgaacctgggaggcagaggtagcagtgagccagtatcacgccactgcactccagcctgggtgacacagcgagactccgtctcaaaaacaaaacacaaaaaccccacagaatgggagcaattatttgtaaatcatatatataagggattagtacctagaatatatgaagaattcttaaaactcagtactaaaaggacaaataacacaatttaacaatgggcaaagggaccacttgagccccggagttcgagaccagcctggacaacatggcaaaaccccatctccactaaaaacacaaaaattagccaggggtggtggtgggcacccgtaatcctagctacttgggaggctgaggcacgaatatctcttgagcccgggaggcggaggttgcagtgagctgagatagtgccattgtactacagcctgagcgacagagcaagactccatttcaaaaaaagaaaagaaaaaaaaagagccgggcacagtggctcatgcctgtaatcccagcactttgggaggctgaggcaggcagactacctgatgtcaggagttcaagaccagcctggccaacatggtgaaaccctgtctctactaaaaataaaaaaaaattagctgggcatagtggtgcatgcctgtaatcccagctacttgggaggctgaggcaggagaatcacttgaatccgagctgaagttgtgccattgcaaaagagtgaaactccatctcaaaaaaaaaaaaaaaggaaaagaaaaaaaaagggcgaaggatctgagtagatatctctccaaagaagatatacaaatagccaataagcatataaaaagatgcttaacattatttagcatcagaaaaatggaaaacaaaattacagtgataccacttcacacccactagaacggctaaaataaacaagacaataacaagtgtcatcaaggttgtagagagatgagaatactcatacctttcatggtaggaatgtaaaatggtgcagccacttttcagcagtttgacagttcctcaaaaggtcgaacaaacagttcttatggcccaagccatttcattcctaggtatatacccaaaccaagagaaatgaaacatacatatatgcacataaaaaaactatacatgaataatcaaaacattattaataacagcaataattttgaaatgtggggaggttttgaaattatttaaaatcaactgataaatggataaaatatactatttccatacaatggcatattaattggtaataaaaaggaatgatactgatacatgctaccacgggaataaacctcgaaaatgttatgctaagtcaaagaagccagtcaaaggagatcacatattgtaaaatgataccatttatacaaaatgttcacaacaggcaaatccataaacacagagagtaaatgcaggttagggagatatgggaagaatggggagtgactggtagtagatttctttagggatgataaaaatgaaaattgtggtgatagttgcccaaactcttgcaaatacactaaaaactattgaattgtactctttaagtgggtaaactgttatgtgaattagatctcaataaagctattattaaaaatagaatgtagatttctttatccatttcatactaaaagatacatagtcacagtaactttataaatggccaaggaaagaattcccaagactccttatgctcaagtatagaaactcaactttcctcaccaaaggcacacatcagtagaaatgcatgctattcctattttgccaagcacccaggttcatcaaaataaacttatgaattactgtacctagtaaagcactcactatcagggttggaaactgaattatgggaagtttcatacctattctctggatgaggcactttacaatctagtaactgacaacagttcttcaacatcaaactgttagcccacatgacaggtatatgacagggtaccaggactgtgtgattttacagtaaaatgtaaagaagtttccctttgctaataaaactgcccacgacaaattccctttagtttttcccaatgataccaaaaagccttgctttgtgttggactaatctgcaatagagaactcaacaatttaactggttcatatccacacaactgcatacaagaaaatgtaattattacaccttgctgtatagacagtatcaaatctcacttaggcattaacaaatgaacactcccacattcaataaactaaacacaaacctaagaagctgcagaatacacacaatttaagtcactccaagtgtattagtaagaaaagtgagctagggcaacacagaccccatttctacaaaaaaaatttaaaaataagcacctgggaggcttaaggcagggcaatcacttcagcctgggaggccaaggctgtagtgagccatcatcatgccactgcattccagcctgggcagcagggcaagaccctgtctcgacaacaacaaaaaaagaaagcaacaaaggtggctttagtactttttttttttttttagacggagtcttgctctgtcgcccaggctggagcgcagtggcgcaatctcagcttactgcaacctccacctcctgggctcaagcaattctccttcctcagccccgagtagctgggattacaggtgcccaccaccccgcccagctaatttttgtatttttagtagagatagggtttcaccatgttggccaggctggtctcgaactcctgacctcatggatccacccacctcagcctcccaaagtgctgggattacagacatgagccaccgtgtccagccccaatttttaaaaacaaaacaaacaaccctctacaatttcaacatcaatttagcatcattcattaaaatctaaacctctaaacccaactcatatcatttacaattcataagcaatcatttatataaaaatctacctggtaaggcatatggcattgttctttattgcctgaaacaaagtattagatatcagacaaagaaatcgtaatacctagttcttcattaaccaaaaaaatttttgaaaaatactggttcccattcactgtttattcctcctacgaagaaacacaggagtaaatttaagataaattttttgctatatgctactaagtctacaagtaatgctgtaattctgcagcatcacagaatcattacaagcttaacatttaggggaaaaaaaaactgttcctgataaagaacactttaacccacgaaggttaaggacttttaaggacttaatttccagtttaatactgcatccatggggaccaggtagaagcactgtttacatcactgagtcagttttcaaaatatcatcatcctggtcagttttgcttttactcagctttataatctgcttgtcaaacaaataacctgctaagactacaatgaaaatattttcattaccacgagtctggaagagtatttttacagaggaaaattgagatgtcatgtctgggcaatcccttaagctaaatttctcacctctaatcactgccctctacagtcaataaggctgatgccttgtgcaggaaaggcctctggatggtcaggcacaccactgaggagagtgagtcctctcccctccactgagggcctgccctgcccacttctggggacgtgacagaggtcccagccatcaggatgagctgtactctacctgctgcccctccctggggaccagatgcatgcatgtgacagacccacagtggcgcccatctgtaaaaaccagtgggagccagcactgtggctcaccctgtaatcccagccctttgggaggctgaggcaggcggatcacctgaggtcgggagttcgaaactagcctggccaacatgatgaaaccctgtctgtactaaaaatacaaatattagccaggcgtggcatggtgcggtacacctgtagtcccaactacttgggaggcggaggcaggagaatcgcttgaacctgggaggcggaggttgcagtgaactcagatctcaccaccctactccaacctgggccacagagcgagattccatcaaaaaaaaaacaaaaaacaaaaaacaaaatggtggggtctgttaaacatttgccacacaagctgtacaacctcaaacaaggtagggtcctctacctctctgggtctccatttcctgacctgtaaaatgttgatgatacttacaccatgaaaggctactgtaagaataaaataatgggctgggcccagtggctcatgcctgtaatctcagcactctgggaggccaatatgagaggactgcttgaggccaggagttcaataccagcctggtcgatatagcaagatcccatttctatttttcaaaaacttttttttttttttttttttgagacagagtttcactctttgttgcccaggctggagtgcagtggcacaatcccagctcactgcaacctccacctcctgggttcaaatgattctcccgtctcagcctcccaagtagctgagattacaggcatgcaccaccacacccagctgacttttgtatttttagtagctggtctcaaactcctgacctcaggtgattcacccgccttggactcccaaagtgctgggattacaggcgtgagccaccacacctggccaaaaaataataataatattgttttaaaagaaggaaataacaagaagcctagcacaatacctggtggagtacaagtgctaggctgaataaactactgtaattataaacagtgacttttcctgaatactatgcgctaggtactgttctttaggcaccttaccatgtattattaatttatgtagctctcataacaacccttgatcattattgcaccaacttacaaatgaggaaactgaggcatgaagattaagaacttcattcacaagtggaggaaggttggattcaaacttgacagaaagataccccaactcaacactgtgacagcctttctggtggcagtggcaattgatcccatgtaaaaagcttatggccgagcgcggtggctcacgtctgtaatctcagcactttgggagtgccaaggcaggcggatcaggaggtcaggagattgaggccatcctggctaacacggtgaaaccccgtctctactaaaaatacaaaaaattagccgggcatggtgacacgtgcctgtagtcccagctactcaggaggctgaggcaggagaatagcttgaacccgggaggcggaggttgcagtgagccaagatcgtgccactgcactccagcctgggcaacagagtgagactccatcacaaaaaaaaaaaaaaaaaaaaaaaaaggttacaataggtcctgctgggatttcaccctcaaccttacgtcttcctagctatcaaattttaaccaactcaaaaaatgtcagccttctattttctgctttctatatataatctgtacttcaccaaagtaatgataataatagctaccatttataaaacacttcctacacagcaaacgctactctagaacacattttatgttttgttcaattctcacaacaacctataagagttactatttacattcttcacacgagtaaagagcagcacaggaggtcaactgcccaagtgataaagttggtaagcactgaaggcagaactccacccaggcagtgtgaccggcaaaccgaagcacttacgcactctactatactgacttcctcagcaactactcactttatgggaataactggttatttagataagcaatactatacagaactgcagaaaaagttcatgtttatctgtattacagatgagactaagatactggaggcaccacacttagggtcatttgcaagctgtagtacacattttactgccaacagtccactactgagttaacagtgatatgtctacccacttaaaagtttttgtattttaaaaaattcttgaaatttggtttttctgtcagtagacttcagtggcagaaaggctggaatgctgtgaaggttctttctgtttctaaatttaggaacagcaaggattggtttagggtcagtttagtacaatgacagcagtgaaccagatcatttaatttaaggacctagtaatttaaaaggatgcactagaaaaacatgtcaagccagatgagaacctctggcatcaccatcatcaccataaggagataacttatagaggaacgttgaagtgatgtaaggaagacattatatgaaagaatacatttttgcttctccaacaaaaaaaaaagctaaaatttgtcatttttaaatgtctgtttcattcccattgtgtgtgagaaactaaatattaagatgtttcctgggaccagaaaggaaaagtaaatagaattctgcccttaaaagcttacagtccaatgagatttgggggcgagagactaactcacaaaaagttccaagagagagcacacctgttaaggggggaatcaaaggaaacagagaaatcccattcaattggggaggaaatcaagacaacaagcttcacaaaaaaggcagcaaaataggcagtctgggaggaggaggagggggcctaaggtttcagaaggtggcaatggtcctaggaaaatacatgcccactcacgacagtggtgagaagtggtcatcagaaggatgggcactgtattcatactgtgatgaggcactgaaggcagtagaaacttcagaccatcactggaagttctgaaatggaaggaaggggggcagggcagcgcaccacctctgtaactccagaacagtcactaaggccaggcacggtggctcacgcctataatccaagcactttgggaggccaatgcgggtggatcacctgacgtcaggagttcgagaccagcctgaccaacatggtaaaaccccgtctctactaaaaatacaaaaattagccaggtgtggtggtgcgtgcctgtaatcccagctacttgggaggctgaggcaggagaatcgcttgaacccgggagcagggggttgcagtgagctgagatcagatagtgccactgcactccagcctgggcaacaagagggaaactctgtctttaaaaaaaaaaacaacaacagttactaagacaatgaaaagggaagcagggatatggagaaggttcaagagccagcagagtgactcatctcttcagaggtcacaagcctcagggctgatggaataggaggtcagaccctctgacagtctaaccctgcttggccctaccacagggtcgcctgtcagtagtccagagccctacacgtcattcttctagttttaggtgcagtaaataaaaacactagtaactaagttaggaattctctcagttttttattccaatagttcaaaatcactcactaagcaacaaaggcattttcatgcaggaaaaaaataaactaattttgtctagagcagggagggtttcacaacttcagcactactgacacacatagtggccagcactactggtcagataattctctgttatgggaggtcggtcctgtgctttgcacggtgtttagcagcacccctgatctctaatcactagatgccagtagcaacacatccccacccaagctgtgacaacaaaagatgtttcttgaattgccaaatgtcagagggaccagctgagaaccactagcccagtctttagcagaggaagaatttagacctaattagaagttttttcctttctcccttctatctgaaaaatcttcgaaaataaaacgactgagaacgggagagagcaacctttgccttatgtggcaaacccaatccctcaatcctcacgacaatcttagcaagtgctatcctcattatacatgtgagaaaacctatccttaaatgttaatttgtccaaggttaagttaaacaagcttgaacggatttgtgacaatactcaaggttctaaacactacagaacctctgcccccacagggccatagattccactccttgaataaaacaaacattaaaaactctagataatcctacactaaaatagcacaaatcctgtccatctattaggaaccaattactcaagaaaaagctaaagggccacacacttcatgcaagcatcatatgtaaagggaattaaaagaattgctttaggtcactgtgatttcttttaaaggataaggaaagggaaagggagggacgatgaacattatttggaagcagagtcctaagccaagcaatgtctggctctgaaggtagccctggttaccactgcctctgaactacactacactctctctctctaagtatcgtccaaagcaaaaccaaaagactttctcaatgagggcgctcctgggcgctattctgctcatctgatgatccagttagaagggcggctttagcatcccccaagccctgagtctcaggacctcagtctggagcaggtcacttcgcttctcttcacctcagtttcctgtgcatgcaatagagacagtacctaatgggaaggactgacctgttcttagtaaaatgtggatgaaagcttaaggatttctttttgtcctcgtcccttaactaaagtatcagtagccttcctgaagcttaagctcaccccaagaacaaagtattttctgtccaaacaggtcagtgtttgttatttcttttgttgttgttgttgttgttgttgttgttgttgttgttgtttgagacagagtttttgctctgtttcccaggctggagtgcaatggcacaatctcggcttactgcaacctctgcctcctgggttcaagccattctcctgcctcagcctcccaagtagctgcgattacaggcacctgccaccatacccggctgatttttgtatttttagtagagacaagatttcaccatgttggccaggctggtctcaaactcttgacctcaagtgatccacccgccttggccctccaaagtgctaggattacaggcgtgagccatcgtgcccggccagtgtttgttatttctatgtgccaaccccacagcaacaacaaggacaagtttccattccccgtaaaaggaggttcttttcctccgtcttctaggcagtatgtgtagggggtgacagagccaacagtgaagccaactaaatagagccttcctatccatctggtgaggaaaccacaggcaactcctcttcaccacaccctgagccacgacagggttacttggtcaactcctcccaaccgctcattaatcatcaccacaaacacacctgaattattctccttagagaacaattcactaatactttgacataaatctcattatatctcattatatatatcatatatatatatatcattatatatttttcatctttaagagtctagttaactagctggatgagccagtaagacttctaccataggattgtcagtatgtgcattaattgtttagattctgttaattaactgattatttagccgttaattttattttactttagtatttccagtttcaaatttaagtcctagtttttttctccaaaattccaaagataattattctctttgctgtagcaaactgaagtgattaagagtcacagacctaggttaaaaacccactgacagctgggtgcggtggctcacacctgtaatcccagcaactttgggaggccgaagcaggcagatcacttgaggtcaggagttcaagaccagcctggccaacatggtaaaaccctatctccactaaaaatgtaaaaattagcagggcatggtggcgcatacttgtaatcccagctacttgggaggctgaggtgagaggaccacttgaacctaggaggcagaggttgcagtgaaccaagatcacaccattgcactccagcctgggagacacagcaatactccatctcaaaaaataaataaataaataaatacacattggcatcttgagtccatttactgtgtaacattcaagaaattactcaacttcgtgtctcagtttcctcatatacaaattggggatagtgggaatatctacattatatgtttatgagactaaaataaaaggcatttatagcagtgcctgccacagtaagcacacaataaatatcagcttcttttttgtagctagtgtaacttcactgctttgaaaaacaggtctaattctatagatttttttcacattcttaagaagtgctaggatatgtagcagatgcaaccaaaccccaatctagacatacagtcagcgaatgtcctctcaaaaaatgggcattccctcaaccagtgtacttccctcaatcagtctgtcttcacttttgcaccggcaactatactccaaaaaggtatctctcatgcctgtcaccacatataaatgtaaatttcagtttcagtggaaatttacatctatacatccagactatcagatgacagatataagcttggcaaacttaccctttggaatcctaacatgatcagctcagtcctgtctcactgcctatcccataaaagaccctctaaagtttaattccagccctctgttcttccctttaacagcataaataggctgggcagggtggctcatgcctgtaatcccaggactctggaaggccaaggcaggtagattgcctgagctcaggagttcgaaaccagcctgggcaacatggcaaaacaccgtctctaccaaaaatacaaaaaagtagtctaccatggtggcgtgcacctgtgtccgagctacttcagaggctgaagtgggaggactgcttgagcctagaaggtgaagccgagactgtgccactacacttcaacctggatgagacagagtgagatcctctcccaaaaataaaaaatacaaataatctcaagtttgacttgcttgaatccaaaattctctcaaggaggagagcctgaaaaccacaaacagcattttcatttcaaaattgttaatgtttctattaaaagtgtttgttacttaaaatgtaatacaggaccgggcgtggtggctcatgcctataatcctagcactttgggaggccaaagcaggtggatcatttgaggtcaggagtttgagaccagcctggccaacatggtgaaaccccgtctctactaaaaatacaaaaattagccaggtgtgatggcaggcacctgtaatcccagctactcaggacactgaggtgggagaattgcttgaacccgggaggcagatgatgcagtgagtcaagatcgctccactgtactccagcctgggtgacaaagtgagactccgtctcaaaaagaaaaaaaaaaaaaaaagaaaagaagatacatatgtataacttacccgtatttatacactccaaatacaacccactgcaaactctgggtgtatttcctcccgagtacagctatacagtagagcctaagatacttcacataattgaaatcagttgatatacaattttatattccactttctcatgctgccaggttatttccccatcccatcagaagttcttccaaagcacaaaaacaatataagtctgccagagcacccttatcaaacttgctacacaattactaggaatgctaggaaagataggtctaaaggttttgattctttctttggttctgatcttatgtttttatgtaaaaatattccatataatcctaatgtccgtaatttaaaaaaaaaagaaaaagaaaaccccagaatctcaggtgtgctaagctttaagtccaagtattttggctaatgctattgctgtataatacagcataattacacagctccttcctttgagcacctcaacttgtcctacaagtacttcccagcagtatcattatccccattttacagatgacgatgctagtaccgcagtgatgtgacttgtctaaataggaattatctggttaccaatgcagaaacagaaccaaaaactcctaatatttactgcaaaattacagatctaagttaggctcatgagtgcattataaagagcaaatgctagagggaattctgatcattctgacgtgaccccaacgtgagttttggaatactgtagtgatctaaagacatcctcccagggcatgccagtaaatatatctaaccagcaccttttgtccagtgatctcgaagcaagttttgcagacactagcactggatggcccattatcatgctccaaaattacaggtgggaaaactgagacaaaggaaattgaaacacatgtccccaacaatctgcgattagcacaggactagactcctcctctcacctcaccgcaccccaaggggagccaagtaggcaaagcttccatgtggactgacaaggagagtgaggactttactgcctctaacagaaaggaaaaatttactaggagagaaaagtagggtgggagaatgaaaggaggaccgattagaagccagagatagagtaaaagccaaatctaaccagagccagagaaaaaaaatcacaatgttaagacctgcacgtgagtccggtgggatataccaggtcacacatacaatgatggctcaggaacttctaaagtgtttttcaggagcttagaggccttggtattggacatcccagttatacaattcccggtttgattgggtcaaacctctaaactctcaacatataaaatgtctttgggattattcacccaaaacacagagaatggcagtattctctcccatcctcattcaagcacaaaagcgaaaccaccctgagaatttaactccttttactaatgttaagagacttctccatccagtccatggtctcatattctctaagccagaagttaaaattaagaacttcagaatgtgaaggcagccaacactactcatctcaaagttactaatcttagcattcaacacagatgaggcaggaaggctgcagaatttgctaaaccagactaaaccagactactgctggcgacagagtcgagacaacactgaaaacacaaaggcatttagctcaatgacaacagctggtgacatgcacatctagaatactgaaatggctatgacttcttacctcacaccttggtatttctgcatgagtttgtagttctctcctcccaaaagtcaaatatgagttaatgacatgtcacagtaggaaaaggattgggtaggtgcagtttcagtggaaatttacatctatatatccagactatcagctgccagaaaaactgtttccctccccttccctgctcattttaaaggtcctatttaccagaacactatgaaggtagtaaaactatggtaagacaaacacatacttacatattttcagtttaaaaggtgaaagtacacagaggtaacttccatttagctcactcccctaagtcattctccttgtggatttcctctttacaggccttaaggtgacttgcatcatgttcacgcccagggtgaagtgtatcatcaccacctgcaaatatttctaaatgggatcagttctattaataacaatgactatttctaaaggcagtaataagtaaaacagggttgttgtagcaaacttaaaactcacaccagcaaccagcaatgacctttaaagaaacttttcatctaattaaagttagagaaatttattcaagtcaaatattttaaatgagggggccgaaaatgagaaggaaagcaaagaagagatgaaaaactagggaaggggagtaggaagtgatcaaaaagtactcatttttaatatcagccatttagatgtgcaccctcaaaagtcatggcactggccgggtgcagtggctgacacctgtaatcccagcactttgggaggccaaggcagctggagtttgagaccagcctgacaaacatggagaaatcctgtctctactaaaaatacaaaactagccgggcatggtggcgcttgctgtaatcccagctactccggtgaggctgaggcaggagaattgcttgaacccaagaggcagaggttgtgatgagcctagatcacgccactgcactctagcctgggcaacaagagggaaactccgtctcaaaaaaaaaaaaaaaagtcatggcactctccatttagtgaataattgagaacagaacagatagactccccacaatctacaattttaattagtctatgatggatatcagccttagatgggaaataaaaaaattaatgaacaaaaagcaagcctattaattgattatttgaggggtgtgaaggaattgtggttttcttttttaaagcaaaagttgacttctgtgacctttttttttttttttttgagatggagtctcgctctgtcatccaggctggagtgctaatttttgtatttttactagagatggggtttcaccatattggccaggctggtctcaaactcctgactttgtgatctgcccacctcagcctcccaaagtgctgggattacaagtgttggtgccgtgagctgcgcccagccaactactgtgacttctaaaaggtgaatattataaaattctagcttaaccaatttccctccgcttcatcgaattttggacatttgaacttcataacaattcatttttgttttgtttcgttttgttttgagacggagtctggctctgtctccagggtggagtgcagtggcgcaatctcagctcactacaaccaccgcctcccgggttaatgagattcccctgcttcagcctcccaagtagccgggattacagacatgtgccaccacgcccagctaattttttgtattttagtaaagacagggtttcaccatgtcggccagggtggtctcgatctcctgacctcaagtgatccacctgcctcagcctcccaaaatgctgggattacaggcgtgagccaccgcgcccggcctgaacttcgtaacaattcaaaagggatgttggggcccaggacacactaccccaaaatatgactgtaggagatcagaatatgccaccccaaaatatacttccttggcatattttgagctggttattctgtgaaactgcagacaccagagtagacaagaaaagctgtccttttgtaaaagaaatttgcatccataaaggaagtctacattagtaaagtatctgtactaggattaggactgctccagacaacttttattacctgagagactttatccccaagagcaagacaatctttattcaccatataattcttcccctcatcctcctttaacttgtgtggccaccaccccaccaaaaacctcaaaccctaattcttttcttagctcagtatacaatataagcttcaatcatgcaacctgcattacattttgtgggactcttgtgcaaacataagtataaataaaatgacattttctcctgttagagtctaccatgtgtcaatttatttatttcttcccctcccctgcccagagatggaatcttgctctgtcacctaggcgggagtgcagtggcgtgatctcagctcactgcagcctccacttcctgggttcaagcaattctcatgccttagcctcccaaatagctgggattacagccgtgcaccaccacatctggctagtttttgtatttttagtggagatggagtttcaccatgttggtcaggctgcactccaactcctgagctcaagtgagccaccagcctcagcgtcccagagtgctaggatcacaggcatgagccaccgcgcccagctatctagtgtcaatttaaatcatggcccagcccaaagaacctagaaggatggggggaagccatttttccctgctatatagcttctggtgcccaatgtggagcatccttcactggctggaacactactagctccaggactgttccagctgcaggatcctgagaccctgacaaaacgccagctgtagctaagactttttaccacattgggctcccacatctatgcctgcagagtctggtcaaagcaagagtggtaagagtctctttgtcttttcccctttatctgtataatccccattaacttatagctgaggatgctctataagtttcaatcatctgactcttcttcgagtcaccagtgcataagaaaatacaattttttttttatcttgttagtctgccttatgtcaatttaattattggctcagtcaaagaacctacagtagaggaaagccatattgtgttcccctacagggataattattgatggaggtgctgattacattcaggaaacagaagcacactcataaacttttagttggtagcaacagaacactcccttcctcaggtcaaaatacacaccggctaagagttcccttttgtagctcttcccaactgttgatactctgtactgataatactagtaaaggcatcacaaaaagttctttccaccatgtatacttagatgcaaaacagttcaaaaacccaaaaatgtcaaactagtcaaaaaataaatccaaattaaaaaatgcaaaaactaaatatgattgttagcattttcttattattgtgcactattttcataggctcaggcttccataaaaagcatgtgcattcaactatacacagcagaaataaaatcattaatactttcttagtgcattccaattttacttttttcctgtcttcctctgccgaaggagccaaaatgtgtatttccccacactatcacaggaaacaaaacaagggaattccacctaaattgaaggatgtcaaattcccaggcatagccaagcaggatgtcaaaggtcatgccccatatctgaccagcccaaaatactattaatatatttatagctagaatgaataaccataaatccaaaagctttagcctgatgaaagatagaaggggcattaaaaattaagttttctaagcctacatggatatgctgtcctagtaacattcaggttcatttgcacaataaacatgatctaacaagtcattatgctctaatcaacagccgttgatgtgatgtgccttgtgcaggtctgcgggaaagtggctgctaacttgtttcaggccagagtaacaagatagcaacctgagagagcagggacgtcccctggagaagtaggcttttgtgcaaaaagcccatcacaaaccttaaggtttaataaaagtcaatgtcattttaagtgagtctcagcaagccacacagaaacaagcctcatagggcacatgactaagtggaaaggggttgtcttcatttcaaatccaaggagtgtattcacacagttaaggatcacagacaattctgtcttgaaaagaatccctctgatgcattactctacaatctgaagtgttttaagttctcattttatctctctgacttaattacttcttcctcccaataccctttaaaatcaattctctaaaaaaatggggggtggggagtataaatgaggcttaattggaggcccccaagttgtcaatcatgacagaattgatgacttctgtggatgaaagtgttttccttttcccttcttgccataaacacaggcggaagtcatggttagtctaagaaacataaccatcaacagtttgtctttgattaaaatgtgtccctattttcatcgcaaaggaaattattaagtagggtcctcctatatgttcagcattttacatgacccaagatcatttacatcgttcaatgagatcacagagcacaataattattttaatttttttcttaaaaatataatgtataaggcatacaatcaaattaggtaataaattcagaaattgactcacttcaaacatataccctccaattgtgaggaatgagaaattcaccataaattatgagctccatctgtactgatatattcccttcattttattccacattccccacattcttcacctctagttcagaataaagcaatcacaccaaagaatgcaatggcacaaactttaacattcaaactattacaggaaaggggtcccaatccagacctcaaatgacagttcttggatctcccacaaggaagaattctggacgagtccctagagtaaagtgaaagcaagtttattaggaaagtaaagtaataaaagaatggctactccgtagacaaagcagcccaagggctgctgattgcccatttttatggctatttcttgatgatatgctaaacgaggggtggattattcatgcctcccctttttagactatatatatagagtaacttcctgactttgccacagcacttgtaaactgtcatggggcttgtgggagtgtggcagtgagaacaaccagaggtcactctcgtggccatctttgttttggtgggttttagctggcttctttactgcaacctgttttaccagcaaggtctttatgacctgtatcttgtgctgaccaactatctcatccagtgagttagaatgccttaaccgtctgggaatgcagcccagtaggtctcagcctcattttacccagctcctattcaaaatggagttgctctggttcacacgcctcttgacaaaactactttttaagaggtttgaatctcaattaagctgaacagattaagaatgtttatttctgagttaggcaccaaaggaaggacagtaggctaaaaagagatcacaaagaagggcagtgacaccctgagggtccactcctcaagcacagggacaggccgattccaagaccaacctaaacactcaagagcaggcaggtaattattgaagcctgtgacaatcatgctttttaaattgttattttaataatctggattctgctcttgtttagctttggtttttgttgttgttaattgttgttgttttttgagatggagtctcactctgttacccaggctggagtgcagtggcgcaatcttggctcactgcaacctctgcctcctggattcaagcaattgtcctgcctcagcctcccgagtagctgggactacaggcatgcaccaccatgcccagctaatttgtgtatttttagtagagactgggtttcaccacgttagccaggctgatctcaaactcctaacctcaagtgatctgctgacttcaagtgatccgccaacctcagcctcccaaagtgctggggttacaggtgtgagccaccacgcactgcctagtttttttggttttttgttttttgttttttgtttttgtttttttttaagaaacatggtcccagtgtgttgcccagcctggacttgaactcctgggctcaagggatcctctggcctcagccttgcgaatagacaagactacaggcacacagtactctctctgcctggatggactctgcttcctttttataaaaagtacgttctaggtacagttcagaacactgaaagtatcaaaatggcacttcaagaaatacaaagcaccttaaagaaatacccagaattactggaatataattccctaggagaaccactacagagcacagaggtcacagcagggaaagtatccactccaaaaccagaaaagaggatatcaataacatcaaaacatgcctaattacaggaatctttaaccctgataaatttccttagtatgaatttttttaattataccaaataacttcaagagaggaaaaaataaaacattttgatgacctctaaaatgtagtcatcaactgctaaatgtttaaaaatagtgttttatcatcatcagaaagacttcatgttaatacaaatacatgacatacaaatatacatctaaatatacattatatttataacataaatatacatctaaatatacatcatatttataatataaatataagattataaataaattcaggtcctacaaaattcattctatctcaaaatttcacaaattcaacaaactgctccaggcacaccggtaacagaagagactgggagtatgggaatctttcaaattcaacgtatgtaaatgtcataatgggccactgaagagaaaattaaatcctaaaaggttgaaggggagagaccaattcagtcatacagattgaagaactctcagggtaggatgatccacaggaagctttcccattcaccacatgtaaatttcatgatggcctacatacctacccatccagagagaaaagtttccaatgcaaccagcttggtgccaagtacacaaacaaccccaatcgatatttacaagttttgcaagttcccctctcctccctccccactccccgtttaggaggtagccctgcagagagagagttctgctgcaaacagatgaggtaactgtaattcaagagagcccactttctcctgtattcaaatcacagtatagtatgaatgatggcaggctgaaacctactggtgtaacaaactggtgattcttttttttttttttttttgagttggagtctctgtcgcccaggctggagtgtagcggcaagatctccgctcactgcaacctctggctccccagggtccgccaacacgcctggctaatttttgcatttttagtaaacacgaggtttcgccatgtggcccaggctggtatcgaactcctaacctcaggttatccacccgcctaggcctcccaaagtactgggattacaggcgtgagccaccgtgccggcccaaactgatgattctgcaaattaaacctcacagctcatgaaggcacatcatctctgatacaaaattatggtgactgaacatgcctatcttgatgttacttatgcaactctatcctgaaggttagagaagagaaaaaacctttttcatgtcaaaatagaacaataaaatccacattgtgaccgttactacctcaagaatctgccaaaataagagcttctagctaaaccatatgcaaaccatttcctttgaccttgcttccaagcaaccaaaatgtctcaagtatttgacgtttacttgtatgaaccactcccaaatatttatgtggttattttgctttcaagctttgaaggacacaacatttacaagcctgggaattaggtgattcaattataatttctctttccaaactaaatttgaaatctaagtgcatttctctttttttttttcttcaagacaagagtattgctctgtcgcccaggctggagtgcagtggcacaatctcggctcactgtaacctccacctcctgggttcaagccattctcctgcctcagcctcccgagtagctgggattacagacacgcaccaccacgcctggctaatttttgtgtttttagtagaggcagggtttcaccatgttgccaggcttgtctcgaactcctaacctcatgatccacccgcttcagcctcccaaattgctgacattacaggcacgagccaccacgcccagcctctaaatgcatttcttttcaggtacagaatgcagggtgccttttcactctcacccttgccactgctgcaagatgaagaccctctcattctgtgctggggattcctcactcaaagaggggttttcgctcagccacttgcatggcaggcttctgagcctggtacccgcagaggaaatgcactaattttttaattaaaaaaggaaaaccaatatgaaaggagagggccgaaacactgaggagacaaagcccagtgcctcccggcctcagctaactcttcagaataccaaaccattgaagaaatctttatcttcccacataatgcaaactggtttccctcttcctcctttcctcattaggcccaaataagacttaggaggattaatcatgcgcattggcttttttactgcagttacaaaatacaaccacagaggttccctccctttcctgatgccaggttcacttggctactttcagatttttaactgagcaaaaacccagcccctcaccagtaagtactttgtaagtactcaccagtacttacaaaggcagtactataacaccttcaagatggggaaaccacggttttaaacagaaacacatattttccctcaacatggatgctttatcatatctctaacatagtaagagtagagagtcacaaaaccatgacctatattttccagactgttagaacagcaattgagaaaaactgtttatccaagaaatatctttaatgaaacaaaaaagaacaaaagcatacaagggaagccctctcttccaccctctttctcatcacagttttgcccttatcagataagacaggtaggggttccagggctgttaagctcatggggtatatcattaggaccagctctgtaactggaactgctcaaagaatgaatgacatctttattaagacaaacatcatctgaccaggctcggtggctcatgcctgtaatctcagcactttgggaggctgaggtgggcaggtcacaaggtcaggagttcaagaccagcctagccaagacagtgaaacctcatctctactaaaaatactaaaaaaaaaaaaaaaaaaaaaaaaaaaaaattagccaggcgtggtggtggccgcctgtaatcccagctactcaggaggctgagacggagaactacttgaactctggaggcggaggttgcagtgaaccgagatggtgtcactgcactccagcctgggcgacagagcgagactctgtcacaaaaaaaaaaaaaaagaagaaaaagaaaaagacaaacatcatctagggagaaaaatacatcaacgcagaaaaaaaagattttctttttaggtctcgaagatctgtatacaagatgctggaaccaagtcacactgaaaaagttgacagcctggaaatttctatatgtggctggccagagatgtataaagaatacagtggggcttactggagataacagcacttcccagatgaggggtgctgcagtgtagaccaaggggccacgacactttagaggtggtactggcctctgagaaggcagaggtctctaagaattaaagaactcctatgacttaaggtcagcagagataggctatcttgaaagaaatgatctacctcccttccctgagggagataagaaccctcagggaaccctcccttcaaaattagaaccaagatgagaatgaagttgaaggatgaagatgttttatataatatctttacttacaaaaattaaaagaccaaagatgtgctgtaattctgaacttcactggatctacaaacatcaatagtggtcggcagggcgtgggggctcatgccagtgatcccagcactttgggaggccaaggtgggtggatcagttgaggtcaggatttcgagaccagtctggccaacatggtgaaaccccgtccctactaaaaatacaaaaattagctaggtgtggtggtctctactattacaggtgtgcctgtaatcccagctatttgggagggtgaggcaggagaatcgcttgaacctgggaggcagaggttgcagtgagccaagattgggccaccgcactccagcttggtgacagagttagaccccatctcaaaaaaaaaaaaaaaaaaaaattagactggccagttccatattgtttcctagttggttttgactagttttgcctgacatcattaacaatcatgcaagtgtgagatcctggtgcgtctgaaagctattttctccacgtggaaggtaacttagacatttaataaaacctcacggtagtgggctttttcatttatttaactgtcccccacccctcatcagcaatgtaccttttaaataaaatgtctgcttctatagggataaatatattagtaaaatagttttctacacttctttttttttttttttttttttggcagagtcttgctgtcgcccaggctcaggccggagtgtcgtggcataatctcagctcactacagcctccacctcacaggtctgaggcattttcgtgcctcagtctcccaagtagcagggaccacaggcatgcaccatcaccactggctaattttttgtatttttagtagagatgggatttcactatattggccaggccaactcctggcttccagtgatctacccacctcaacctcccaaagtgctgggattacaggtgtgagccaccgcgcccggacagctctcctcaacacttgccatttctaaatggctgatgagtgttatttaatctacaactgtgccttctgatgtgccacaatgccatttttactgcataaaccttttggttcaacatgagctagtcagactcactccaagtacacttaacagttaatacattcagtcctattggactgtaatggtgtcagttttgcatttggcctatccaaatttaacctcctctggatctattgaaatatcccattataatcttcattcttgcatttgggttagtgggaagataattattgcaataagaaagccatcaaggatatctaatatttagctaaggcaatattagaactgacatttacattttgaagtatcttttcaagccaatataaccttccctcataattgccttaagtatattttgaaattgctgacttcaattcagaatttctcatttttcaaaaaagcaagacttaatttaatagtaatctttctttctttgaatcactctgctaccaggacactgggcctcactgaagttaattttaaagaacagatcaagcaaaaagctaaatacattgtaaatgccaactattcacattaagtcaattacataatctgttctatgtattgccaaattccgtatgtcagtttcaaaatcaactgcagtacactggctataaattgcattccataggtctccatatttacacaagtgtgttcctaagtagttgcattttaaaattgtttaatgtaatcatattttcataatttcttatttggcaaaaacaaagatatcatttgataaatttggtccataacacagcattattttcataatatgtcctttctacctatacttttcaaactgtttgtgtatttcacatgcctatcactctgagaaatttttttttttttttgagaccgagtctctctctgtcgcccaggctggagtgcagtggcacgatccaggctcactgtaagctccgcctcctggattcacaccattctcccgcctcagcctcccgagtagctgtgactacaggcacccgccaccacacttggctaatttttttctgtctttttagtagagacgggatttcaccgtgttagccaggatggtctcaatctcctgacttcgcactcagagaaactgatgcttcccatattttcaggcctttatgaatgccagtccaccatcccaaaaatatatcttgaaaataagatgaactaatggacagaaagatgtgcatttacacagatatatgatcaagcaagcataatgaaatgtcattagtagaaaaggtagtagaaattcttccaattttgctgaatgcttgaaaattttcatagcgaaatcgtaagggaacaatctcccatccttttttttcttttttttttttttttgagatgggagtcttgctgtgtcgcccaggctggactacagtggcgtgatctcggctaaccgcaacctccacccctccaaccccctgccccaagttcaagcaattctcctgcctcagcctcacaagtagctgggactacagatgcatgccaccacactcacttaatctcttctatttttagcagtgacagggtgttgccatgttggccaagctggtttctaactcctgacctcaaatgatctgcccaccttggcctcccaaagtgctgggattacaggcatgacccactgtgccaggcccaatctcccattttcaaagcctggttcaacggccaatacagaacttcatttttctctaagacacttaactcttcccactgtatatcatagttacttacacattgcatctagtcttcctactggatctatgttttgagtcattgctaccactcaaaaacacctagcacatcttgtacacagtaattattcaacaaataaatggaaaaaaaaggactctgacaatctgttgaaaacaaaataatcactgttctttagttatactacttcttaaattattctcacatgatacagactgtgatattctcaacacacaggaagctgaaatataaaagacccatgtatcaagaaagaatttttttcctaacaacatatttacaatgtaactgagaagccaagacatacagacattaaagttaaattatatataatacacagcagcatgaattaaaagattaccagatattcactcagaggacaaaaattcctctgggtaggagccaagattggaagttggtgaactgacttgaaccttgcacactgagcaagatctgctgaatttcagggctcaagatgatctaagctctggggacaggagcgtctaggcctgaaatactaaaagctaaacgaggggaatggttagcgggtaggaacggaaagtctcaacagaccctgagaaagaagagttaacagacttgggaacactaaacaccaggagagtgctcaagaagacaccaaggtttgaaaactagggaaagaactaactagaccattaacccaactggggaccttgaaatgagccatctgagggcagggggaaatacagtatgttcagttttagacatgctggatttgagataaaagtgggacctccagagcctttaggtaactggatacacaaggcaacagagagtaagttacctaagaaaataccagagaaaaagtccacaactagtcctgaggtatacttatgaatgaggataggagaaggaaaaataagcgaaccaactggagaagccagatggcaggaggaccattgtaatggaatccaagataagaaacgatttctcaaagcaaagctaagaaaaggaagacgtggccgggcgcagtggcttacgcctgtaatcctagcactttgggaggccgaggcgggtggatcacaaggtcaggagatggagaccatcctggctaacacggtgaaatcccgtctctactaaaaatacaaaaaaaaattagccgggcgtggtggtgggcgcctgtagtctcagctactcaggaggctgaggcaggagaatagcgtgaacccgggaggcggagcttgcagtgagccaagattgcaccactgcactccagcctggatgactgagcaagactccatctcaaaaaagaaaaagaaaagaaaaggaagacttaggctgggcccagtggctcacgcctgtaatcccagcactttaggtgggcagatcacgaggttaggagttcgagaccagcctgaccaacatggtgaaaccctgtctctactaaaaatacaaaaattatccaggtgtggtggcatgtgcctgtaatcccagctactcgggaggctgaggcaggagaatcacctgaacctgggaggcagaggttgcagggggctgagatcacgccactgcactccagcctgggtgacagagcaagactccgtctcaaaaaaaaaaaaaaaaagaaaagaaaagaaaaggaagacttagacacacacacgcccaactctcataaagagtgtagcttcagggatcatcagaacaaaaaccagaattgggggctacacaggctaattccctaaacagctctcccttgattttttttttttcctgtaatgaatatggcttgaaataaaggacacattttgaacttatgtccttattaaagtaataagtgaaggtaaaaattcactaaattgtatgatgaggagctgcagatttacctttttagtagtatttgacttaatatcaaaactaacttgcttttttgttttcctttttagtttttatcaaaactatacaaaaatggatgaaagaaaaaaaaagtagcccaaatgcctgccaagtagcaagaataagtcaaccctagattcaactattggcggtgcttaacctacaagttgataaaccacagggagaagacggaatagagtaaactgggatgctaatgaataaagcaagtttttaaaaaggctgaaccatataaaatagccaacgtacaaaaatgtgtttttcatgtttcctatgttccttagaagactacaaataacaagtagtaatacctacaaaagaatttctgtgccactgacttgatttttgttcatcctcatcagcaactggcaaagaggaagatgtcttccacactctaagtatttgtacacagcatatcccttaggcatcaaaatacatactttttcaagtacatgtggtcttctgtttcacagctgaggaacaccaccagaagcatcagaattctttatgtaccaagaaaaggtgcttggttatatgaccccagggagatcctgggggggctgggcaagtctctgcaagttgttgctacaaaggcaaaggcaaatcttgaactgcagggaagcagaccaactcccacacaattgaaaattctgccttccccaatcactatgtggtatttacactgcctttccaagaggatccccaaaaagccccaaagctacagcacatataggccaaaaaaatggctgggtaaattcccatgatgccagggaactgggtagtttccaagggcagagtgttccagaaaaatgcaaatcattcaggcttccccagagaaattccagccaaatacagctgctatcttagaaagcctaacacaaaactgcagtttagatgcttggatgaaggggctagaagcacaaggacaggcaacatgtttacagtctgcaaggcattctaacttgccactgaatattcttccccctcatcccatttcgtatcgcctcggagaagattccttgtgtgtgcggagcatgaaatctatgtgtctgctgctaatgtgataccttttcagcaattttgggatcttgaagacctttaacttttttcaagtttacatgagaattaaaatgccttattttcaatagtcaagtgtttgtcacttaaaaaaaactagtccatgagcagtggctcgtgccgataatcccaactattcgggaggctgaggtgggaggatcacttgagccaggggcaggcagaggttgcagtgagctgagatcaagccactacactccagcctgggcaacagagtgagaccctggctcagaaaaacaacaacaacaacaacaacaacaacaacaacaacaacaaaaatgagaatcattcaaaaagaggccactcttctcgccatcccctcaaccaaggacatgccacaaaaccatgcgtaaaaagtaaagctcttgggagtctgaaatgaagtattccaatttggcatctattttggaatttctgaacaaaatgttttagctctcaaatagattcaggtaactttcagcccttaataagatgctacatttagctgcataaccccctcatccattttaaattatttcttcattatcgcttccccaagtacatatacaggattatcaaggctttcttctttttttttttggagacagggtctccctctgttgcccaggttggaggtcagtgacgtgatctcggctcactgcaacctccgccttctaggttcaagcgattctcctgcctcagcctcccgagtagttgggattattggcacgatagctgggactacaggcacctgccaccacacccggctaattttttgtattttagtagagatgaggtttcaccatgttgcccagggtggtcttgaactcctgagctcaggcaatccgcccaccttagcctcccaaagtgctgggattacaggtgtgcgccaccacgcccagcctatcaaggctttctttaaggtaatttcagtgacaatccagaagtaggaaagatgtctcagatcctctaaccactcggtctcaccaggattctctaagtcaaatgtgaccatgcaacaaaaaagcagccatctttctaacgggatctctgtggctggttcaattactcacctatagattatacccaaattacagaatatttatttcaaaacataaggaaatccactgtcagttcataggccaaataagaaacatcactcccaattaaagatttatcttaaaaataaaaagctttggggccaggcacggtggcttacgcatgtaatctctgcactttaggagatcaaggcaggcagatcacgaggtcaggagttcgaggccagccaagccaatatgtgaaaccccctctctactaaaaatacaaaaattagccaagcatggtggcacgtgccagtagtcccagctactcgggaggctgaggcagaagaattgcttgaacctgggaggcggaggttgcagcaagccgagattgcgccactgcactccagcctgggcaacagagtgagactctgactcaaaaaaaaaaaaaaaaaaaaaaaaaagatatttatctttaaatcaaagaggatacctctaataaaacaatctaaaaatttatttaacaagagttaagtggtatagtcaaagtcattcttttaacctaaagtgttcctaataatatcaaaagagtcaactcaaaactgccatttattaaaaaaaatcagagttcaaactaccacttcccaagctttagaaggctttctatgtgaaaaaacaggtcatggaaatgaagtttcattatttataaatactgcactagatttagaagatcccgggttttccaaaagtcttaggttccactttgtgtgtgaccttatagcaattctagccaatattacaacaagtgtaagacatttaacataccatccccacaaacacaaaatgcatatccttcaaatataaccagcacttaactatctaaagaatgacattaaaagtttttgaattcattaacagttttccaactagtttgtcctatgcaaatgactcaaactttcaggcaggccccaggaagcagcacacaagaaactatttaattaaagattcagcctaattcccagtagtaaatcacaggaaatattttgtgccaaagcaacctctcctcggtcctaaaacagttaagttttggttgctttgcatttaaaaactggatttaagttaaaattcatagtaaaatttctcttttatgactcttagaacaggagtctttcagatctgagagtgaaacttggttttaacaagtaactcatttttatgaaactaaccaaaagactagttatgagttagaacagctcaggttgtttcttttcttcttaaaatacccttttactcaaactgaaaatgtacttgctgcaatcagacttaaaccaactgacattacacctgaaacacttactcatttgagaaaggcagcctactccaaagcaaagccccattaggctcccactgggagctgcccaagggcctccaattccagacagataacttaacaggtctcctagctctggcaaataaatttaaaaaaaaactaaattattcttgcatttttaaaaaaatcagaacaagaacctgataaaaatggttgtaaagatgatttaacatcagaatctattttttaaaaacctaaatcttaaaaagtgtaagcatattcctagtttaagactaacactctgacaatgccatttgagacgcaaaactaaaaatatcccaaaacacttcctttatctttaaagaaaggcactccagcaagttgaagtaggttgtatccatttccaaggactaaagaatggtgtaagtacacactgtactttgaatgcaaaaaaaggggggaggattttttttttaaatggctaatactctgtaacagctgaagtggaattgatagatgagcaagtaagtcaagtacttaaattcaaatgttaagtaaaacaagatttggcagacaatttcgattttgtgacttaatagaatatatgctgaacttaacggtaagaaggcactttacttttttgaaacacttggtaaaattgcatgtaatgcctggtaatgaagcgataagtgatacctttactctaaaacacactttggaaaaaataaaatgaatcttgaattccttctaaaggaacttcaataaggtgtgagtaacttaacccttttgacacgcattaaccacagggatgacactgtgtgtaaaataaccttggtgttaacaactgcgcagcaaagaccaatctttattatgccgtggagtccaatatgagaggcgaagaaaggtatgttttaaaaaggtgtttagctcggccgggaacggtggctcacgcctgtaatcccagcactttgggaggccgaggcgggccgatcacgaggtcaggagatccagaacatcctggccaacatggtgaaacccggtctctactaaaaacacaaaaattagctcgacgtggtggctcgtgcctgtaatcccagctactcgggaggctgagacaggagaatcgcttgaaccagagagtcggaggttgcagtgagccgagatcgcgccacggtactccagcctggcgacagagcgagactccgtctcggaggaggggagggaggtgtttagctcaactagacagcctttacagcaattccgccaccggtgacagtgagaaactgtcagcttggggaggccgcgccacgactggaccccgcccccgggaagcctccccggagccgagggcccccgggccttctcctcggagtcgggaagtgcctgcccccacgctaagtctctcctggccacgctctgaaaggcaaaaatggcaaaaatcctccttcaaggcaccgctccctcgacgcgcaccgccactccgactccctcaaaacattggtcgcaaagcccccccgcctggtcctccatgctcaagaatagggtggcaaggcaggaaaagactcacacatcccagcccccggcccctcagggcagcctctgtgtttctaactaaaagcctcctaccaggggcaagaccaagttcgggcgcttccccgcatggagaaacgctggccccacggcgcccggccccgacgcgctggccctttaaaggcgcgggcttcctgcgcccggggcccctcccacgccaccgccaccgccaccgccaccgcccgcgcccgcccccgccgagggtcacacttgaactttagctcgccccgcgcggccaggcgccggcgctccgcaggcggtggccgccccttcgcacgtgtcggaggcaccacctcgggctcgggacgccgggcccccggcactcgaggccactccggagaaaaccaaaacaaagcaaaatgcgcaccgcctccagaaactgcccggcaggccctgcaccgtccccggccggtcgcgccctgcctgtcccctccacctgcagcccggtcccggggcagcgaggctccggggcccctcgccgcgccctcccccgccgcgcccggcggaaacagctccgcggcgcggccggagagaacccgccctccccccgcggaggtccgggagggaaggggcagccgaagcagtcggcgcgggccgggggttgccgctcccagcgaacccctttctcctttcactggcaaacttttcggcctcgctctgacgtccacttcttggcgcactttctttacttagttccccaacgagccccttaccgcgtcccacgcgaactcctgactggcgcgcacgcacacctactgccgtccccgaccggacccgggcgaggccaccgcgaccaccgcttctcgcccgccctcctgggaacgcgctgccctcctgctccgcaccttcaggccgagcaaacctgcacagctgcgccctcgcctgacccaccgcgcccccaaggtccggccgcgcgccgagtccactcaccttccagcccgccgagctgttgctgtcacccttatccttgaagtagggcacgctcttgaccatccactcgtagatctgcgacagcgtgagccgcttctccgccgagctctcgatggccttggtgatgaggtcggcgtaggacaggttgccccacgcgttgcggcgggacgagctgctcttgcgcggctgccccgcgagcggcccagcggcggcggggggcaccggcgggtgctgcgacagcggcccgggcggcgggggctgcggtggcgctgggtgcaggcagcccgcctccgggccctggaagtccccgcacagccccccggtggcggccgcggcggccgccgccgccaccgccgccgccacggagccgggcgcctgcgggaagtcctcgctctcctccagcaagctcaggttgctcatgaagtcggcgctgacagcggcagccgaggccgagggcaggcccgccgcggcgtcggggttggcagccgcgctgcccgacggcgccgggctggaggtggccgagttggactggctaaactccggcctgggcagcggccaggtgcacgagcgcggccggggcagcggctcgaagtccgggtcgatctccaccacctgaggcgcctcggccatggtgacccccgcccctcccccagccgcaggagagccaagagggggagaacgcagcactgggggcggacggggagggggcgcgaagggacggtccgagatttgggggaacgaagccggtgcggcgagcggacggaaactgggaggaaggcgcggcggagtggaagcgcgagcccagaacttaacttcgcggggccatccacatcgaggctcctcggggtccgccgcacggactggacggccggccagagccgccgggccggggcagagcctgcgccgcgctccagctgacagggccgcggacggaaggacggacggacgccgcgggccgcttgctctccccagcggcgcgcccgctgcgctgctgcctgttgaatgtggcggctgcggcagcggctgctgcgactaccaggccgcccgacttacgggatctgccgccgccccccgcccgcggcggcgcgcgcgccggcccgcccctgaccgacagcccgcgcggccaatgggcatgcggcaccgccgcccgggcagccagtgggcgccgggctgggtggggcccggttttccacggggaggcggcggtgggctggtggggggtagtggggtgtttttctctttcacacactcacctcctttttttttttttggatctctattattttctggtaattctcgagtgtttctgtgattctctcgccttctcagtgttttgattgctaggaagcaaaccagcgtggaggcgccggcgacactttgtttactacggagcagcagagccgagtactcgggaagcccgggtgggaggaggcgctcgctgctccctgacctccgctgcgggccgagcccggcgggctggcagggcagggggccgagggccgggggcgcggggtgggcgggcggaggcggccgcgaggaattctactcaatcgctccctcctggctccacccacgatgtctttgctgaacgacgtggggaatcggtgggttttgttttggtttaatgttttctttcgctgcgatctgtcaagtcctccggccccctcgcgagcggcacacgccccccacccccggcgccgcggctcctgcagtcgagtccgcgccgagggacccttctccgtgcccaccggtccgcacccccgggctcagcctgtgccattcggtctagccagaggcgcgtcacccagccggcagcccccagccggattcactgtattcttgaccttttttaaaatgctagaaatgaggaacaggggctccggcgcggggaggagattatctggcctccctgaacacacgaatccaaaggcacccgcgaccgcatgccctccgtgggaacctcttcccctgggcgggaatctcccgctccgtccactaagtccagggccggcagcgaagggctcaggagcgcagttagagagaaccaggtcattttattacttatccctaattaaatttagctgtttgttacttcttttttatttgcaacggaagtgatcgggtgttaagtaaaaacgcaaggggggcgggagataggaccaaagccttggggcgcagcctgccccacccccaaattccttgaggctacttgctgtgtgtgtcagtcaaccccccacccacaccccacctttcctcatctgggctgcaggtccaggacatcctgtcaaggatcagtggggccaaaggtgggaagataatggcccttgtgtctcaagcagaagaaacagttttccagttttgttttgttatgcttttgcttttttaggaagaatatggaaggcatttccttttagaaagatgggaccacttaggatggaagatggacagtagggttttaaatatcttgtccaaaaggacagcttccaactcttgttttttaatccctttctttctt

SEQ ID NO: 208 - DNA, 632275 bp, Homo sapiens
  source 1..632275: mol_type = genomic DNA
ataagaaagactaattatactttgtttttatcttttttagtggggagggagaggtggttactattatgaagctgcctgtgttggtgtgaaattagtcttaagagttttatgttctttatataaaggcgcctatttataagaagagccaatattttgggtttgctgcctcgtttatgagagtgacaagcctgaaataaatatgtaaaagagtgttcctgcttgagaacaattcctgaaatataagttaaaatgtactatgcctcaaccagcaaaatcttcactaacatatcgtcatacttggtttaggtcctccagtttattaaaagaagtatctgtacatttttaaattttactaatgtataggctgtaagcagtatttaggtttaagcctggtaattacaggaatttgaattaaccctaagattatagtctcagtagccaggtgagaattaaaggttcaaatgttttgctaattattgagactaaggggtttctagatagggcataattgttaattcaaagaggacactagtttgcaacttaatagcaaaatctacttgttaaaaacacacacacagacacacacacacaactttgctaatatgggcttttcaaaacaatgctgggaaagaatgttcacttgtatcctcagcatcggtgggtgttttgcagaataaagactgggaggttaattttcaagtcatcctttgccctgaattatgtgctctgaattatatatgtaatggttttatgttaccacggtttggccacttaaaatactgctttcatattggcaatttaattttttattgaaaggtgatgctcaaattcattaatccctagaatatatactatagagtaatattaaaaagaaacagcacatttcctaaatgcatctaattatttttttaaaatctcaaaattaagatggtttttctggaatatttaggtactgaagttctgttttcttcaatgaatgcaattatctagcatacttttgatagaatatttttataaaatcatttgttctaatctaagcatttatcattatatgcaaaaagatttcttgatgagaatattatagacggtgcatgtttttgacattagcattttatttggatgactaatcttgcagatgtgaaattttaatgaattattcatgaaattgctttcctctgaaattttagtttgctcttaatgctagttattaaacattttgtttttctttataaaatttgatgaaaaaaataagagtgtgcttcctcaagagaaaagataacatctcttgctcttttttttttacttcccaattctctaagtggatactttcacttggaaatcctgaggataagagcttcagccttccctgatcatgaaagctttaagattgattttaattctgcattggaagcagctggtgataaacctaaggcatatgcctaacatacaatatcagcaggtcagaaagggaaacaaacttaggctgtggcaacttttactaccagcgtgaacaaccagcatttttattgcatttgagaatgcttataatgtcagtaattagtactgactacacaacattttttttattgtctgtatccgcagacatggaatgatggaattacagttgatgtcaaggaatgagtttcttttatgccttatcaaaacaaaacaaaacaaaacaaaaaaattcttgttactggcagcacatatacatgaagcaccatgctcacagtccggactgtatcatcttcatcaaggcttatgggtagcagagattgcgtgagctacactgggcccaagaaatgccttcagcattgtaaatctgattttcaggataaagaagcaaaactgactttgaagacatccagaatttcaggaggctatgtcattaaccaaaaggtaccaaaaagattcaaaatctgaataagcacactcttctttgtgcctttggaaacggagttcagctggaatatggaaaagagaggaaatattttttaactctattttttttcatgaggaaaaaaaagctagtgatttacagcctatcttgggttaagaatccaaggttttctttactaggtctgactggatgctggggatggtgttagagctgtccaaaggtggcaggactggtggtaactcttcacgtatgtacataagccttgatattccattttgtggctggtccaaggggcagcctaactcatcttacaagacggactctagggacaggtaggttggatcctcattcctgacagtgcatttgtctgacacacgggactacctccctaatgtatgcttttctttgagaaaaaaaaagtaacagattttctttacatcttggcaccttgtaaagtttttttttttttatacaaaagttcaatagttttgacactccccattgttaatcactacttcactgataaacttggaaaagtgtgaccctggaatttcatcatgcaaaatatttactgcagcaggagaaaacattttttaaacaacatttttttttcttttcaaatgtatgaacttgtttaagatagccaggaaggcagtggtaggataaacacaagggataggaatgtatcaaaaaacagattaacacacacgcacgcgcgcacacacacacacacacacacacaaaacctgtacaaaatgctccaatcaatgagaacagaaaaaagaaatcttcaactatgttacagtttaaaagcagaaaaaaaaagttagggagtttctccctcccacatgtcaggaaatgtcatccaatattcttaaagcaaggataactaaataaaatacatgtgcagcatattctgcaattccgttacatacagtagttttttttccaaagctatttttttttagtatcgttaatataaagcagttgcacaaaaagcaaaggtgttttgacaaacaggtgtatgcatttattcctttttaggaacaatatctaaaaaaagaaccgccctctgccctcccccaaaaaagacaaagattcacacagacacatcgggatatatgtacaacgtaataaaccccatcctaaagaagcaactgggataacccccaggggatacagaatcagaattgtaaaaatcatagtgaagtttgcttgctgtaaagcctgagaatttttttttcagttggttcttctgcaaggctgtgatacctgcaaagatatgtaaaatctaatttttcttttttttttttttttgctacagtctttagactaagcatgcaagacatacgactaagtgcaactgagtgaaatgttttttttttaaattttaatcattccctaaaggtttgaactgaggtatgcgtactaacagtttctcatgctgttatctttactcatgtctagctacacatgctgagaatgaactaatctaccagatttttatcctcttttgaataccaaactaaccagcaaccactcagtttagaagcacagggcccccttcccatgaccctgtctggctactgcctgcacatcatgaagctgcctggaaaagtttttttttttttttttttttttttttttttttttttttttaaagtcttgcgtgaccacagactgccctttatacagaaagcagagtgaagcttcaaaagtaactgccagagaagtttttgtaccaagcttatgagtggatgggagtgttacttttctttaaatgaaaaatgctgaccaaagcctaatcggaaaaaaaggaaaaattaaaaataaaaacaaactgaaggatatatgccaagataaaccaaaattaatacagtgatcacagcacagttcttaaacaaaagtggcatacaatctaaaaatatctctttttctagaaatactattatgtaatctagttcaattatggaagcttttctgtcctgactctaaactgtctcctttattggatactctaattgcagtggcatacattcattttttttttgagatgggactcccttccttctgtagctcctttaatattgtgtcctatttttatctgcagtagccccataaaatctctttaagagaatgagttttggtctctgtagaggtacacaaaaagaaaaaggaaaaataactactagaaaaaagtaacaactttggttccattatctacttggtcttctaaatttacgatgaaggagcagttctctttctcaggttgcaatagcctatcgcttgtcatttgcctctaaattcttttgcctcctttgatcaacaataagaggatatttggcttcatcagataaagcataaaacagagaacataatttacctttgtgtaatatctttggtaattttagaaaaaaggtacaaagaaagaatataaattaagcttcgaaaggctctcgaactaaaaaaaactacagtcctatataaataaatgacaggaaagtgggtgcagagctgaagtgtggaggggttctaaggactgaggttgtactgacctgtaaccatcacatttctgcataccatgtttgggacccccccaaagcccagggcctacatgatatcttctatgagtttttgtgatactgggttggtgatataatattgcataacaaactgcagtaccaaatttgcatatttgaaattaacactttagcatttgctgaactcagccctcgttaactcccttaacaagttcaatctgaaatcgaatttgcattcaaacagtttaatgccaccaagtaggtctgaactaatgtataaactcagcgccgccgccgccacccctactttcagggcagctgctcggggaagccggtttttttttttggccattttgcaaacaaaaccaacccacacccgttatcgcagagcacccaaggcccatggcaacttggttccacaagggagagccttccaaggccatattgtcagtctaattaatatgagcttttttttttttttcagtgctgcctatgtttccttgtgctggtagaatgtggtggcatttattaatggttgctgcaaaaaaaaaaaaagaaaagaaaagaaaaaaagaaaatccgaaacacccctcccccgaaccacccccaatactgctgcgtggaatgaatcggcattgttcctagagtttgtctctcttttttttttctgtcattcattctctttctggcaggacgtcacgtctgtgtgagagggccttcatgtgtagagtgcagcatttgggacctttttgaaaaagaccaaaacggaatgttttctgactttagagaaacgtggtgatgtctgaaggaagatggaatgagtgacagaaagctacaaacgagaaatgacattcagctttgtataataaaaacacctattaacattcatcacaaggtacagaaaactttaagcctccaagaggccatcggcccaaatggaggcctgaggtcagaacttaaaatggtatagtagaaggaaaaaaaaaaaaaaaaaaagcaatacattaaaaagtttgggataattattttttaacccctccccccaatacacacacaaaggccttccccatcccaactggaagcaaaaaaaaaaaaaaaaaaaaaaaaaaaaaaggagtaaaggcagtgataatcaacatgcagtactgtgcaaataggtcgtccattggaatccttaaattctgggcaaaggcttggtctgcagcttaggtgcacaagctctgtcgggcgtcctcagtgtccaacgttggcaggactgcagttcaaagtctgctgctaaaagtgaatcagtttagcaaatttacaacactgatgttgacggttaagagaggaaaatcccaagtaccaaacaagtccatccaatgcacagagtacaaattccttttttcaacaaaaagtagaaaaatcaaaaatactcccaaatggggttcttgatggcactaagagttaacacatttcagagttgtcaaaacgtagtgaaaatcctccagactgtacaacaaatggagaacaatttcactgctaacttttgacgtgtttttttttttttcctttttccaatcttcattctcggggttggcccgccccgatagtcactccatgtcctcgtttactggttcatcttcgtaatctctgtcatggtcaaaatctggactgtggttggctgttgtcactaaggacaggggcccttcagcttcctctggatcgaggggctcttctttgacgtgtacaggatgcctggaaaaaatatgcagaggttcagtgagggtacttcccagcccattgcagctcaggtgcactgaaaagtttggggcaacagaaaagccgcactctagaactagaactctgtccagtattgttaccattagccacacgtggctctttaaattgaaatgaacgaaatcttactacatttaatattcagtttctgagttgtgctagccacatttatgttcaaaggccccatgtgactagcggttaattctggccagcacagagacagacggaacatttgcatcactgcgtaaagttctcttgggtagtgatgctctgaatcactagtctctggactggtgtgggcctctcctccctggtggcatttctcatactttaacacacgctgcagtcacctgtgggccttgttgaaatgcagtgtgtgattcaggtctggggtggggcctgagactctgcatctctaacaagcccccaagtgatgccggtggtcctagaaccacactgagtaccagataacaggtcccgtagtggcatcctgggtggatgaatacccatcttcaaataattacacgaaataagaatctgtaatgcaacggcagtttgtggggaccactgagcagaggaggctgggctaatcatggcttgctgtgtgttctgctttgctagttaacatgcagaacctgtgaaagaactctccagaggacgaccccaagcgaggttctatcattaatcaacttcaagcaaacacagcaaagagacaccatgatatacatgcttgaaactccaaattaatgcatatttttacaaactgtcaataaggcaagaaaagccctgccaggaaacacaaacgtagaggaaaaggctcgctcaacacaacaatatgataagaaagcagagccccaatcagaataataacgctgtcagctgtaaacaaggcaaaacatgaggcccggctggtagcagccactgggatgagcgtggttgcgatgaggtctgccaactttctcattatggaccagcgcatggttcacccaaaggggactggggtgatcacacaaaaccgctcggataactattgagaaatgttgttcgtaaatcatatttacaactgatcctttgcatatacaaatgactttctgttgcaggggcttttgatatgtaaaagaaccatttgagttaaaatggtcccatctctgggacaggctgcagaagggaagatttttaaattgacgttatcaagtattagtaataagaggtggtaatggggatggttggcttcctaaataattgatgctgtatgcaaaccccaaaggccccttgaaccatttaaaaacaaacagaggagtgctttggactgcccttgaagacaggaaccttcagaatcaattgactctaaaattagcacagcctagagagcatttaggggggctagatgttacctttaaaaaaataattttttttttttttttttgagacggagtcttgctctgtcgcccaggctggagtgcagtggcgtgatcttggctcactgcaagctccgcctcccgggttcacgccattctcctgcctcagcctcctgagtaagctgggactataggcacctgccaccgcgcccggctaaatttttttgtatttttagtagagaagaggtttcaccgtggtctcgatctcctgacctcgtgatccgcccgccttggcctcccaaagtgctgggattacaggcgtgagccactgcgcccggctgctaaaaaaataatttctttattcttaaaaactttgcaaaacaaaatgtagcaaagttgcattacattacattttatgtatggctctccagctattttatttatttatttatttattgagacatagtcgtgctctgtcacccaggctggagtgcagtggcaggatctcggctcactgcaacctccaacccccaggctcaagtaattcttctggctcagcctcccaagtagctgagattacaggggcccaccaccacacctggctaatttttgtatttttagtacagatgaggtttcaccatattggtgaggctggtcttgaactcctgacctcaagtgatccacccgccttggcctcccaaactgctgggattacaggcgtgagacaccatggctcgccggatatttttatttaaaaggaacagttgtacatcagtgcaaggaaggctgcatggggagtcaccctcccagcagtctgtattaagcattacggatggggatttttttttttaatggctgtattagtgtttcagcagtaagaattaggactggctgcataattttggaagcccagtgcaaaatgacaatctggggtctttggctcaaaaattaaaatttcaagacaaaaatggcattaaagcaagtacatgccaggcatggtggtgtgtgcctgtagtccaagttacttgggaggctaaggtaggatgatcacttgagcccaggagttcgagtccagcctgggtgatacagtaagacccctatctctaaataaaaaggtaataaaagcacataaaatcaagtgcagtgtccttttaggcatgagatcctatgtgactgcatgtcacacacctgtgaaccagctctgctaaaataccctacattcttttaggaagaattagttatgctgatgatgattcctttaaaaaacacaaacccttagttaaggccagttttcttatttttgccaatctgtttccatttgaggtcatatttttaaatattgtaaattcagcaggaatgctattttttaaattttcctagctttacaatttataatgtttatggctagatgagattccactgtgttgacatatgtcagtttctgaatactaggcatttgaggatcatctttctctttctcttttactgtttgtataatacaatgaccacttttatccattaatctttctactctatttctgttgatttacctccttaggataaatttctaagaatggaattgttagagcaaaggccaaaacatctttatggttcctatgatttattgtgatattaacttccaaaggggctatcaatttaaactcaatctcatcagcagcaagcattatttgtgaaaaatattttgttgcttagcaggtacaaggtaagctcaggttaccttaaattgtgtttctcagattactgacaatggtgaacatttcctaatgtttgtttcaaactttcattgttgagaactgcaacttcataaattactgaaatttatgttttagctatatgctgattgaggttcaaatgttgttttccaaatcaacattttcctactttcttaactatcaggtctatcaatcttttcatgtttataacccagaattgaatgatagaagaatgtaagatcatacaagaccttggggagggggaaggaggatgaggacccctagaagaaatagaaccatccatctccatcttaatgaagttcttgctgtataattttagactttgaccaatattttgctaaccttatccaaaaaatcaggtgcatgtaaagccccacaaaacacagttcacaacatcagagaatatttcgtttacctaattatcctcatttgatcattacacattgtatacatgtatcaaaataacacatgtacccccaaaatatgtagttacgaggtatcaattttaaaagctgtagaagtgaaaaaacaaataaacaaaacacgttttccccctaaattggtagccaaaattcatgaggattatttactatccacaagacagaggtaatgatcctgtcatgcctgtaggctcgactcccagtgcctcatgcagagtggatgcagagtgggtccccaacaaatgttaactggctagatctactgtgtgaccacctgatgacacaaccaggttagacagtaaggtttcgaaactttagagaagtgaaatccgatttcgggacatttcttgatgccggcagatacccctggggtgtggcaaacgtgtagcacaagcacacagcacttcaaagaacaaaagaggatgggattccacgaaagatacatttgagatgagatgcagactactgaagacactacacttcacatacactcaccgtgtctcctggaagttagggctgtgtatgatgcaccttcctctccttgcagacactgcccccaccctttctctccaactcctacttccgaaagggctaccgctgaataactgtgtgcaaaaccacacatttcccttctccttacatctgagtaattcctttgtttagccactctgggaacacaagagttttaaaataaagctgactggcgtttaaaggcattgtgttctgggggtgtctgcacagcatggagtattttgctttgtagctcctttagcgcctatcaggataaaagtagaatgccccaaagccataattatgtgaccactttctagtgtttcaaaggacgaacgaaacgtagtggtatctgactgtcacagaaagggtaagaatgaagagttctgtttcaacactcaatattagctaggccgccttcctaacaaggtccttcaagccgtgccgtaaagtttatggcttgatttattccaatagactggaacagttgaaaaacaatttgcatcatagcagggtaatgcatattggacaagaatggaaactcttgtcactacagaattctcttaatggaaatatgaggtcaaaaagagtaacagtctattacacagatagcaggcgcagggaatctgctgttgacatataattacatttagcaaacagcacaaacctgtgagatttgagcaacgcatgttgacatttttgtgtagggtttcttgtaaaaaatagttgaaaccttcatttcatcaaaaattacaaagactattgtaaaacatggtttgggtaatactggggttaattcaaatttgttaaacaaattaaccctgcagtgactttctttcgtacagcaaaatcagcatcactctgaactggtgcctgtggcttgtatccaagtatctctttgttttagtgattctttatactaataggaatatatgtcaacaaaaacttggagtttgtacagattatgagaaatagcatcacttccattcaataaccagacatttttgttctgagtatttcttgcagtagcttataccaatttacgtttgctctgaacttcgttagtatctaagtaaatactcgtgtcatgacaatgatttaagatgaatacaaatgtggtaacaggaaaatcggaaacactaagttgctttggaaaggatgaaatatagcagcatcagtgtgaaagataaacacactcttaaaatgctgtgaagcaaatgctaagatactgttcatataaattaaaaatgattatttccatatccagaaaggatagtaaagatcctttctgaagtgctgtggagatgaaactcaaatgctagaaaatcaaatttcagatttccacgtaccctccaaattatgctggcagataacacttttttctttgtcattagatgccaattccatatgctcctaattgttacaggtcataatttccattccgatcacttaaattatcttaaaataagatgttggtcagtaattcagaagtaatgtgtagacaagcagcctattctaggaactgacagtactgcaaacacgaaatgggttagtaccttaaagtgggcaacagttttgaagaacctcactaaaagggagagactgtcatcccacagcatctcctgcaaagccaatcatttggaataatgtggtttcttcgctctgtttgaaaacttttcctgggagagagggtgttatagttacaccaagttctctcccatcacccactcacaggggcatcacagtctcctggcctccgcctttcctgtggtttgcagtcctggttccattcacattcagcatgggcagccatcgcccatcacttcattcagttatatgtgcactcattatactgccgtctgctgctataatgctcctattaattttccttttgatattttaagagcaatctataaatcatgccgcctttcatttgtgccatcattaatggttggtaataatgctgcggcggcgtgttcgtggtgaaccttagtgcaccaccaagtaaacaagcatctttttctctcggctaggttcaacatgcccgaaagttgaacaaactgcaaactttttcataggaatgcatattagtttgaggaggaaaaagtagtgtggcttaaataatggcctgggatgtgataaagcagagggaaaaaaagcaaacctgtttctcattttattgctgtgaattgcttttatgggaaagttagcaaatagtccttttatgcactaaccaagctgaacatttcttgaagtacaaacttctagcttggttctgggaaatcagaaattacagaaaaggtatataaagcccagagaaagggctgtctccctgcgtgtacctagggagactagggtcagatagcaaagacctgttgggtggacaatactcacacggcttgcataggagatctgcctggactgctgtcactctcgttgctgttggtatgctccattgccccgttcagctcttcccgtattgcgctggctaagttgcccagagtgggatttcccatggaagcggtagtgtatagaggtatactattctcagccattgaagcctgtcatcaaccaagagaaaatttatgaagacacagggtatgtaagacaaggaaactactaattatgggtgtactcgataatcttcagtttgagttaattgtagcatggctggcaaatacaagtttctaagaggtgttgaaagattttgctttaaaaacgactcgtggcacctgtcccaagcttggttttgaagagctaactgggggccaggggggaccaagtgcctgtgggtaggaaggactcaatttggtcctgcttggtagtcacatggtttagacgggctttcgaatatgaggtttatgtcggatgcgtttttaagaggagctgaatatttccagatcacagtgaaatataatagaatttttatttctttatccattttgatgactccagtattggatattagagattttgatcagattatcctggccgcaccgctcaaacttatgagaacttccataaacatttacctcttagatcctatagaaaaggaagagattatagaattggaatcaattttttatctcctcccatcatttctgttttaatgatttttgaatctgtttagtgcagtttgagataactggttgaaggaaacaccacgtagtgtttcagagtccgaccaattgcctaggattttaggactaaagaactctggcaaagggaagctctaactcatatttatttttggtgccaaagtacatcaatattaaaggttacaaagttactccacgtgagtgtcagcaaaaaagtgaggaaatgaaaaagaagaaatcctaaactttatttaggataggtaggatattattcacttcctgttatactgcatttgaataaaagggacaccaagtctgaaatgcagacgctagttacatataccactggactaagtaaggtacccaaaaatttgtttcatccaggtggtgattacgacccactgacttttcatttcattaaagaggacactttcaaaaactggcagctgtaattaaaccaagatttatcacaactgtcctcctgcagactagactatgcctgcttttccatcctaatgagaagaaaagtacattagatgtacttcttttcacaagatgatctggcatagtgacttccactggccagtcatacaagagtccgaactattctagaaatcctggctctagaaagaaagtaaaagccaaaagagtgcaaagctgggctgcagaaatctgtctggctagtatgacaatcgcagcctcactcactgtacaaaccgcaaagccagggctttctaggtacaagccctgtgttagaagtcctgtgcacactcaccaaacacagcattggataatggactgtttcaaagctcggccctatgtaagcccacagcttttccttccttctacttgtaaatgtgtataactgccttcttttaaaaagtagggggaaaatcctgtgtttatttccaaatgtggtgaactcattttgatgaacagcaaatgtgaacattccacactctcctacagtgtgtcaaataatttgcatcaagtactttttccaacagctcttttataattgcgataaagctttttttctttctttctttttgttttttttttggcagagcagttgccagaactactattatttgttttttttttttgtttttttttgttttttttttttttttttgcaaactgcagttggacaagcatcttaactgcttttatctgagagaggtgtgaccactgttgtctcagtcacagaaattctgctgagtgtctttccactggaaataccataagataagctctcataagacaatttcactattccaaggtcagaatgtggcaaaagtggggctgctgctagcttaattattttagcagcttccctggtcaaaaactgtgaagacaaaattgaaatgctgatatgaacgtgttcattgggatgagtttgtcatcctctagagaaggcaactttcttgggatgagtatttattctctttggctctcaaagtattctaggtcaaggccattgctgattgggattggatcatagaacatgggctgagacccaacagccacagtagtgaaacgcatacaaaggcaagcacttatactgatccctgggttctcaggcaagaacgatgtaagtgatgaaaaccagccttgtcccttgaaaaaatgatcaaatgggctgcagagagatcccagtgcctgatccgcaagagagcttcttgaacacgctctctgttaagcaagtgatcagagcaacccacccaaggttagataaattttcactaactgcttctgcctaacaaagtgtttttttttttttttttttggtagttgatgtccacttagaagcaggtgtgttacaaaaatggagttaattatataaatggtccttgcacagcatgtggtttcatatcaagctggcacctctgccaaaaaatgaagttgcttaagtaatggtgcagaagtccataagcaccctcgctcctggaacattaaccactctgagatcctcaggggaaaggcagtctataaatacgaagctttacggttacccttagttacttcacttttcagagcataatgcaatctgtcccaagtcccatgttttatttctgtagtggattctgctgtcctattttatatattgtatatcatgcattatgttgctctagtaatttttttgaagatattgttccactattatttttacttgtcttgaaaaatggaaataggcggtaatggaaaggaaggcctgctggcagaatccttatttaatttgcacagtagaaagttgtcttatgtgtctgtctactgatcagggatccaaactcgtagaagagagggaaacaatccacttctcaaatcatgaatttgtatcaatttattccccttgcctcattatggacggaaagtgttcttggaaaacggcaggacagttttgggctactgaagaagatgccaaaagcaaatgttcagagatgaaacctgaacagttctgtaatgacaaagcatactaattgaaattagtcacatagttaagagaattcagaggatggaggatcactttttttttttttttgcctttccggctcatgaatataaaatgtgcttgtaatcttaatactattccatattccagatagagcaggctttaaattcacacttcacaagactccagggaaaataagttactaatgaatggtatttacagtggcagcatcgaagcatgctttcatttactcttctaaagttactgtgtaaactacaagtaattaaaagaaacgcagaaagtagtttctcctattaaatctggttcaggctaaaaataaataaatataattactgaaatgctaaggccagtgaatctgcctctaaactgaaactgggtaaatggcctatcatcaattcccaggagccttaagactattctgggcctgtagggtacagagtcgtgctccataaatatctgtttaatgtccataaatatctgtttaatgcagagcaagacccagggctcctgtcagtatctcctccttcctcatcctgttcccatcatactaaaggtctcaactgttttttcattattgtccctttttagacttttgtttctctctttctgccctcaccccaagaaatgttcatatttgctcaagtattatggtcctttggaaggacacaagacattgcagtatctcagaaccaatctaggggtgatacagcccccattgagaatgtatgctgcagaggactgcaatggtattggatgacaaatgtcagatttatctatagaatatgcttctcgaacagtctgggtaggggcaaaaacaggaccactggccaaaaggatactgcttacttatgaactcttgaggggggacttgagtactacacccaggtactttaatgaaatgacactggagtagccttcatttaagaactgaaatgtgcaacatgtaaaaagtttgctagaagctgggctgcctcaggtagctcctttttgggtggtaatctcgctcctgctcaaaacccgcgtcttcatctcctggtaccattggtgatgtaacaagtacttggtttgtcagtaggaaataaatactccgtgtgattatcatgtaatcttgaacaatctgcaggaaaactaaagagtcttcttaaacacctctattgtttaaacagacatggtttacttttacaaagtgaaccagaccccagatcctccccaccccagacaaaagccaagatgctacagtcgactttaaaagaagaaaaagaaatacaaagccctgctttctctttaaacccatgaacaatagaaggtcatgtgacgcagtggcctatcatccagcacattaatagctgtgctagagtaattacacttgtggtatttttgcctcaagtgaaattctgaaataagaggatggaaattatgatactgctgataaatattaataagtgaacttttaatttttttgccacaatattcaaaatgctaagcatcccgctaacgctgaagcagcccgatgtgtttgcctccagggagtatgatgctttgtgcacttaagaaaaaagtttaacggaattaaaatttaatatctaattagagcaaggctaatatattttgaaatgagtaggggagacctgtgcctctgctgcatattcgggacggccgttaatcttacctgtaaagctgcattgagaggtgtgcagtaggcgtggctgctctgcatgtttttaataagggaagggttactgtgtaagaaaaacataaaaactcaaagttaaacacagtcgactgctgagttcctagctaagttttgttttaagcttgctggtgcccttccaaatgagcaatttcccccactagcaaaacccaagaaaagtcaggctttctccccgtcactgatttgcagggcgggtgtgtgtgcacacctctggggttggacttctctattcaaggaaactaggtgtaaaattctggcttaggtagtaacaggcttgggtcctccctccagagacctctctgcagatttttaggagttagcctgactccagactccaacagaaaggaaggcagcagcctaggaggtcgtgctggggaaggcagtgagctcacagcaggggctgctgggcacgagcagagagaatcttggctcctaagcatctttgagatttgaactttacagtgactgctagagggatggcaggaaggcttttaaggaatatccacaaggcacgtttattgccaacaggcgatggagagtagggtatgccaggggagggtcgttcctaaataaggggatgtcttagccagatctgggagggtctgagaatatttgctgccatctccattcacggaccaaatgaaactaacatactgttgtcagaaaatctctagcctcgtaaggataaaaatattaaaaaattacatagggcatactgagggaaaagggtgcctcccagtaggcaattacctacatttatcagtggtctttaaaggaagtgtatgcaatatgacctatttctttactatgcttggaacattttagtcattcacttcattacatttgtattattatagtgagtgaacaaataagaaatctaccccaatagtatatacacacattttaactaaccaaaaattccctttttacttggggtggggagagaggggggattatgggttaagcacaagtatttagttctagggtccccgtaagctgctgaatcaaaatagaacgaatatttgcattaaagacgtcaaaaaagcattattcaaggcactggtgttccaaagagaaacgagagcaatacatgtacaaatcacacaatttagtttcgttgcagaaagctgtggcactgctattggtgaaatgcaaaactacatgggatgagtcaaccatgcaaagccaaagcaacagcagaaaaaaaaaacaaaagcaagtaaaggctcttactgtgcgacaagctcgtcaaagttttcatcggggcagtatttgcgaggacggcctcgttgaatatggcggccacgtttaaactcttcatcatcaactgtccaaaaggacccaaactcatcctctactctgataaagcacttatgcagtgagaggttggtgcgaatggcaccctgggataggagcagcagcaaaggagatggagtggcaacaaaaggagacggggttgggggcagaacagacatccaatacagggaacaggaaaaagaaaataaaatgcaataagcataagcaaatggtttgtgagggttaatatgcattgccacctaaaagctactagcatgtgatgcaacaaagaccagcaagcagggcagggggactggtgggtatacaaaacaggagggatgaaatgcttttttgcttcccttaactgagacaacgtgaaaccagttctttggtctaacaccatctagcagccaaagcctctacgttatacttgttagcacaatccaagctaggctaagaagttcaaacatggtggacgtacccactgatcttttgtggccttcgtttttggaattctacttcatccactgtccatactgcccctttaacgttttctactcgcacaaaacacttgtgaagactaagattatgacgcactgcattctgcagcaagtataaaagagagaacatttacattttctataagaaaagactccaaaaacagcagtaaattcagcctaacagtccacatttgtaaaaccatccccaagagctgtagctaccacccccgtggaggaccttctcatggttaaggatgtcttttccaaaagcaaaaataaaccaaaattataaattaatcgtactttggcattttcgtctagtctctggtaataactgaccagcagaaatattttttaatatgcatacaagcccaaaataggttccagagtacaaatctgaaaatgttactgtgacttcaaaacaacacatgcaaagtatgaaactgccctttttaagcccacctacctcccataaaaagggggtatttttttcaaaccacgaaagaggaacacttggttaatactgctaaatacagttttgttcttgatggcttctggcttttaaaacttccagaggtcctatgaagaattctaaagtggattttaccgttgagagtatcgccttgtatagtcaaaggatcggggggtggtgaacggaccccccgcccccgccccgccccgccccggtcaagagatcagtagctatcatgttatgtctcaccttccagaatatgagagttggccctaactatcggcaagtattttaactgagtaaatgccaaaggaacacgagtggaactctcaatggcaaaatgactatattcctacagttgatggtttctgcagacatatcttgcttatggttaaaagtcctttctggccattcctaagctgagacccttaacatcgataatttatcaaaaaggaggatctcaactcaagggtgaagagcttttaatatctcatctttcctttgggtttcagaagaatccccaacccttactgggtacagtaacaagcaaggcttcatttctttagtcccgcctggttaaacttacggatccagactcaacgctggacatgaagacattctaaagagattcaggtcatttacttaaaattttcttcttattcagagtaagtagatgactcaatagtaggtgactcaattggggcttgagaagttgatacatacatcacactgggtaaagtcctcactcaattccagcaacactgctattgcacaagcgttttgcacaccgcccccccccccccaccccccaacacatcccattctgccacctggagtatttccttcctgaattatccttaacggtggtgaatcttgatactctgagaggtgcttcagtttttggacaatcacaattggtggctgtgaggattcaagctacataatgatttttcttttctgatatggaatatttagaagataatgagacaagttttttaatgcatggtgtgatgaattgcttgaaaggagaattcacaggataaattcccaaaaagtttttgagtaatgtcagcataattgaggtcggttcaagatacccaggtgactatgaaaggacactcctgattcaaaaaagttggaagaaggatttgcttaaaaataaaaatctctaaaccgaaaacatttggcatgtcatacacttgataggacaattttctatgcatataaactgcagtctagtctaaataagcagtttttttttttctttttttgaaactaggtcttgctctgttgcctgactgcagtgcagtggttcaattatggctcactgaagccttgtattcctgggctcaagcgagtctcctgccttagcctcctgagtagttgggactagagacatgtgtcaccacacccagctaattttaaaaattttttgtagagatggggtcttgctatgttgcccaggctgatcttgaactcctgggctcaagtgatcctccagcctcctgaagtgccgggatcacaggcaggagccactgcatttggctgcattttaaaaaaatatattgcccaaaggcatacaatagaaggtctactgttacttactggaacaaaattgaggtggtataaataaacggacagagccaatttcctttaaaaatccagacagggcatgacacatgtaagagatataacttgaaaagaagtcaacattgctcctaatcctaatcactgcttgatgctttaaaataagtatcaaaatgtacagaaatgaaaggtcttaaagctacttttgacaaaataatttctgtagatcaggttgagcaatataaccatgtgagtaaagacacaaagccaaaacttcagttctgttttccaaaactgcacatctaagcagaaagcgacgagaagtcaagagttttcaaaaaaaagatgtgtaagctcttttcagtcataaccttaactgggcatttcatcttttgtctaagatcatggtacaaacaaggacacgtacagaaaattatacgtatttatgagtcactatttcatctaaggctgtttatattaatgacactttttcctgcagtttgcaaaacgaaaaagtgcaatctgaagatctaagcttaaatattatattcacaactggtaattatttttaaatttcatcatttctatttataaaaggcaatctgaagaaaatgtctgcctcatgcttcgacttcctaaattttttaaagcattcatggctaaagatcctttcatattttatcttccaaggcaggctgaggcaaagagggtaagattttgaacataggttcccttcagtgcccatgtgtcttaatggaaatgaaaggataatttgggccataatggatattcacagctctgtaaagttgatgaattaattctatggttatattcgttttcttttaaaatgctaatttatcaggaacttaacagaggaaatgtatttttctgtcttttgctttggtttttctccggtataaaattaaggaattagcaaggaaggcatttatttcaggcgaaggaagttttccttgtgtcctataacacatccttatcatatttagattaatggcatgtaaaaatagcctcaaatgtttgttatcacatgtctctaaatgttttggatttcagggattacaagaattccaggtagtaaaaaatgcaaaaatacaaatgacagagtgtacctgtccccttctataagcaagaatattagacaccaagaaatcaaaaatgggaaagcccaaaaatatgtgagggatcaatctaatataagggagtaaataccagtggaatctttgagccagctgctgacctgggaatgaggtaagccatatatgaccccaagcactactgggggcatccaataaagagctatgcaatttgacttgtttttacagcaaatagtattataatgaatataatgaagttcgaaatctacttttcttccttagtatatctatgagggacaatctccttttttttttttttttttgagacagggtcttgctctgttgcccaggctggagtgcagtggcatgaacagggctcactgcagcctcaacctccttgcctcaagcaatcgtcccacctctgcctctggagtagctgttgaccacaggtgcatgccaccatgcctggctaattcattgaattttttttgtagagacagggtctcgctacgttgcccaggctggtctctaactcctgagctcaagtgatcctcttgccttagcctcccaaagtgctgggattataggcatgagccactgtgcctggccgacaatctcttgacttaaaaccaaaaaaagaaaaacaaaaacccctgccccttaataatacattgtgttctccattaataactcctacaaacagtgctagtgcttggattgcacagctttctctactaattgggttaatgagctatttatccaaccattgaaggctgtgtcaagtttggtcatttctccaggttccatctctggagatagatcgctggagatacatctctgcaaatatcggctgtggctgaagacctaacggcatgaggtttgtgcaagtaatatggcaacctccacttctgggcgacggtgttgtctccttttctctacatattccaaccagagagagatcactttactggctggcccctccacactgctgatgctggtataatgggagtcttccatcagagcatttcaaccacaatggcactattttcccaatcaaatacacctagagattggacactttaagagtatcaaaacaatataaatgtagcttccttatagcacaactgcattttatcaacaacaaactgttctatgaacgtcaagatccaagaataaacaggcctgagaaagcttaccttccacgtggccgcgttgcgtcggaagtaagcaaacattcgtgtgaaccagttatagatctcatttagtgttagctgcttttctggagattcgagaatggcctgtgaagcagaatgtaacagaagataatttatgaccaaatcagcagagtcgtcattccacagtttctcgaaaatataaaatcactgtgattcagagctaaatcctgagaaaggttttacaaaatgatctaagattaatggttgtatttaacagttcaatagcaaaattcaaaatggaattatctaattgttttgagtttttatttctgtttccgtacagaaatattaatttattagtcattcataaagcagaatcaaagagaaatgcaaaacatttcactagctgattaaagctcagtaattatttagagctcagattaattctagggatcagagattactgtagcttgtgataattgacttgccatctttaaacaggctcattttcactgttgtgtgaaatgaatttcctaataatcacatcgtattgtaatacttaatcaaaagcaattatgttatatattgcagttttaaaaaaccttatagaaaaggtttcagcatgcttgcatactaaacggtttttaaatctacttcatcaatatatatccatgtacacatataccttctgacagaatttcatatactgtgttatttacttacctgcctaattaaagatgcatatgtaaatggtggtctaacttctgcgttcttataaaattcttggttctgcgcaatatctgctgaataagaatcattgtcctattaattatcactttttcaaaaggggctggtctacaagaattgcagattacaactctacgtgaggcaaaaggtggagtatctacctgacgaaatgggcacgttgtatttgtctgagtaccgcctgcggatgggtcccaccgtgtgcatgctggtggttgtgatgacagaggggccttgggtgacgggagtcaggggggcggttggggtcgttggagtatgaggtaagctctgtggagaagcctccgatgcggacttggagagagtgacacttgataccagattcaactgcaaggaaaaaaacaacgtcttagaagaccttcagaaaaccagagcaacccaggaaccacatctagcaggagtaacacagaggatgcgtgggcaccgtttcttcctctatgtagatggtatgtttaccatgaaccgaaacacacggtgagtcctgcgtgaattcacttaggatgcagtgtaagatatctctggcagcggtctcttttccaaaggctgctacatgggtgtttacaggctcaaaaaggggttacctacctgagggagtgtgagaaaccctgagtcaagacatttatttcattgtgatgtctcacctataggctttgatcgcccatcaggccttgtcaacctcaaagagggagagaagtccttagcaataccagtgaagctgagtattttaggtgacaccagttgggatacgctggtgtagatctgaagaagtgtccagcagaatttctgcaatatgctagcacaaccaaagagctgtttttacttgatttttattaaaattaaactttaataaatgtaaatggaaagagccccatgtggctagtagctaccatactagacagcccaggaagagcctactgagctccctcatgcagcttcgtggatgacgagaactcctgcaaatatgtgtggcctatttattactcatattaaacacaatgggcctgaccccaccagctgtcatttgtttctatcaatcaatcaatcagttggcagaaaataatccttaacagcattatgaataacctttattaaatctatcaaatacaggcttgggatctgttaattttttttattgtgacattcttttacagaatacgggagatctgcaactgaggtttttgatttttttccttcaagttttgaatgttctataaaatgggaaataatctgcttcaagttaggaaatgaatattacttatttgaagtagaagagaataaaataggccgggcatggtggctcacacctgtaatcccagcaccttgggaggctgaggtgggaggatctcttgaggccaggagtttgaaaccaggctggacaacatggtgaaactctgtctccattaacgcacacacatacacacacacacaaattagccatgtgtggtggcacatgcctgtagtcccagctacctaggaggctgaggtgggaagatagcttgagtctgggaggcagaggttgcagtgagctgagatcaccactgcattccagcctgggtgatagagtgagactctacctcaaaaaaaaaaaaaaaaaaaaaaaaaaaaaaaaaaaaaaaaagaaaaaaataaattaatgagcactgtttcaatttatctttcttatcttcaccttaaagtactgttcttacaaatactaaaaggcataacccttccccaaaatttgttgcaacagaaatattattttacgtctggcaatgctgaagaatttggttgttttcagcgtatgtattactgtttatgtgctgtctcagatacacagacccaccctaaaatccaataaacttcagcaaagtaggcttacttggtaatattttctcaaaccagatttcaaatcacttaccatagtaagtctatttcaccaagtctaattcaccattgctatagtcagtcttaagtacaaggcagtatttgtggaaggtattaaaaatgagattcctctgagatcataatcaaagaacttattaaaagagagttccaatatgttgggaagactcgacctttactcacactctagttaaaaaaaaaaaaaaagggaggggggcctgagaatcctctctaatatgtttcaggagagtttcataaaaaagcaatgaacctgaagaaaagaaagatcaaatatcatgaagaaatactaatggaaaaatgtaaacatggcgctggaaacagaatgttgtgagctttgagttgtgctttcctttttattttcagcgtagaatgttgtctcggtgagcaagagacaatgcctgcgaagagcaagctctggagatggcactgcccttacaaatgccccagcaagctgagcagatgccatgagcgggtttttctctataatgttggaaacctggctttctgacacacatttgcaaactaagtgtgaacagttcagagtagcagccgcaggatggggcagagctgagaagccaaggggggaagagttggggctgacctcttcttcacctcgggccttaatcactgaccaagtccaggaacagtatgtataagcatcagcccaagcaaagggtcaaggaaattagtgcatgaaaggctaatgctcataaatatacagcttttataattcagacgctgctaagcctaagaatctcagagcgctttggaaagtcatgggtaacatttgtaaaaatcatgttttaaaaccacctgccactgtgtggtctccttcaattctcataccaccactaatatctgagatgttattactcatactttacagataagcaaactgaggcttggagagattaaataatttgcccatattcccaacccagacccaaggtcaaaccacacacttgtatgattctagatcctttgtataatcatcttatgcctagttaatagcaaaaatgaacactaaccagtttcatttttctgtatgctcatttttggaaaagattccgtgcagagcattttatccctgcttatgcatgacaatcaacacgtgtaactgagcaaatataaggcagttactcctacaatgacaaaaacaggaagaaaacagctaattgctgcccttgaagcgcttaccatcaaacacatacgtcagtcaaagggcaaaggtacacagtaaccacaaagcagttctgaggactgactatacttctcggcttctcttttcagtttaagaacttttccctaaacactgtggctttctgaaagatgcaatgaaaattacaaacacaaatgtccttcatgcctgctccctttcagttttgggaggaagatcaccaagttaactgagttccagtttcattgtcagaaatcaaaactcattcagcaagtgcaagcccatctttttgggtgttcacagctacgaagaatagacaaatcccacagtaaaatgtcatcaaaatgccgaaaggatgtgagccttgtagctattaccaagatcgcaccactaggactctttctaccaaaaaaaaaaaaaaaaaaaaaaaaaaagcaacagcgaaaaataaaatccctccaagttagcacaatccacaaaggaagagatgaaggtagaattttctggaggcttttgaacattagcaagtgggaataaatactgagccagaagagagcagagagggggcttaccaggcttgacaaatgacaccgtgattcacacccactgctgggctgtctctaataagccacagaggaagcagccaatctcagctaattaccagataaaaatgtattgtaaggactctaattaggagacgcggatggaggtgatctaatgattaaatgctgcattcgactgaccccaccatcaatgtgcagtggtgcaagatgtcactggaatattttgtagaaacagtaattttatttcgaggaggggaggcagtaatatttgtaatgatggctatgaggtaaactaattaaaagacagttcctagaggaagagggtggctgagagcagctgtggccattccaaaaccaagtgccaagtctcaatagaggagctgcagtcaagtggaaaatttctgcctgacctctgcccttgctattaatttgcaggaaaactaatgacacatatacatattcccacaaaattgttctaattgctaatttgccaaaggagcccagattccaaattaaacatgactagcccgtgagggaaggaagaagaaaaagctgtacactccaaacacagggtgctttgccacacaaaatcatttgaaggctgaaccaacaagttaatgaaatgtcaaccttgtcaactggtacagaagtttcttaacttttaaacttctgtttgatgatcacatgcttgtctggaggagaaaccatcttcgaaagggaaggttgagagagaaagaatggagaagaaagactcaaagcaggctctgtgttcaaaccaaacctgctctcttaattaaggcctctttgaaaaaagagtgcccccccaaaaaaaattaattacagacttagaacagaagagcaaatggggaatggtgtgtgtttttgctgtaatcttgaaatattcatcttaattgtaaactattaaatcttaatgtaatcatcaattagaaatgaaagcatatgtgctttgtgtttctgattgcagttcaggttttaaaagataattttttctggggcatggggcaggaagggaatggactgggagggtttcttttcctgatggaaagcctatttttcttattgtgttccttttctatttaaaagaagttgctatgtttagaaaagtcagtaactctgatattttctacatggcaagtttccatcatgtgatgatttcagcaaagataatctctttgaaactctggccaaaagttaaattcttatgtcatttaaaattgctgtagggttttattttttaaatttatttgtactctcaggcatcagcttttcttttagccatcgaaactattcaaacttggttggctacccactattctgcttagtccctttttttttttaattaattaatctttctttagtttttaacagtaatctcccctcctgtttaaagatgatgagtcactcacattaaaaaaataaactgctgatgtaaacccctgacagaaacagacttgtaagtattcccataagaactcatttttatttttgtttgtgctcttgcctcacatgaaaacagattctgagaacaaaagacaaacctgaaacccaaacaccaagggacacaactgcgtagtagggactttcgggctcacagaacttgtttttctgctcttgttttactggcctgagccagctcaagtcctgctttaactgcatggcagtgtcatttctgggcatgaatcactgagttcagagacggcctttctgaggctggagggacgttaccaggccgtgcggagggcaggacaatgggtggcagcctttgttacaagcctttcctttcctttcctttaccatctcagcctggccctgttttagagaagcgaactcgtggaaggttatgacttacttagaaggtggtggtactggcagggatactaaaagcaaaaacaaaaaaattctagttgaaaggttggtgggggtggggcacttaatgaaaaacagtatataaaacagcttttgtgtattgtgcctaagaatccctttttatgactgcttaatattatttctccaactctaaagcaaggacccaggcagcccaaatgatccttgaagagttaaaagaccctttcttttcgggggggcactttgtttttataggagctaaaaactctttcaaaacagtcctaatggctatggttagaggaaaagaaaatgtataaaaatgaaaatctaatactatatttcattacaaatatccaagttcctgtaagtgctttataagattttcgtcaagaagaatataccacctacactgtaattacgtgcccaccaaatctaaaagaatgtggtttctccaggagcagaagttgttctctgatgtgcaggaataccctaaagcaaagcgttcttctcatgtactcagtattataaaatacgatttacagtgttttcctgacataatgacagagtgtgaaaagtctttttaagaaatccgtagtaatttaataaagtcatcatatcacagacatgtttctttttgtttttgttttgtcctcttagtttttcactccctcccccaaatgaagtatcttggcaaattctccacagagtaagcacggagaaattaacctccaagcaagacatttgggtgtttactttgagaatgtttactgagtctggaacaaaagaatatcaatcattttcattagggcagtttactattgtttgtttttgcttttctttccatagaaaagaatagaatcttttaaaataacaagaaatgtggccattctaaatgtaagaactgcttttcggctctatgtacctgagagctagagcttagggctgctctggtcaacttacacatactacatacgtccacgcagggtccagtctttataaaattaaaagtttgaaaagcttgtcttaactgatgttggctattccttttcttcctctacactgatactcaccaatcagagggaccgatctgggcacccactcttaacctaaggaaaggttcacaaggctgacctcttaccatttcttcctgctcatcttgtaggtttcagcttagacatcatttctcccagcaatctcccctgactttaccattctgggtcagctgttctacttacaggtagtgcaattcacggaaagtgagactgtgtgagtatgtatgtagtttatctgttatttcttttaccagactctgaacacctccatggcagggatgggccttgctcatgtgactgactacttgtcacgtatgtcacatgctcaagaaatatttgttgatggaatagtttgattttaaatgcagaaattccctttccataaccaacctgcaccttgagtctttggttttgttctgaaaggaagattttacttaggtttaaagagatgtgatagcaagcaggaagaaaggccgtcgaaggagtctgagggatgggaagcccgtgagctcctgccccagttcacccataagctttcttcctcagatccatgtccaaaaacttgggcaccttcccgagatgagcgtatcctctaactatccaaatctgatgagtcccacaataagatccagaaaatgcgtctatgagctgatgtaaaaacaatctaagaacgttttagcagtttctttgatgcaatgaaatgaggactggttggatgattggatacagcaaatgacacttaacacccaaatggcatttagtgaaaagcaacatttacagcaaagcattctatcacttagtgactaagaattttaaaataaacacgaggtttcttctacacagaaatggaaaaaagaaaaagcttcatgaacttactggcaaggttgtaacatgaaagtccccatctatggttagatttgaatcctggtgactgcctgtttcaaattaaagattctagaaggatactcattcaaacaaacgccatgcattctattatttagggcggaataaattaattacagactgcagggaatattttgcacatgagaatcagtcaccagatagctctgggcccttaaagttgaaagcatcaagggtttgctgtatgtgtgtgcccttttttttttctttttggcaaagaagtgaaaatttatgcaaaacattacacgtctaccttttataattaatttcccaatgcctcacctatacatattttaataattcctgatttataagatggtatctttaataaaattttctattttccaataaatgaaaagaaggcaggttcactccgacaacagagtgtcacacaatatctgcttgtcaggcaccaatttttacttcttacatgtaagttaaaggataaggaatttataatgctgcctgtgaagggaaccacttttcatacacaaatgtgatctttttttttttcaaagggtaatacaacagtacatttacataaactaatccaaacaatctatgtatttgacaatggcaaacctcacacagacggcctattgttggtttacatcttggagttctttatattggcttgtagcgctgctctagctgtcaaaggtttgacttggactctaaataaatggttatagaagtgctgtgcagcgatattggacttctttgcaaaagaaaacctgctgtgtatgaattcaaaagctattaatttttcagtcaaaaatattcgtgccgatttcttctaataaagaaatactgtgctgagctactaagagataatgttgactagtggtagagaattttcaatagagcagttaaaaataaatttagtaggaggtccccttcaaagttacaattttctagaaagtaaaacatttttttttaatactaatcaagacaaaccttccatccctgttcacttccccccatgcttttccctgtttaccagctgcttaacactggtccacgtgaagaatcccaatggtccttttgtggcccacaggggcttacacacatggtgctctctgccaacacccagcccggtcactcgccaagcgccctacggggttttgtagttccttatctttaattgtatccttcctcttcccaagaagccccaagatccaggcctacagtgctgggtccaaccattatcctatcactgtttttaatccgtggaggaagacagagataatctcattctctcgcttgctgctaggtgcaaagatttgaacccttcaatctgggaaaaccatttcactaaagccatctgaagactttcaaaaagttccaaggcagtgaatgccctgtgcaattggctatgcttcttcgagatgacttcagccaagttgtctcagaggctcaccattttgcttagctgggttctagaaggaggggttgctagaaatagcacagctgactactgatgccacaacagtgaatgacctggttcttttttttcctttctttttggtagcctacacatctagtcctatagccatttactgtaaaataatacacggaaactaaggactccttcctggtaaaaatggatgcacgaagtgtttaataattttatgtcctttatctcagtaatgtgttctgtttcagacattaattttgcctgccaactgcatcttggcaggctaccatatttgctgggttaatagtctgactccgttttatttctatcaccataaatcatacatatatgggtgtatgtttgctttatttatagaaaaaaatcagtcaaaacagataaaccaatactttgccattacgctgcatcattgcatattgattaaaatcgctggtactaactatagattgtcaacgctcaattaattttcacacagtgactccaagcaaaatcaaataaaggcagtgtacctttaaattttacaaatcttaaaatcaagaagcaaagcactgtctccattttgaataatcagttaaagctactaggagaattttagaaacgtaagaggaatatgaccgttaaagagatcgatttattacaaggaaggaggtccaagacaaacttttaggttcagacacgatccttctgcttcggtattaacagcctgtgctgggatgacacccttcaaggtccagtaaaagggaataaggcaagaaagaggagattcttacaaattaaatgtaatttcagtatactgtgtttggtctcctaactgtgaaggaataattttcatttcaaactccttagtaaccattagagcctctccataatttagcctctgactattccaacactaggtttcctatgtctttcctctgttaagagttagactggactactactccctgctctttttcctacacaccactgtctctcagcttacccgagctgaaatgcctctttgctttgctgtcatggtttagctgtcttctctgcgttcctaccattcagaaagattttctttttccagggagctctcataatgtatttcagtaccttgcttgggcaccaatcattctgcctttaaagaagagctgggtgcttgagtcttatgggcaaggaccatatctgaatcatcctgtatctccccaaatgcctagcatatgaccttcatcataaaggataaccagaaacagtcgcatgaatctaaggccctcaaaactcaaagctccaccaaagtaggctggtcctccttcctccatttggggtggggaagtagaaaaggaatactgtgagttttgtttttttccccttggtggggatcaatacttacgggctgaggggcggctttgggttctgtagacttcacatgcaggtgggtcatcatggcttgcaggcgttctttgtcttttgcaagctggcaagaagaaaatgctttgttatttctctgaataaagatgcatggctcttaacaccaaaaatgatacatattacaaattacgctatggcaccacagcacatgataaaatcattttcattgcttgtttttgaaatctacatgaccattgccaaactcgaagtaaccggaggtgttggtgtgagatttctcaacacaagatgcattagactttaactgggaagttctagacctgctggcaccacgcagtcccatggaacacagacagctaaaagacaaatgtgaatcatgcctattaaccaaccttattcatgagaaaagccaagggaaagtgagctaggtagctaaaacccataaattcatctgttgtggttgtggaaaaactcctagacagatggatacatttatgcaaaattagcttcatctttcttaacaggtaggcatagattaagacagtgctggcaaatgatattagcaggccaggagcaggctccaagggatgacaggttcccattttcaaacgagtgtagaacaagcttgctcattcaatttactcaagatttgagtacctgctatgtgctagtctcatcttaataatttaagtctccttattctataaaaaaagatcttctgaagtcacacaagtttctaattggatatacatagtaggcactcaaatactactgattggaagctacatcctttatgcttcgcttggactgctttaactcgatattttcaatagttcaagacagttgggcataggggacacataacgattacttctgtaaaagaagtgggaaatatatcccctaaagataaagggatagtcaagagaacagctgtggcatttagggaagatggagaagagattaatatgagagagagagaggagagagggagagaatacagtttaatttcaatactttggtacatcatttgtccaaaataatgccttagatttaaggagggactcattagttctgtcacataattaaccttaaatcctttaaaaataaagttttttaaagtcaaattattcccaaataaaaaaacaaatatagtttatctatttaaatacagttattttctaaggaagaagggggacaggggtcggggattgtggaaagatggagaaaagggaaaccgtacaaaagggagaagggaaaaagctttcagcttatccctactggatgactcagtctccagccatatcacatttgattttttttttctttttattcccttgtggttcagggaggaataaattaagaaagaaagaaaaaaacagccgtacagtgttagcatttatctttcaacaaacaggaaatgaaaatgataccatattaggagccacttgatggtattcctcctctgttctttagtaagttattgaacagccaaactaaaagattctctgaacacataatgctaaaggaatttagttttccaaagaggcttagaacaattaaaatgttgggaatgctatttttctgccattattattattttttttaaaatgtaagtatcctaagctttttgatgtcaaatactcagactttttaagaaatgttttgttttaaagttatcaaaggccagaaggaattaagaaatcagttgtatttttcttaaaaacaagcagtagtctgtcatgctgaacaatacaaattaaagggtgagaggtgatatttactgaagtctgctgaatattaattgtgacttaatttgggggtaaacgttgttgatgtagcaattataccttgtaccactaagtgtggtataaggaaaatccaaatcctgggcatttaaaggaaacatcttctccatatttccatccaaatgtctaccaaactgatcttttactggtcagccaaaggtagcaacactacattgcaaacacatacctagaatttgtatacacagccactttcataaaccctggaagtaactgccatcggaaacattttcatatttttccatgagcacattgcttagaattcatcgtcaattctgagagttatccaggaacctcaattgtaccaccctagttctgcttttctaaaagatggacaaggttacacaaaaaggcaaaaatctaactttttggttttgtttggttagtgaaaactaatgtgtagtatcatactcttgaatgagttttagactttaaatcaattacagctctaacacaaactgttttaacaattacagaaagaaacccgccaaattcagtttttcttttttttaggcaaaaaggctaaacattcacacctattgaaaccacatcctgtctacaatgtctgtcttgcatttataatactaactgctccttccaaaagctttcacattctttattactttttatgccatcatcccatgagctcaccatccccatcaattttcacggcatcctttcattattaaaatatgaggatacaaacatttaatattagcaagcatattccagcatttcctcttaaactatgaattccatgaaaagcaaagaaaaggaggttgagacattcaatccgaaggcccactaaaatttggttggcaaattaaagagaaaatttgtgttgaaatatcagagaagagaattactctctaaaagactttcccagtgggtatggaatgagtatctagcataaaggaaatgacaacggcctaaacattagagggagctgcttgtgcaggggtcattttaatctactgaatttgttcaaccattctgtagaacgatggcagggtgaaaacggttaaggatgtggacacaacaatcacactgtgctgtgttcaaatcctggctcagtgactcagcacattatgtaacctttttaattaccaagtttctccttctaaatacggaatgatcatctctgaactctgaaggggtgttctgaagatcagatgaggtcttgcacataacaagcttagcaaaatgactagtgctttatgaatgctcaacaactttctaatttttttttttttttttaagaaaagtgaaatcggtccagtgtatttaaactactggctgagtatatgtttgaaatctggatctgcctaacaggggttcaatggagtttgcagttgggctaactgggaagggaaataattttgatcgtttaaagaatggaacagaaagcaaaggaaagatgaagcccacttcctatcaatttgtctcaggttcttactgtatcttcccctcatcttgggcaaatatttttctaccctttggccgaaataggtcatctcctcttctattagccatggcctcaaattaggtttaagacagtctgggctgtgaaagatcagaatttgtgtattgcacccgagccactgataactgccaaaggctaggagttccattcaacatcctcaaagatacaaactaagattaatcttaaactcattattttaacagagaaaagggaacacggtttggggttcatttaacatcaccattttctatgttgtcaggaggactaatcattttaaggccaatttggcagttctcactcgtgagaaacaaaactctgctgaaataaatgaagggctttgtatgtgtaaaaatgctagacttcttgaggacagatgagaagaaagggccaagacactcctttgatttaacagaggtaaaggctactgtggctatttcaaatccattaatcctattctgttttataattggggaaactgaggtttgcaaggtaaacatatctgaggtcagggaactgggaaggggcagaaataagactagggtcccagttgtatgatgcttggtctgagtttcccacactagtgtgattctaagaatcacctgggacaataactcaaatcataggtcttagtctccctccctgctctcatgctgaactactgttcctagagttagacgggattttaaattatgaaaagaaggtgtcttttcaaagaatctccatggaaggggggcacatggagttttaagaggcacctaaatgaatgcatgagttcagattatcccatacaatgatgatctccaagtgaaacgactgcggtctcacctaaacatgctggagccaacactccaacagtgaggcttggaagtaggtatttttaaataaggaccccaagtgtccaagtttaatcaagttaagtgagagacactactttctgccacggactgagaaggccttaaacagtggctgtatacgtttcctcagtagtttcgtatacaatgatgatccaaagagattaacccgatgtggcccaagcatatccagttacttaggcagggtatatccagttacttaggcagggtatatccaataacacaggtctctgacgtacatatgatgaaaagaagaaaaacaagggggagaaaaagcagtgactagaaggagcagaactcaaattactctaccaaactgagcatttatcaattatttttgacccaccttgtcaaactatggcttcagaacttagtaccagtgaaaaacttttaaatgagttctttcacaccaactaccgcattcaggtggtgggcaatatatggctcattgcaccccaatcgaagaatttccctacttttattgtactctgtcaccatcttaacgttccttacatgttattattaaagactctcttgacatttaaagcagacgcacactaatactaagtcatagtctaggaattctaatgctcccagagtaaggcaggattttaaattatgaaaaataagtgtcgtggttttcacagaaggacatggaagtgagaaacccagagactctctctcttctttttcttggctccagttacaaagcactggcaatatggaactaccgtgctgttaggacctctctttccccgacgtgctcagggcttgtgcagggcatatcaggaggctctgtgaggccgctagtataggaactgtcctgagtattgcctcaaacagggttagacagggccaaagggggatacattacagataataaatttgctaaagtctaggaggctggtgtgattacaaatagcaccactaatggtacagtaatcacatgtaaagttcgtacggtaattgatttgtgttaggattaatgtctccctctgctactgaaacttgtgcacttttctccctgctgacattttcttagagcttacaattcctggtgtagatgatttgggagatgttggagtgatcccagtgtcaccggactccagccttgccttgctaccatggaatgcccaggacagagctccgcaaggcagagtggcatggcccccaaagccgggttttaaaaccagttcctgcgtagagcccagctgggccacaatgatcctctgggtggaagcgttaaggcaggatcccacaataaaaggagcacaggctacaaaggctgggttaacctcctgggctctgcccttattcgccattggcattaaacaagttaatcagacctcctaaacttcagtttcctcatctgggagggatccctgcaaattatttctttgactctaagaggccagtgatagttaaaataaccatggatttagtaataccttctcaaagaatgagaagaaacattacattaaacacactcattaaatgtaagacatatattgatttccaaatgttatatttttcttttaaaaagtgactcctacctgggcacactggcctgtaatcccagcactctgggaggccgaggcaggcggatcccttgagctcaggaatttgagatcatgctggccaacatgatgaaacctgtctctactaaaaatacaaaaattagcagggcatggtggcacatgcctatagtcccagctacttgggagactgagtcaggagaatcgcttgaacccgggaggtggaagttgcagtgagccgagatcctgccacctacactccagcctgggcaacagagcaaaactccgtctcaaaagaagaaaaagaaaaagaaaaagaaaaagaaaaagaaaaagaaaaaaaagtgactcttagaatcaaggaaatagggtggtgtgtactcacagagggactgtggggattccaagaaattcgggacataaggcacctaggacagtgccctggcatacagcaggagctcaacagctggccagtcaaatggtttccaagccagatgaaataattacaagcagaagatggggcattcaatagctctctcccacagctagtggagtagggtgacccaactcctcccagcttgcccaggactcttccagttttgaaactgaaaatcccaactcccaggaatcccttcagtccaagaaagtaaactgggacagttggtcaccctatttcgtgttaaacagacagattaattttaagagcaatatatccttccactatcctttcttccttatcctacaatctaggcaacgtcttccatggctcccttggcctggaatgtccttgccaacaaccctttccactgtcaccttccccaatccctcaccccttgcttttagaaactctgcctggcagggaagttaaaggcatcctggtcttaccctactaggttgtgtattacgggaagaggccacaccaccttactatctgtatccagtgctccctatataataggtgcttggtaagtagtgactgaatggaataaaatcattaaagaatacaaggtacacacacctccacccccgtcgcctgccaggcagatcaaccttggtttggttgattcctttttcccttgcctgctttcaatattcattttaaagggcctagaggctgaggggttgtagggagcctgtcctgaacctgccccgatgacacatgatgaaaacatcaggacatcttcatccatcagaaaaaatatacagcagtttagcaatgtcacatgatcacagaacaaattaaaaccactacatgtgatcagaaatatgtatctgtaccactgtctcagcttcctaagtgaagtcaattctgtcagatgttttttgtattttttttttttctgtctgtgaaatcagatggtttccccttttccccaaacggaattaaaatccaaccaccactgcaactttttgtgacatctcttctttagcttagaggctggaagagttcatatgaatgtcccacctaagaggacccaagtaatctggattcatatgaatttaaatccctaggcccacggccggtggacagtgggggcccaatatcgcggaagcttcaagtgtttccttacaatcctggccatggcatttctcagtggggagttcttatcctcaacaactttctagttcctgtgtctctgtccctctgtcatggtgggggtggagggaagactgcacatttcataacctgtataagattatgtatactgattatgggaactttgctccattccatttctaactcatctcatctgtacatcattccaaaagaatctgtcaaaaaagaacagatgaaatcttactgcattccctgatttcaaaaagccatgtatgtcatcgacccaaatgatttttatggtgtctgtctcactgttaggtgtctatgtgtatagtataaggaactcacacacctctcagggtttacacttttagatcccagttaatagctggggtccactggtaaaatgtttaaaaattataactgtctttgcaataatgaaatgcagtaggaaatgtttgaaaaggctcagaaggcccactgagatgtcttcttgactcttctccaaataagaccagtagaaggttgcaacaagagaatggaattaaccaacccttccctgttaacaagctctacataaacattctttctaccgctaagaaaacattcaccatatatttttacatctttcaacaataatttaacaaacatagatgtaccttgccttttgtaattggtatttctattgaaactgtggtttcgtaaatcaagtcatattttattttatgattattaattttcttgagatggagttttgctcttattgcccaggctgcaatgcaatggcgcaatctcgggtcactgcaacctccacctcccaggttcaagcaattctcctgcctcagccgcctgtgtagctgggattacaggcatgtatcactgtgcctggctaattttgtgtttttagagatggggtaatctccatgttggtcaggctggtctcgaactcccgaccttaggtgatctgcccgcctcagccttccaaagtgctggtattacaggcgtgagccaccacgcctgcccggcctcaagtcatattttaaatacacagggacaggacagctgtcatgcacagtgctgattagacagtctaaatcagtctccacaacccattgtctttatttctgcccagcttcctgaaatctcaccagtacagccttgaaagcttttcagtttaattcaagtttggtattgtacagatagctctgtgaaggggaacatctccagccactatcccctatggctaacagtagttattttggaaaaattgcatctttttctttagggaggtttgtctgatagatcagagacacaagggccttccattttgggtgaaagttttctggggtttagattcaaggaggctgtctaggtacacagcacttaagtgaccttcaccagctttggttgcttctacagctactgtgccctctgaattgtcctgtggaatccttttatgatgaccctctaggttagacatcctgaacctccatcgatgtatatggtaagattcaatctgagcttactgggtttgcttttacgatggggcacatgtgtggtctatctctaccacatgtgaacacttacgtaccatgctgaagagagaggtcttgtgagtctgagtggcaggggagatttgtcctcctactctaatacagtgatcatccccctttggaaattgatgaaaacttaactgctctttcctgtagtgctacgtgggacaaatgtttttcaagttcaagctaatcaatgataattttgtaacacactgagatacttggaggttcaggtttttcctggactgataaatgctttaagaaatacgaaataggctttgggtcagtaatgtgcaggtaatcccctctaaaggaggtgatgcaccagtcagtggctgagagaacaagggagggacgatgccaacagaaaacggaaataggctgtttgacgacaagcacatctctttaagtgttcctgctgctggagggacctgattgccccaataattcaggttctatgggcacaatgactggtagtcaagtaagttaaaaagtatgtttctagacactggtatgttaagtggcaaatgcaacagcacaaacctagcaatgctgaactgcggagaaggaggaagcctataaagaatagattcgagtataactgtactgtgtcccaaatgcccccatatgtggtaggtctgcaactcaaagactctcaatcgaatccttggttaaggcttctcttaactgtgtctcagggcaagggttctttaaatactaaaaattgctaacattttcttatctatttcatctgattgagtgataactaatggatataacctgctttggcttggcccctttctagcactgaaactctcttttgaataaatttctggtgttctcaagaacctgttaatgtcagctagcactgcccaatgaatggacagtcgcactagcaaattattttgtagtctattcttccttctagagtgtaagaacttggagggcagctttatctgttttaatcattgtactctgcagtagctccagcaagattcctgctatctgataggttcgaaatatgcttgctaaataagtggatggatgaatggatgtctgggtggatgaatggatggatggatgcatggatgaaagaatgaattactatccctcgtccagctttccatgacctccaaaactggcaggcacttgccatgtgaagagctagtagggaaaattgacccatgtggagactagactggttttatacaccctggctaagaagaaagagataaaagcgggtgagcagagcttaggcagccagaacctaaggggacaagttgctaatactataatataaattgtttttctgatcctcttgaccaggggtgcctggcaaacttctgtaagagccagatcataaatattttcagctttgcaggccatgtagatttcagtttcaattacttgactctcctactgtagtgcaaaagcagcaataggtaatcagtagatgaatgggcatgagtatggctgtgttctcatataattttacgcatggacactgaaattggaatttcctagacttttcaccagtcacgaaataatgttcttcagatttttccctcaaccatttaaaatataaaaacattccttagcttgtgagatttggcctggggtctgtgggttgctaacccctgctctcaacgaggtctatgtcatcactctgataattccctcaagctttgcagaaatggaacacgtcagaattagcctgtcccttcttccattacggcaaactccccgacaaaaacattacgaggaacatcacaggtaacgaccacattgtactaacttctggccagatcatctttgatgtctatcaaagctgaaaaatctgccttcagtttgatttatagctgaaggataaaaggaaatctagaaataaatgaaatctataaataatcaaagaatccttgtatgtttgtactacttctaggccacacccaccaaaaaacaacatgaaagctgccaggaaataaacacttaatttactgatgatggtctaaatcttttccttctcctgacctctttttgtggagagcgaagaataattcataaaataaatgctcacttcttgagtaattaacaatggctgaacactctaatctgtagtctagaaacggctacccgacaaaccatgacaattctagtcaacgatttattttagcccatcattaagaatttaatgttatcatataaataaatgcaggagctcctatcactttataagtaccaccaatatgtacaaattctggtaggaaggtagtttattctttctctttttttttgagatggagtctcactctgtcgcccaggctggagtgcagtggcgcgaccttggctcactgcaacctctacctcccgggttcaagcaattcttttgcctcagcctcccgaggagctgggattacaggtgcccgccaccacacctggctaatttttgtatttttagtagagacggggtttcaccatattggccaggctggtctcgaactcctgaccttgtgatccacccgccttggcctcccaaagggctgtgattataggccagatcttccagtttattcttttgaatccagtttgtcaagggctgtgtcttaatcataaaagaactctgtgggtgggttacatctactactgtttttttcttctcaataaacatgttaatttaaagatgtttccaaagacttattttaaaatgttgagattttatgatgtgcccttttcttgtataaatatcttactgttctaataagtttatatccagagtttgaatggaaaaatattaactggctaacaaaaataacttttgagacaaatcctactaaaaaaatgtaattggtcatataagatgataactaattaaaaaaaaatcctttctatcctgaaaagtcacaacaaaaagtttaagtgtattttggctgatttttctctgcaactatttgaagctgtaaatgacttaactcagtaaaattccaaatgtaattatcttctgtacttagcctagggctctccatatatctcagcatcgctgtcttgcatacaaaataggcttttcgatggctggtaacaatataatgtacaatattgttttaatttcccctagtcggctaacctcttgcctacactagaccagccagaggaagaagccactgtgagtcatcaagcactcaaaagcattttggaactcggctgcataaatggggtttgcagggtcaggctgttgcaattgtacattttaataatctccttttctgacctaatttttacttttagaaactaattttctattaattataccaagaatggaattattgttaaaatatggtagtttatcaagttatacccggaagtagaactcacatttaaaaaaaaaggccccatctctcacactgtgattcccaggaaaatctgcaaactttattttccctagtcataaagcacattcaacatagcccaatgggtttctaaatactagattttatatatatatatatatatacactctacattaatatatctgattatgtgcatgtgtgtttaagatgtgcacggtgaactctcagttattcttagtggtggagagaaaaaaggacaatgcaaaatgagaaataaacccacatataacttccattgcgacttgggaaaacacggttttgggtgcactgccttgccgtcttggtctcgctcgctctttctctcttcattcacattcattctctcaaactctctttccccaagcttgtcttcctagctccagtttaatcatatgagcaacgtcgaggacttacactgacaacagataaccagaaaatgcaaaggagaagtgagaagagagggaaagtgagagagagatggaaacattcaaagtggccgctgagagttggctgcatacacacaggtgcccagaatttggaaacctctgagcagcagttccaaagagtgaactggggctgaacctgcccaaagaggtaaaaaataaaataaaataaaataaaataaaataaaataaaataaaataaaataaaggacaatgacaggttttggaccttccattcaataatgagtacacaggaactcattacagaacactacagaaatctggaatttgaggcatactgaggttaatattaaaaataaatgtggttttacctgtagctctaactgctgtacaacctgcatttgtactctacattgggctgtacttctatcgtccagcgcatgctcactgttgagatgtctgcaacaatacatagaaaatcattaagtgaaatggagaaacaaaaaggaaaatataagttaccaggatgtttaagcataaactaggcagcgggtctagctcccaggagatagtagtccagggggtggcctgtcctttccatccccaccctttaatgctgtcattatgtataatgtggcacacactgttatcacccaaagaaaagccttccagggagaagttctgcagggcgtctggagataaccatttacacataaataagtaagaaattcagccagggtggcatttcaagaccaccttaatgggcagcaatcagagacagggcctgctaggtatttcggaagagtctaatttgtatgggttggaacaggatcgtctgaccacaggaaaactgacttcatataactgatgatacatccatatactgaaatgcattcacgtgaatgtcagaaatggcaaagggtagaaaagcaactttaaacatatgaaacctgaaacatgagcctacacatgcaaattatgtaccaatggtggggggtgggggagagaaatgcagacaattatttaaaaggaaaactctgcctgggttcttgattgttgatggtctagatatccagtttacggatgattcaggccacatgctgagtatgcctgtcttgtggtccttttactatttattagactttccaacagggaaaaggctaacaaattgaaatttcaatcagttttagcatacgcaggagctctggtaatcagagggctgaatcaaagcctaaagtcttgaaaataaaaattcatgtctctacattactcagtcctttcttactagtgatacagcagacctgattctgtaatgggatatttgcctcaaattctatgaacaagactgtcatgatatttaggccacattacaatttggatgtaagataaaaatagttgaatacttcaataacaacaacaacaacagggacagctgatttttaaggcttctgggtgctaccctatttcaggtttttgttccaaatgtggtttgaatcagagatttaaaacccaggtctgtaaccctttgaaacaactaagtaaaacaaatgttcacctctggtacttgactaggtacaattaaagctcactcctttgttaatgcatcccctcttgtttaacagccctcaaaatgtagttatttcatgtcctaaaactacttgtaatgacttttaccttaaaaacaaaacggatacaaattctgctgttcttcatacttattcatctcatcctcgctcccctccaaaaaagcagtaaagaggagacattatggtgaacaacagtgatgcaccttcaaggtattacctccaatcttaggccagaataatgactatggtgtattctgtttaaagagtaaatgaacaaacaatagaagaccacacaaggaagcccgagctaagcagtttcacatgctgctcactcacctggggtgaataatattttacaacttgcttttaaagaagcatgttgtaattgagaaaatggcctagttcaggtgttcttaaactgggatcattccacttcttgaaactgcatgcaaaagttttagcctatgttttggggccagggagggtctgcaactgtcaagagatttgcaaaagagcccacgatcctcaaagtgtcagaactcgggagttagttcaattcctcattttacaaattcagaaatcgaggttcaagagatcccaagagacttgcctcaaaccacgtgggtaatcagtgccccaacccttgcaattagtctcttgtctcacctaggattccatccactcgatgacactgtttgcttcactggaagtaaagaaagaggctttcattctaataagctgtcaccaatgaaacaagaccacagaccaggacccagtggactccctgagtgttgagggactttggtaaggaaatagtactaaacccacttataaaatacattcattggaaggagctggattcatctgtttaacatttgctaagaacccaaacgacatgccagatgctactggaagctgggcatcactgccctcaagaaattcctccaggctgcaccatcgctcttcaaagtcaccctcgccaaactgataaaagatccaaacggacaaaaagcaaggccttcacttacttgattactccgctagcagtggatctacaaggggttgaagataatgaaacgcagtgagagcctggttctgtgtctcttttgcaggacacagttatgtccttaatgatgtttaaacacagtatttgtggattaacacatatggtgattttgcactgctgttgtgtatatataaatgaataaaccccttttggattccctaagactccttattttttttttttcccatagcttcagcagttaattatgtcatcaagataagagaaatcaaatgaagccagaaggaaggcaaaggacaacaagaataagaaagatggaatctgtcacaagcttgaattatgaatataattatgcgtgattattttatactgcaaagatgttccctttttctgcacatttataactaatctaaataagtagcttgccggcagacaacgtatttcatgatttatataaaatggtcgagataaggttcacgactgaaggaaatatgattggaggatttttatcagcctctgcatgaattactgtttgaaaatgcttatgcaggagcatttcattaatcatttaatcataatcctagcaggatgtttgaactgatttcacaaataccctttcatttcactacttcattatgctcgctaatggatccaatatattatatatatcataaattatatcacatcttcagtgaccatgtaggtcactgtcactaggcatgcttccgtgctcaacttgggagttcagcaaatgttgcccaagctgactttgggaatttcactttttttttttggttatttactatagtttaaagtttcctttatctaaccaacataaagaaaacacagcattgtggactttaagtggaaccctacatccccccccaagttcagaaaattaaagcaaaacaattgtttctgcaagaatggagaattcaaatgttagacaaacatttgttttgttaaaaatgccactgtattttgttttgtttttaaaatgatcacggctaccatacactggataatttggtcagcagaaatagctctgggaaaaaaaaatattacatgagcctgttataatcaaggagattagtaaaaaaaaaatgattttgccttatttaatcacgatgatgatgatctttctgaaagctagaaatgtaatatgaaattctgataatcctgttctttttgataaattaacacctacactatattttcttccgtaacaccaataaaatgaaaagagagttgtagtgattaatagttaagaattattagctgaatagttaatggctattaacctattaactgaagtgcacagttttcattaacagctatgtctttaaccagggtttaaaggtgaaatgcaaaaattacagatataactaaatacttaacgttgtgcacattttgacgacttaaaaaagaaagactttctaccttcagaatccattaatattttaactaaaaattcagtcacctaaaacatgcagcaaaagaaacaaggtaaaggtagattccttaagctttaatttaagatgaatgcaatggatttcaaattagagatgttaagccggtcatacgtgacaagctttggaatattttcttttggtcacactgcttgatggttcttttcatcctttgttacattagggctcttttttataatgacactgagagtcacagtgcataattaataggaaatgaaatattcaaatggcctctaatgcagcccagtgaaatgctgttgaaataaaaagggctatggaaaatgtggagacatcaggaacggttatgaacgttggcatgtgtcatttttccagaccgaaattgatgcaaatataaaatcttgctaaaatacagctataaaaacaacaggctactataaatatagattgtttggtaggattgaatttttattactttttctttaattttttggtagactgccctagtttccattattctataaccatcctaagttgagacatcaaaaactggcagcatctcttagccagtgagctgacactgagactcaggagcagtagtgggtctctgtgaatagaaactgaatcagaggtggagagaaacaaatacctgatttaaaaaaaaaaaaaaaaaaaaaaaaaaaccagaatcataaggagtgccctttatgaagacgggtataagagaaaaaaaataatgctaacttcagttgatttttattcttcttcaagactataatataattttcttatctgtaataggcagaattctactgaaacacatattaaatctgaggattaatatattatttgggggaaatgtatatcaccataaaaacgagaatagaattacacagtcaagacacatcatggatggaaaacacatttggaaagaatgtgaccctgttcatgcatctccaaagacccacccttgataggattgagtttaagtctatcaaacacaatgtacctcttgtttatcaccatatggaagaagcgcataaaaagcagacgtgaagagatttaaaaaaccttccaaaaataaagcaagaaaatccaaagcagaaaaggaaaagtagagcgcttcctttctgcctgtgagagacggagagcatttcaacagctgattccagcctcgaagtatacagcacacataaaataaatacaggtcacaaaaattaacaaatcatcataactgtctaatacatcctgggctggctgcggaaaaacaagatcattctggatttatatctgtaagtatgggatttcctggacagctaatatccacaaacaatcaaacacaggaggaacacgggggaaaaaggcagcattatttcaaatttgagctgagagtcgtgatttgtaaagggctgaacaggaactggagttgaaatttgaagcaaggaaattcttgtactaggcactgatggacacttctctgtttctcttggctccgtacaggtttttaggtcactgggttttgaacgtaatgccaaatgagaatctcgctagtacagaagctttgaaaatgacaactaacttaatctctcaatttaaataaaataataataataaaaaaatctaatgatacttcactcaagagtcagagctttttatgagacctgttgccaatattagtgtcttggaatgatctcatctttcatcctggctaaattccaacacacaatttcattaacccaggtaccgcaggtgataaaactcatttttccctaaagagacagctaaaaagtaccagttatacgtttatgaagtaccagcaatcaaaattatggattttctaaaaggtttttaactacttttattgaaaggaaaatcgctgtctcagacttttgtgacactattgctaataataaattttaccatttagacatggccataatatggtagacagtgtcaataaaagtatggagcaaagatgatccctgtcttttaagtaatgccttctaattacatgccggaaatgatcacatgaaatacctaagctaactaatggctcttaaaatataagaacactcaacaatgcatctacagtgatatagatgtaccgcatgcacatatgcagttatatgtagaattaattgcataagtagacattcaaaaaattttccaatgttttcaaagcctacaagaaaaatttaaatttaatttgcatttctaactaaaatctgtttgttgaaaaaaaatgcgttcaaatgttatttgcttccttttgagcaaagaggtggcactgggcctgttatctttggcaaacttgtctaaacttttctatctaatattctatatatcactagagggcactgtggtatttaggccactttgacctcttcgagtactaagaaaggtcttgaactcctaagcaatgtcagaaaggttaaaaaagacattaaaagggggaaaaaattttttttggtaacaccctatttttatttttctaaaaccaataaaaaatgcatgataagtagaaaagtcaaattcataaaaatatacagctcattttgcaatactcaaagacttgtcacctcagatctgatggggaaaattttcatcctcatcttctcgagatttaaattgtgaggctggaatttgatttgcatacatccacaattatagacagctattccctctacatggctgaagtctcctacactaactagaggtaatttcactgcagaacattcaggcgtgcaagccgagagccacaaatgggtttgaaacaatttatgatatccggcctccttcgacatgtattagcatatacctggtttctttaacatacactttgtttttccaaaaccacaaacatagttgctggaatttcatgtggaagtgcttaaggggctgaaagttaacacctttgtgatccacgctgcctcatggtggctgttaaacaaaagcctctttgtcgaggctttcttgaagtgttttcttaacatgttccaagtagttttaggcagggaactaaagtaaacaagatgttaccatgataaaaacacttgtgaaaacattacagagcacacttagtagtttctttcacacaaaactcttcacagttttgaaaagtaaaattcacagaaaaaaattttaaaaagcaagttaccaatgaaatgtcctctactgtctacagccctcgacctttcgggaagggtcaaagttccatttctgggcattttcttcaacatttctctgtcttccattacagcacatatacagtttattttggctttcataaattacatacatctaacaagcaagggaatttttgttttgttctgcatgaagtttttctccctgagaaatcaccaaaagaaaaaaaattcttttcaaataggatactaagcaaggatacaaatgatacttttagtagacgttatacaagtggtcacttaaaagaaaaactaggagaaatggaaacattttcccccaagcacataagagtacctggtgtttgtgaaactatgggcctgcatttgattttaccttctaagttaaaaacagggaaatgtggtcaggatttaaccttcaaatctactcctcattttgccaatgcattacatgagcattaaaaaaagggagggggaggaaagggaagaattacaaatccacgtttttactagtgaagattgtgtctttcacctggtttgaaaagaagaaaaaagaaaggactcaagtggggagaagatggaagaacgccgatgagcttcacaccactctggatgatacgggacttgtttttgtttttctgttatcggaggatgccaagcaatgcagggctggacgatttcattagagttagcaggagcacctgctgctatcagttagcactaacaaatgcaacagtcacatgataactcatggttgatagattaaaaaaaaatcaacactaaaactgcaagttgttttcagaagaaacagggaaataaatgcatacaatagactgggtatctgctgattctgataaagcgtccctctgttggcggtgagggaaagacaacaggatggttatttgtacagtatttatctttgaaatcaagggccctgtggtatacctcaccttgggaacaaatgctgcagaatgatcacagaaaagtgtcaaatctctggttttgatttaccaacagttatgatatttcttcctcaggagggaaaaaaaaatatgcttcagttttagacctgtgagtcccccccacctctcttttttctgaacccctctctctgttaacagtggcacagtattgacagatgggatttttatcctgaagaaccaagcttggcctctgtaacagttacagcttattaatctggagctgcagaagaccagaaagctgttacctggcaaagtcacttcctctcccttagtctgaaccctaaaaactgggtggaagaacccaagatcaaggaagtacagcaaccatggttggtcaatgaaatcatgggggcgggggggggggggcgcatgacacacgtggatatctcccctcaaatatgactaacttgagggttctgtgaatccaagctaacataaccctggatagctatgtccggggccacaaaagcattcctcagctaaaaatatgttggtgacaccaaaaatggtacagcaaactgtggtccaagggacacagccatactcgttccttgttccttacgcatggtcaacggctgcttttgtaccccaatggcagagctaagtcgagttgctgtgacagacactgtatggcctgcaatgctgaaaatatttactgtctacccctttatggaaaaaatttgccatgccctcccctctgtgtgggactttttaccagaggtttctgattaaaacattctattacagaacaatttcttcggatatatcaatgctttgcatagtcacaactccttttcctaggtagaaggttggaaatttttggatatttaaaattactcatccttgaaaaataaatatatctaagtaggttaagaagttctaacgcttttaaagagtgcctagtatgggctaggcagtttatatgatgtactttttatttactcattcatttatttaatttttagagacaaggttttgctttgctacctaggctacagtacagtggcattatcatagctcactgcggcctcgaacttctgggctcaagtgagcctcccaccttagcttcccaattaactaagactatgggcacatgccacgacacccagctgaatttttttttttttttttttggcagagatagggtcttgctatgttgacctggctggtctcaaactcttggcctcaagaaatccttccaccttagcctccaaatgcattgggattacaggggtaaaccacctgtgtcttgcctggtgtaccttttaattctaacaaccgtaaaaagtggttaacatcccaaatcacatgtgctgatactgaggctcagatgacatgtggctagttcaaagaacatattaataatgtcctcactacccagtcaggctttctccaaaactttctttacatccactgccaagcagaaagcaaactgtcaataagaagtgctgcctctaaccaggctgtataatgcagcagttaagaataagtcttctgaagccagactgcctgggtttggaccttgactccacctcttattagctgtgtgaccttgggtaaatcatttaacctctctgggcattagtttccttaactctatgctgggaatactactacaatactagcataaactgtttgtgaggattaaatgagttaatatatgtgaagcatttcgggactatgcctgttttaaggttcagtactatttaattataaactattactaggggagtgtaaaatcaagggaacagaaaataggtgaaaataatctatgaagtaacacttaaatcaaggtcaaagcaatgttacctttattaagtaagaataccaaggagaattcaagcaacactgctatcaatttgcctaaaccataagaaatcccttctaaaaaagaaagggacaactgaagagaagcgtagactagagaattttgggtccactgaagcaaatgaagatgctttcaggatctatgaatccagcaatctgagcaaagtacttgatgcatcactctctgatgacaataaccccccctccccccccacccagtgagatcattcaaagaagccaggtggtttttacttgaaccacagaagtttgctagcttctttcagttcggttcaatggaaaacaaagttggtttcatcaaagtcaatttgatttccctttagactgaacagagaagtgggaaatgtgaatctacaagaagactaacttattttccactgcactaggcaagatcctgatacctgaagacaactctgaatttccaagagttaaaatcatgttgtagaggaaaactgaaatcctgaatttgttacatatgaccagtcaatgcgtaactcaggaaagcatctaggggagtttcttcttactcagcatttgctctcctttgctactttacaatattcatttttacattcttgaagcaactttctcatccccagcccccatgtggttcacgtggggtgaacatctccctctgttctggaggcagcatgtaatgcaagccagggcacatcatggtgattggctcaaagctagaacacatgactcaatctgggccaatgacagtctgcctatggctttttctggggctacatggaaagagatactctgtgggattaataaacctgtcctcttcagttccacttggaaagagcccccagatgaagacaacatagaaaaacagagctaatggacaatcaatactccaacagccttggttaaatatcaggatctagccatgcttgaagccagctgtaccactggacttcctagcaataggggccaattatcatccctcatttatttatttatttttttcgcttcagccaatttaagttgggtttctgtaacttacaaacaaaagtcgtcttacaaatataagtcaataaataagtaccaggaaataaccaagcaacagttgcaggttgatagtgggcattccaattccactgagcaaacaggaactgagaacatgtcgtgtcatgtgcaaaaccacaataaataattgataggtggtttcctatacaagtgccagacttctaatatctttagaagagaaatgggctcttttataggaattgagtctaggccccaattctaatgatctttattttctttaatacgaaaattattctctctcctttttgggataatcttctaataaatataacctaattgtcagctcacataacaaatgaacctatgatttgaggattttttacggtaggcataagttagccattaacaaaatgtttaaaatgggtctagaaactgtcatttccctttctgactctgaaactgatatatgtccctgagcttatggatagcaattttatagttctagagactttataacaataaatcatatttacagatgtttatcagccattctacagatggaagaaatcggtaccaaggtatttatcaaacctagcactggtgtagaagaaaaaactcagaatttaaaagtggctctgccaagttctttttctctcattatataaatatgattaggcaaatgatcaggaaagaacaaaactaagattctatagtgagtgatttctaaacaaaacaaaacccaatatcactactctgaatgataataattgtaaacggctgttgcttaatttaaaataaagcattgctgatcgtgattgttcacatctagaagcaattttggacatctcttttaaaatatttttaagtacttaagttttcaatgactacataatgctctcagagtataatcctgaggcaagaaagctatgaaatagattcacaggcttccattcattaaccaaaaatttatattcaccaaaactgcttgcaggtaacacaaggtatctctctaaggatggctttattacaatatttgtatcgggtccataaagatagatacagagactgttctaacaatataaagaccacacaaaactggagacctgcacataaatcagctcacctctgtttccctggggcttgaatgagagagaaaagctagaaggagatggtccccaacacccaatttgtaaaccatcaagcacccagatgtatacatgggcatatgttatagttatacatgtgcctatgttataggtatacatgtgcatatgtttgattacatgtctataatatcatgtaacattatattcaattcataggttaatgattcagtgatattatgaatatatttatatgatacaaaaatggagggcagtttggtctaaattttatttttaactgacaaggtaacacaagtaaggaatagcatagaagcatttcacttcagctatgagattaatattatttccttacagagatgctttataggtgttatagcttcaaatgggccaacccaggtcttagtcatactttaacagtagaaattgttactccactttccctataaggacaagaacctgaacaaaagtcaataccaatatagaaagttaagaaccaaattggtagctttcctcgccatctgctttctacatttataaagtcaattgtataacaaagaatgggtccaatcacccagctgcaattggccagtaattgtcaccaattttataaaaataaagtgcatatgcaattgcttcaaagagaataaaatacctaggaacccaacttgcaagggaagtgaaggacctcttcaaggagaactacaaaccactgctcaatgaaataaaagaggatacaaacaaatggaagaacattccatgctcatggataggaagaatcagtatcgtgaaaatggccacattgcccaaggtaatttatagattcaatgccatcgccatcaagctaccaatgactttcttcacagaattggaaagaactactttaaagttcatatggaaccaaaaaagagcccacattgccaagataatcctaagcaaaaagaacaaagctggaggcatcacactacctgacttcaaactatactacaaggctacagtaaccaaaacagcatggtactggtactacaacagggatatagaccaagggaacagaacagagccctcagaaataataccacacatctacaaccacctgatctttgacaaacctgacaaaaacaagaaatggggaaaggattccctatttaataaatggtgctgggaaaactggctagccatatggagaaagctgaaactggatcccttccttacaccttatacaaaaattaattcaagatggattaaagacttaaacgttagacctaaaaaccataaaatccctagaaaaagaaaacctaggcaataccattcagggcataggcatgggcaaggacttcatgactaaaacagcaaaagcaatggcaacaaaagccaaaattgacaaatgggatctaattaaactaaaaagcttctgcacagcaaaagaaactaccatcagagtgaacaggcaacctacagaatgggagaaaatttttgcaatctactcatctgacaaagggctaatctacaaagaacttaatttacaagaaaaaaatcaaacaaccccatcaaaaagtgggcgaaggatatgaacagacacttctcaaaagaagacatttatgcagccaacagacacatgaaaaaatgctcatcatcactggccatcagagaaacgcaaatcaaaaccgcaatgagataccatctcacaccagttagaatggcaatcattaaaaagtcgggaaacaacaggtgctggagaggatgtggagaaataggaacacttttacagtgctggtgggagtgtaaactagtacaaccattgtggaagaaagtgtggcgattcctcgaggatctaaaactagaaataccatttgacccagccatcccattactgggtatatacccaaaggtttataattcatgctgctataaagacacatgcacatgtatgtttattgcggcactattcacaatagtaatacttggaaccaacccaaatgtccatcaatgatagactggattacgaaaatgtggcacatatacaccatggaatactatgcagccataaaaaaggatgagttcatgtcctctgtagggacacagatgaagctggaaaccataattctgagcaaactatcgcaaggacagaaaaccaaacaccgcatgttctcacacataggtgggaattgaacgatgagaacacttggacacagggtggggaacatcacacatcagggcctgtcgtggggtggggggagaggggaggggacagcattaggagatacacttaatgtaaatgaggaatgggtgcagcacaccaacatggcacatgtatacatatgtaacaaacctgcatgttgtgcacacgtaccctagaacttaaagtataatttaaaaaaaaaaagaagatgacacctccaacaacaacaacaacaacaacaaaattatagtgtatatgtcattgatttgatatgtaaggacatgaataaaagtaaacgctaaaaaactgcaagtttaatactggaatcgttttttttaatccttgtcactctgaaaaatgggtaaatatgggctcttactaagacttacgcctttgaatgtaagcctttttcccattgtagtacaaccctcaatagattttgtaactattcctatgacagtgcactagaccttgtgatttagagtccactctcaaaggggtgaggtgaaactctccatcaaaaaggcattttatgagcaaagcatgaacggtgggaggtgttggctatgtaaaagaagaaaacaaaataaaatcattcttactttagaaatgattggaaatcttcgcacactgcttcacagcctggccacttgcatacaccatgtccatagagaggatggctatgggggtgctcctcatgggacaaactgaaagaaaacacacagaagaccagagaatgaatttgctgccaagaaccattccaccagacgaggataaaaaaggcaggaggagcccacatggccaaatgtggacaagacaaatctgtgatttcccccatcccatgtaattgactaattaattctgcattgttgcctaaaagcaagagttaaattgtacctaagtgtatttagtcaaatgttagaaatgtacatctatgtatgaaaaagtgtttgacaggcttttgttagatgcaaagctctttactcagactgcgaaggagtctttaaaaagctagaacttatttaatctacataatgaaaattataaaatctgtacttgattttgagattttcttgctacatctacaaggaatattatccattttctcctcttcccttcccccagaaactgctttcatataatcacatattttttcccaagttaattttatccagcaaagaggagtacaattaaataatttggaataataccaaaataatttaggaagacaaatgtatccaagcagatgattcgtgttttttttaaaaaagctaataatggcaagaagattatattcctaaaattcctaacaccaacagtgagagaaaatttggcatgaacacgaaggggttaatcctccagtggggttccaatcaatacgtaatgatctggccacacggatccaagtcatgggatgctttgatccgcaccatgtggtgctcggggaagagtatctgttgcactcaccgatgaaccatattctcaaatattttctctattatatttctgcatccagacttctttcagacaaattatttttacagttgtttccataaccttaaattccatcagatagaaatgtaaagctaacattgagagttctgtttcgtactcaagtgcattcccttcccgggaagggctattttgcaacttactcgactgtctctgcctgactttgaacttcaagcacaatgaatgatgattacaagaacacacacacacacacacacacacacacacacacatgcatacacacaagaggcctgtatttcatttcatattgccatcaggatgtatattcatgtattttatcaatttacattcatagagcatatgtacacaaatgccatttgtccctgacttataacacaacccacagtaagtgtattatgaacacaaaccaaggagcataaaaagtaaacacacagacacacagaactacacctgatcaaagatcattacgtctccctatgacttctgaataattttgctggaaatctaatataatttaaagataataacaagctattttgccctaccacagaaaataggtcttagaataaaaaaaaaggaaaagaaaaagaaaaaaaggtagaaaaacaacttgtaaaaatacagaaaggtgcccctcatacaagaaaggaataaaacaagggaactcaagtagctatagtgagatttatgaagccaaacaataaaaggatattctctaagcagttaacagggtaaaactgcattggactcaaggaaagaattactacctatttgtgttcatcttcagatctgtgaatgaataaaatagaaatgcaaaaatagaattttaagaatttactaacagtattacaaatgaaagaatacttcaacagtagtagaattctcagatattctaagagggaagaaaataatttaaaaagaaaacttttaatccacagcttaaaaagaaaagaaaaatattccaactttaataattattttctttagcaattttattaagatttaactattcttataactttaaaagagtaatatattgttattgtagaaaacttgaaaatcctgaaaagaaaaaaaaaacctaccttcaaatacatacacacttgataaggcacgaatatttatatcattcttttatatttaacataattttgtaaatactttctcatgttctcaactcatcttcaagaaccttatttactgatgggtaatagtctatcacgtatcaacttaactctagttatatgccaaaatttaaccattcctctattttggacattgagtttctcttcatgtttgttatatttgtagataatgttagaaataaaatttaccagcttaaacatgccaatattatcacaactgactgctaccagaagatacattcagagaaatagaatcactcaattaatgagtaccaaaatttaacactgtgaatattctatcaagttgctcttgaaaaatgctacatgccgagcacactcttagccagtatacatattttgtgtgattttttcaatttggaaaccaggaacctgaactagttaggatgaaaaattaatattactagttaagaactgtaagtggttaaacggctgtgcttcctgggttaagctgggagtgttctgaaaataataacatgagagaaaataataatatgcattcactagcagggttttggactcgaaatgtgtagaatttaacacgatgtttgctgttccccttcctgtttgtagttaactgacttgtgaaggatccaagatctgaataaaactattcacatctaagaatttacttttagttcaacttgttatccctatacttcaaaggacagataacgacacactagggccttagaacgcaatcagttatacctgaagtctaaagaaactcatactcgtcacacacgggtacaattacacattcagaagaccgcttgtgaatttgtctcttagttaaaaaaatttctttattatgaaaaaattacatgctcttgttttcacaagttcacatattaaactgcagtggttcccgaaggaagtgcacccccacaccccaacctaggcatcatttaccattcgggtttatattgcatttctaacacattattattttaaaacatggaaacatcctgtacacactgttgtcatttgcttttcatatttaatatataactggatacttttaaatacacaattgtctgaaataaagtgtttggctttggaaggagagagaacaagctggcagaggtgcctcgatagcatctttttggaaagatacctaagaaactggaacaactgttgcctctggggaggggtacagggagtcaggagtagcagggaaactcagttttcaccatacttcttacatcttttgaagttttaattttgcacattgtaggaactgttgctgtgcaattgttaatttttttgcacacatatgtgtgtttgcatatatgtatgtagtagaaaaagaatcaagtgctatgcaggacttgatttccagtctgctgagtgctctaacagtggcacaatgaataccacacacccgctgcatgtgtggctgggactcgcttctagctttgcagtcgttctgtatgaagcatcattggacaacaccagctgcacctctgaatgggagcttttctgttttctcaaaaaagtggaacaagcatttatattcttactgccttttgggtcgtgccaaaaaagacaagaagggaaataaaaatgaggagaataatgtttttatcttgaattaatttagagctacatttacaggatgaaacatggtgggaaaaggatgatttgggcatctgatggtaaataaagcagtgagcctaatcatttagataaattattcaagggtaaactcaccaatgtgtaaagtatcatttctgaaaagctgtcagggtcagtgatgaaaatagatacattttctttttaaaagatttaaacatgtttgtcaaaattagacttctaaaactttagggtcaattgtttaataaggtgtattttaccacaaactcccaggttgaatattcctaggggcagggatcactttttcggctccatatactcagtacctccgacagaacataggtttgagttcgggggcggtggctcacgcctgtaattccagcactttgggaggccgcagtgtgtggatcatttaaggtgaggagtttgagacctgcctggccaacatggtgaaaccctgtctctactaaaaaatacaaaaattagtcaggtgtggtggtgggcacctataatcccagctactcaggagtctgaggcaggagaatcgcttgaacctgggaggcagaggttgcagtgagcccgattgcaccactgcactccagcctgggcgacagatgacagagcgagacacggtcccccccccaaaaaaaacaaaacaaaacaaaacaaaacaaaacataaaaccacgggcttgatgaatgttaggtggatttatgaatgaacagacagtaaatatattgttctatttcatttctgtgtggctatacattcaactggtgttggcctttttaaaaatgtcttgtaggtaaagaccagaattatgcaaagctacatgagaaactatcgttatgacactttctattatttaattttattctgaatatataaaacacagatagtatgcatttgagaaaagccagttaatttaaatttctcttgataatccttgatatgtaaaaattaaatataattttaacacaaaaatagtgatagcatttcagattagaaagaaccaacttgcatgaaaagtataattacatataaatatgtaataatttctgacattaaatgataccaaatccagtatatattcagtaggatataagggtgtcattttcaatgacagttaagtaggatattttgttctatttatttttttctgcatcaaagtataccacccaaggtcttcacttcaacactgaccttagtttttgagacaattttatataatggttatggttccttatgacatttcatggttatattcccaaggtcactacttaaccaaagcttcaaactggaattactaaatccacctgctaaataaggacaacttctcaactctgctgtctgcagtctttagtgatccttacactgttagtcctgtaagctaatttcccctgtggtaactaagagggaagaatttctgaaggagatgaagcaaagagtgaccttgctatctgccaagccatttcctgccaactgaaatgccagttttcccttcacctgaaggcagattccgagcttttcctgtgcactgacccaagttctcatctgtcttttaagtatccccttaatttttcttcccttttccaaatctgcctctttccaaatttgccttgttttcctcctctccaaatttctgattcatctgcagcaaaaggctacgtacatctgtgcccattacggtttatgcctccccacaaacaccaaaaaaacgaaatcctgcctaaattataaactgtattttatttcactggcatgttatttgataaattaaattacagaagactatgttggttgttctccactcactcaaaattgtggaaatacatttttcaagttttactgagttatagtttacatatcatacaattcactcacttaaagtgcataattcaatattcacggagttgtgtaaccatcatcaccaactaattttggaacatttttatcatccctcaaaagaaatcctgtacccattagcagtcattccccatttcctcccaactcccagcccttgccaatccctaatctttctgtctctagaggtgtgtctattttggacatttcacatcaagggaatcatacagtatatgttcttttatgcctggcttctttcacttcccataatcctcggagtttcattcgtttacactgtagcatttactagtactttattcctttttgtagctgaatagtattccattgtacatacatagcacatttatccattcatctgttgatgaacatttgggctatttccacattttggctattgcgagtagtgctggtatgaaggtgtatgtacatgtactctaagtatctgttttcaattttaggggatatctacctagaagttgaattgctgggtcctatggtaactctacggttgacatttggaggaactttgagaccgctttccaaagcactttatattctcaccagcactgtgtgagggttctaatttctccacgtccttgccaatacttgttacgtatctttattccagccatcctcacagctaggaaatggtaccttattgtgcttttgattgaatttccctaatgattaatgaggctgcacatattttcatgtgcttactgctatgtgtgtatcttctacagcaaaatgtctattacgagcctttgcctattttttaattgggctgttttttgcaaatatttactcctgttttgtgggttatctttttactttctttacggtgtgctttaaagcacaaacattttgaattctgatgaggtccaatttatatattttttctttggctccttctgtttttggtgttacatctcagaaaccattgcctaaactcaaggtaacaaagagttacttctagctttgctttaaagaactttatagctttagctttcacatttaagcctatggtctgttttaagttaatttttgcatatgatatgagtcaggggtccaagttcattttttttaatgttgtcccagcaccatttgataaaaacactactctatccccaatgaatggtttgataaaagtatcaaaccattacttttgtcaaaatgaacgtaaatgtaagcgttggcattttttaaatttcacttttcttagatttctttttccccaacatactgctcatgttttcaaaagaatttatagttaaaattatataacaacttttgaaattacattaagctataaaataacttttgaggtttgacgggtagggggagagataggtttttaataaaaataaaaccatagcagctgaactttttgaagaataagtgcctaagggcaactttgtttcccagatcctgttgatcctttgtgtactgaaaaacctttgcagaatgaatgtgctatgtggctttctctgcttaacatgtaaatggagtgtaactgttccttttactgagggccagcactatttccctataggaatggttgggagcatagtgttgggaggcctcatttgtcatgatagctctgcttgtaaccaggaatcctgcgagtcctttcactgctctgccctccaattccctcatttgaaagctgaagagaatcacacaagagctcctcccagtggtaaaacctccaccaaacttccaccaaggatatgcagatggcatagggaacaggcaccaatggcacatcctggtattgacaagatgaataaggagtaggtgctgaatggaaatccattaaaggaatgaatgaagcccctcaggaaggagtatcggtgtcttcatcatggctgtggagcagggggctggttgctattcccctctcactcatccctgacccacagcaaatacacaaaccaaaaggcactatgcatcccctttcccacctcctttgacttaaaagctgttctgcctccctcccttcccccactggccaccttcttcattcccaccatttaggactttcatccgtccagccaacatttatgaactccgaccctgagacaggcaccgagcatactcatcagtaaggctgctttgttgacaaaagacttccatgtctctctttgtctgttatccttccaaattatttggtctcatgtccatgtgcacaactttatgtcaacctaacaacactgtaagccacagaatcctcctttttcaggtccatcccagcctgtgatttttgtctgcacggtaagagactgcttattcccagccaaaacattacattaaatcagacaccttgggtttctagaaagctgttctcttcatatacaattttagccctatctactaataaagagtgtcttaagctacacttacgctacaatggcaggcatcgatggaagccactactattttaaagctttcagatttatttgctgattcttcaatgacagcttatacaaaatgatcctactttcccttttctctcttcactttttagttcttatcacatttccctgcctgtgactctgttatcatagcttactttcaatgagattgtaccgaaccatatcatgtacttcttaggtttgaagatgggaatacgaatttgatccgagaatattctagtgatgaggtcctatctgaaaatataatcagacttctgatttgaaattactaaatttacaaaaactaattgctatcaaatatttgtgaaatatttgatcattagctcgaatgaaatatgctcagtcacacaaaatgataccaaactagacgagctggccttgaaacttgatcgcaacgaccttttctaagaagagcaaggtagattcacaatctcaaagagatgattccttaaatacttagcaccactttccactttacagtgtattcttctggcgtttttcatactgttgtatatcccctcgaaatcagctggaaatcagctggaaaagaaatcacaatctcttgcagaaaacagaacgacaggtaaagtttcttcacattccatactgtagcatcggaggaaaaggtcttacacctgcccaaagacgagcagatgaaacgtgggaacaggagaaacgacgatgcaagggccgcatgcgtttccctggcagctttgtaaaaatgacctttctccttcaactgtcactgaaaacactttgagaagcagatgggcttcttatttcacaccgaagagttgggagacaacttagacactgcatttctagcacactgccttaattttcacttctcactcactgcagaaaaacaccaccctacatgtttattaatcagttttccaaaagtaagttgacaatgggtcctgtaatcctcccacaaagagaagggtgttttattaaagcctattaaagggcctaccctagagtgaataaggatggagttctctacaaactgtaacaaacacacatgcttctccctttctctctcacgcagggaatccttgactctccttccccagaacgctcatcatctcaattttctgctgcttttcaaatcatgtttaattagaggatttcacattcccatgtgatacgatattcatgagtaaaacttgcaattggagtgactgtgaattagtctattaagtgccagatttgtgattttaaacaatgatggagattattgttattatctgctctcaatattgtgctctgagatgtgaggactaccttaactaactttacatctgaaatacaagctattaaccatttatgtccagacttagtttttgttccccccttctttcttgatttgcaaattatgctgggagaaataagagagttatttttctatagtggtcctcagggcatggctcatggccagtggtgtgctgggtgggtttgcatggtataccctcacttccatagttctggacttatattcatctgcgttggataaagtttttatgagtacatcagaaacatgatttctcagtagttactttttatacaacctatttaaacgagacgatttatgaaaaatatgaagtagatagtagtaataagtatatgcagacaagccaaaaatggagaatggcaggagaatgactcaaagaatgttgactgggccctaagggactataaaaactgtgtctggggaaaagggcatacaaccttcctttcccattgctattcctagagtagtgcttctcgaactttattacagatataaatccgattcggtggttctgggtggtggggtggcgcacgactatgcatgtggagtaagcccccagagctgctgggccatggaccataacatgagtaccaaggatcttgggtgttccctgatctgtatctgacctaaaaatgtctatgcttaaagaaacagtcacaaggatgccctctttataacaagatggatggacatagataaatatgtaagggggtggcactgggcaacctccccaagtaattgttgcaaactcacagaaatgcttgctggctcaaaattatttaaaaattaatgcaaggctgtatttcttttttgttttttaaacgtaacaaaacaggtaaggctgaaggaagttagcacagggaaaaggtcactttctgtttctgtttaacaaacaccaattttacatcagcacagatctgttgggtgatatggtcagtgattaatgtttaccagatattacactgatcaagattatcccagagtaaactactgaatcaatgagtttgaaaacttcacagtccccaaactctaggtctgctttaagtatcttctaagcctggttcatatccctgaggatgtatgtgaggaaaagcagagtcacaatcaactttttaggaaggttaagtgacagtcttgaatttttctaagaaattagggtatactaggaaggcagggtttccatgcacttggcacagtaccatattcagtcaaggtcccttccctctgaaaaatgagaaaaacctatgaaaacataccaactcataatatgcacacactcagtggggtccacacaatgtcaaatggagcaagaaagcatactttgaagatttgcagatgtatcttaatttgtaatggactaaaatatatctagtgtctccaacttctgatttcacagatatcatttcttagaatgaggctcattttatttaagaaatgacttgatttaaagaaaataatacaaataatcacataagcagacagggcaaacctcacaacaatggggcgcatattcaaacgactcaagtttggaaaagtaaaagctcataaagtagtccttgaggatccagtctgtagctgggttaacttcgcaggttgacactgacaaagtagcaagtctctgaagacgtactttaatttgaattttcacaggggatggcagagcctcacggtcgttctggacttaggggtcaaagacccacaaaggccccaacagcacagtgtagtgtgtctgatgcttttaggactagagcttcttcctccagatttaagggcatctcatttgtaagctatctatgtgaccagcaactggctgctttaccaatggtaagaacctgaggctaggtgccacgaaaggtagtaagtctggcagttattttcatcactaaccatgtcaccaatctcccctatctcccccctttccagccacactgggcaaaatgtgccatcttgattcccagatgccaggagtatttatgtggcatagcaggagaacggagcagagaatcagagctgtagtactggaggctggttggtgtgcttggatcacaatgcaatcgcaaacagagcaggtgatgacaagcacaaaatgcctgtatttgcaaggtgatgagtgaaggaataaataaaggaaaagaacaacaagaggcagaggtccatcttttgtttctgacaccagtaagggctattctgagtttgtaactaaaagtttaccactggcagtattaacactgggatctcgttaagaaaacagaatgctttccaaaaagtggtgtgagcaactgtgtcaatacagacatagggatcactaatccaaaagttattaacaccattaggcaggcattctcattatgtcaatgcaagtgtgtttgcactggtgagtcacaaggtctatgtggaaccttgtccatatgttagaggaaccaatgacacccaaaaaaaccaacgaccgtaaacaaagttccaatattaattcttattttcttcccctccccagtatgctatggaagtcagcaaaagatttctaagagttacatcatacttcaaaagcagaaccatacacaagggccagaccagaaagcaggagatgaagggacaagttagccaaagatacaaaatggctcaaaactatcaggcacttgcttatgtatttccttagaattactccctactttatgtaattacatttatttctctatagcacaagatgcctcattaacattcactgggttaaattcttctctacatttaattcagcagatttaattaaacacctactttgtgataatcatgttaggttcttagatcagtctccaaaactgggatgcatatgacctacatcatatatttaagatttgatattacatatatgagtcacaatattaagatttctgtatacacatattaatattagaacttgaaaatgtatatatacatttctcaccctcttagccaccaatttttataacataaggaatatatattagaaacatgtatataattaataaacatacttagtaggggtacacattcaacacttttatactgatgggtaaaaaatcaagtttggtggtcactggcattgactgcaactttaagtaagttctcatcctcggaaagagttctacccaattctctagttggggagacagtgataactgaacagatggctggaacataaagtactgtaacatttgatctgggccttaacgtatcagtaggagctcaggtgatgaaaggaatagagtgagagcagagaaccgaagcacacacacaaaaaatctaggaagacaaaaccagagccctgatgaatgaaattaaggccaaaattgaaattttttttttaaattttgctccataaaatagcttatattgggccacagtcttgagaatttttctctctgaaatgttgagtcttggctctgaaacctgtattttcctaagtaatggtaatccagatcacttatccgtcactttgaacttcggtagaatgccacaccataaggataccaggtggggacgttgtaaggcagtggttctcagagtacgggtctggaacttgtaaaagatgcaaatgtgggggccccaccccaatttactgaatcagaaacactaagggtggggcccagtagcctgtattttagccattcctccagggggattctgaggcaagctaaagattgagatgtacttgtagcagaaacttaagttttctcatggtttggagcagctacaggtatcgacaacagctaaccaggttctcttacagaagtgctcgccaacctttttggcaccagggactggtttcatggaagacaatttttccaggaactggggggcagggaatagtttcgggatgattcaagcacataatatttatcatgcatttatttctattattattacattgtaacatataatgaaataattttacaactcaccctaacgtagaatcagttgggagccccgagcttattttcctacaaatatagacagtcccatgtgggggtaatgggagacagtgacagatcattgggcattagattctcataaggagcacacaacctagattccttgcatgtgtggttcacaataggattcacgctcctgtgagaatctaatgcctcgctgatctgataggaggcgaagctcaggtggtaatgtgagcgatggggagcggctgtaaatacagatggaacttcactcactcacgtgcctcacctcctgccgtgtgccctaattcctaacagaccatagaccagtaccagtctgtgaactggggtttggggacccctgtcttacagcacctgtggccaaagagtggcaagtatagaagtactcttaatgggttcttgacctttgacatctcattagttcactttcttctgaacatttcatgtagtctctgcaatgaaatttagggcctactatatgccaggctggcttgtgctgggtgatggggatgtggcaatggacaagagagttaaaacctttcccttacagcattcattgtgttagaaaatctcatgtgaggcagatgtagggggaacatacacacactatgatgttccactagtgctcttttttttttatttttttgagacagagtcttgctctgtcacccaggctggagtgcagtggtgtgatctcggctcactgcaacctctacctcccgggttcaagtgattcttgtgcctcagtctcctgagtagctgggattataggcatgcaccatcatgctcagctaatttttatattttttgtagagacagggtctcactatattgcccaggctggtctcaaactcctggcctcaagtgatccacccgcctcggcctcccaaagtgctgggattgtaggcatcagccaccacgctgggcccatttttaacaagtcatgccctctgttacgttttgcatatacttctatcaccatagttattaataatacattgactttcaagtgtctgtttctatgtttgtttttctgattagctgtgagttcctgaaggggaagaactacattgtggtcatcttttaattcccagaatctacagagttattatataatacatgctcaatacgtgtggtatgaatgaataaatagctttaataataattaacaataagttaatatttattgaggacctactatgtgctcagcaactaaaacatatattaactcatttaatcctcacaatttgatctaagacgaggtaagggctggtagcatacccgattcaggggtgggaaactgaggcacaccaagctcaagtaacttaagtagagcagcctgcattcttcagtccagtctttgaggttaaactgggttaactaggttaaacccttctctacctttaattcagcagattttattaaacacctactttgtgataatcatgttgggttctgataggaggctaaataccaccaaacaacacagtggcctgacatgaaaccagtatggtccataacgcagccaaatatcttctatgcctgcctctgcttcagggcctttgcttctgatgtgcccttagattggagggggtcttccctttcttattcacgtttgttccagggccacctacaggctttgccagaccaacttaccccaacagtaacctcagccccacaaataatacttactccctttcctactttttctgtttccagaacttaaccgttcttgtgtaaatgatttgtttgttctatttcccttctactgcagtgtcagctccctgaggacaggctgtggagctcacagctacattcccacactaggaccacacctggcctgtggtttgagcttggtaagtttggttgaatggatataccttggaagtgtcctgtgacttctgtcccactgaggaacacattttttcttgcactttggacaacttcccatttatccttgttgagtttctttttatttctgtctgtacagtcctctaatttattcaaacgccactggattattccagctcttggtgtcaatttttttctaattaaagtaaactgccatttttctctcacactgatctttaacacgagacatcttgttcttgtcataaatctgactcatatggaaaaatttaagttgaatataggggctcatatgtaccacaatgtttctatcaatatttcagacatgaaagtagagtcacagacatagatatccgcctgattctcaggtctatggtcatgatttcggtggagtgttcgctttttggatgtatgacccagaattccactgattactaaaatgactcctttgaaagcaaatatcacatcatttgcacaaacacttcaggtttcctctttccttctgccatagtacatcttcaaacactcaacattcacagccaagatgtaaaatacacaatacacaaaagctccttcaaagacatatctcaaagtactgtaaaaaaagcaatggagagaaagagagagatcggcttgccattagactgatttccttgaagactataaaaggaatgaaatttgaaggtcataaaagtctgtctatttgtttagggaagtcttacaggtagtataaatatcatcagctacagttgctatggggtctgtttgtttaccaaacaagaacacaaatagttacacaaaagcagaacaagccttgggtatataaatggagaaggctttttgcctcctggtgaattttccaaagtgtctttttaaaaagtccctatttttcaccctgtgcactgggaaatctctgttttcttgattctttgcacttctcacacctccagccaatgttttactctcagatttctgaggcggataatgattttcttttttctttctcttctttcattttaagacttagaaaccacaaatattagaccaacaatccaaactggacaaccaaaatagttttcacaatggaaaatgctaaacaaacaaacaaacaaacaaaaaacaaaaaaagaggtggggaagagagagcaagaacaacaaaacccactaatttctagaagaatcctagtacaagtatggagtccttatgttaacacacaaccacccagccagaaaggtccatgtggatgtgtgtttttaactgactttctatgaaccaagtgtgtttcatgcactagaattgtacctgctgagttaaccacgtgcttcaaaaaataaagggggaggaaaggaagccagcaaggctattttcgcatctcttcttggttgagagagtacatgtgagtgtgtgtgcgtcataactcagatctacaataaaacaaactgcacaacagaggctgcctgagtggaggcctgctcttcacactacattgaccgcagtacccgcccggcgcagccccgatgccttcctgtgaatgggacagattgccatatggatgaagacactgaacaagctgtaaaactcttggcgacatgtgcccggggggattgtcccatattaacaccacctgggctgtggcaattgtgctctgtctgtgcagtggcactgaggagcccaacaggatgttattttagagtacacacaaaaaggaaaattacagttaagagaattctctggctagcgtatctgttgctcaattcccgaaatagtttcccaaaggaacggttatcttctttattcacacaggcagaagtgacaagctggaacacatattaacaatttccctttgtgagcttccactattgttttaatgaggagaatatagtttataatatacttaggccttgactgattacaaaggggtatggaataaagaacttcaggaatgctgtacatatctaacgcactcatttgcattgccccagtgagccagtcggcagagaggtagctccctcggaaagacctatggagccaggccacggggtaacactggtgcgaacacagcaataaaacagaataactgcacaaaaaagcatctttgcaaatcttgaaaaggaacatgacatccgcttaagtctccagcataggtccccccttcatctggctccagtattggcttaagagcataagactcccagctgtcatttattataagaataggacttttccaagccccttttcctctcaaagggaaggcccttgacttccctttgcacttttggttggtttcaatatccatcaaagaaaatcttctgtctaatttaagtggtgaaggtgtgcaattcaacaacaactttttataggtaaaagagtaaaaccgagtaccatggacaataccatcagagtttccaaaaggctggttctcactcttctcctgccacatgctttccctcacacccctggtgtggaataaatgttaaggaaagctaagacacaattgggaggaggggacacaggcctttccactcaagcgcaaatacttgcaaaatgcctgggtgccaacaaaggaatttggcagagaacctgtatcagcggcagcggcgcatcaaaaaagaatgtctaccttacaaggtgaaagaaatggggggtccaaagatggttttgggtgggaaatctggcacattagacacggaatagcctgtggctgagattcatattatacaacatcctaataaaaaaattcaaatcaaccaaatttaagagtaactcagaaaatgaacatcactctccagacccatgatgtcattttattggaaagcatttatcatttaaacacaataaatagaaagagatttatagagtctaaagatgctgtgttatggtaaaaggcactttattgaggtaaggcacaacagctgttagagaataatggctgaggtttttttgtttaatcaccccacaaagtgaacagtcaaaaaaaaaaaaaaaaaaaaaaaaacaacccataaacccttcccttatggcatgccaatattttaaagattttctcccggtgccctccctgcatgtgtgaatgacaggcggtgatacggcaccatgccacatggccctgagagaatcctttctcccacttctaagtcccaaaagtgattggttttaagcaatcagacacatcacagttcttcaaagcacgatggctgccaaacaacaggcagcatgtttagggtacaaaatgctgattcgcccccagggtgcttctgtctgacctcagcaggaacagcttttgccctaagtaggttacctccccgacagatagacatgggacaggtgatgctgccaagagtctgctttggagcaaaaataagtacctgtatcttaggcctctgcagttagccacacctggtcctctttccggtcccctacacctgacaagacatgcccagcacgccctctatattctccactgtgcgtcactggtttctaacctcctgacttccctgccagcaaaaagatgaggtgggtgcaaaggaaactggcaacggggattttcctgggggcttcttctaaattactgctgaaaagataggtctggccccaagctacaaccagtggaggctaccatctggacttgatccggagcttaacccactctgtagtccaattctcatcaaaagtctgggctgtagtgaaggtggtctggggagcagcccactgggagccaccagaatctggcagtcactgcaagtccctgagggtcagggaaatctcaggtctagtccctgtatggtcactaactagctatgtgacgtgtgcaagcgataacatcattctgggccccagctgcaccctctgtacaaaggggagaataccccataaggttactatgaggattaaataggaaaatcaaaaaataaaaataaaaaataaaaaaaattaaaaataggaaaatcagtatagtatcaagccctatgtcaagtctgttgagcattgtgtctggcacacagtaagagttacataaatgttagctgcattctcatcaccaccatcacatgtcaggtcctttcatccttgacaagagcaaaacagaaccttaaatttgtgtctcttgcctgtgatcacagagccaaggagtgggtctcaagtcaaggtctcgtggtagctcctaaggaaaggaagcaaatggggtctggtcccttcagtcatatgatttctactctgttggctcacgtaagaatggcaagtcactagttttgaggactgaacctgtctggtggctccccagtgggctgctccccagaccaccttaactacagccctgacttttgatgagaacctgtctgggatgtgaatcaagtgtctggagaaaagtcctgttctttccaagtgtcaaaacctcagtgataaacacacagcttccattgcttctcaaacttgaacatgtattccaaacccctgaggctcttgttacaatgcagatcctgatgcaggtctggggcagggccagagactgagtttctaacaagcttccaggtcacagcagagctgctggtctgcagcctctgagtagcaagactccagggtatgtagggcaaatgcaaattcctgcaccccatctcagaccaagaaagtccaggtttcagaagaaaggcctaggaagctgtgtgtttaacaaataccctatgaaaatatcatcagggaatctgagaaacaccaggctaatggtgaaggtcaggggtcagcaactgtttctgtaaatggtcagatagtaaatatttcagttttcgtagcctatatggtttctgctgccactactcaagcttgccattgtagtgtcaaagtagccgtagacaatacgtaaatgaatgtgactgtgtcccaataaaactttatttacaaaaggaagcagtgggctggatttggcaggctgaccataatttgccgagctctgttatagtgttatagattgtttaaatgccttgactcatgttggcaggaagtagcagttaacaattttgaagacaatttggtggaatttgaccacaggttctccaaaatgctctaacggggaagaaagatttaaaataactagcttgctcagtatttcaaatcaaaataaatacaaattgtcctctgatttttggggaaaaaaaaaaactgaaatgaggaaaaactcttcaaaataatgggagctagagtttactgcttaaatttcaacaggtcctacatatcacagaacatgcaccagttaaaggcttgtgtatctggaacagttctgaaaactaacttctagaattttagcaagtaaaccaagagcactgacatttattcacaaacacagaatttagtttaaaaaagaaaaaaaaatgcaacactagacatgtacatgtttcaaagttccttgccttttgaaaataacaaggcctgtaaacacaaatgttattgttacatagtcaaatacatggcaacatgtcaagaggccacaaatcaaaaacagagactgtgtatcaagtgaaactgtctataagtacactagccaggcggaaaccttcaggggttatttgaaggcaactgccaactgtggagtggagaaaatgcaagcgacagtaatacacagggctccgtcaataaatgatgagaacgaggcaaggactatcgtgactgaagagagcataggttaaacctcatagagtaaagcgcccagtgtgcgtcccctgtttctaatatgatacctcaaaaaagcagagactgcccaaccaccatctgatcagggtttaaggaaacatctttgaccaaatgcttaaggacaccttggaacaaatacttagaacagctatgaatccgagaaatactcgagttataaaacatctaatgatggtggctgaactgaaagcaaaaaagctgggatgagaaaaaagggaatatttctgatttggactatagaggacagctgaaatgaaataaaaagcatatgatgtgttcattgaggaaacacaggatttataaggcaggaaaaaagtggggatacgttattttggatctgcctgtgtgtaaatcccccatgaggttcatttatgttctttatgtgctgtttcagaccaaaatgatttatagcttgtaaatcccacctatcccgcttcatgaaaggcctggtaaatatgaatatacaccataaaagagaaaactctggtattttcttttaaacgcagtgatttgcacacagtaggttaacttaatacgtgttttgtcaaattgaatttcaattaaatttaaagtatcttttagggacactcattttatcgtaatttagtattcacttctatgctgaatgaaaactttaagtactattttgcagactaaaacacagatctgaatttggatcttggatatgccactaaccaccagttctatgaccctgggttagttatttaatttctattattcgatttcctcatctgtaaaatgggtataatcatccttactgcttcctgagtggtcaggtggataaaatgagacatcactccatatgcaaaagtctagccagtgcttggcacagagaaggaactgattaaatgtgagttcttgtccctttccctagtgcaccataatgtaatgtgatatttcaaattttaatttaggcaattacttaagtagtaattgctattagtatttacatagctgctttgatccaagaagctcaaagggctttactaaatttagcattttaatagatgtttcatttgcattctgttgattctgtttacccacaccaaaacctggaattttctaaagcaagacaattagacagggaaacaagacagtatcttcatatgtaccggtatcccaggcctgagttttgtctgtttccctaagaagtcgagactctctgtccctatggaataaaatgacagcaagaggcttgaatgcacctgcttcctcttgctgctcccccttagctgcgccattgaacttgatccccaccacacttttctcaggcactgacaacacaggcatgtttattgcaccaatgaatttatatacaatcagcacaataaacattattaaattgtcggagaaaatcaaagcacgaagcatggtgccagtactgaattctaatgatgctgaatgtccatgattacacagggacaggatcttaacaagccttgatttgaacgctggcatccgcctcacaaatcacatgggccgctcctcccgtaatagtgctgaatattgataaatgtctctaccctgcgcaacagggaagtgggtttctattggcaatctttaccaaagtgtgttttttcccttctctacactcaagggtttaccctgaatgatttaattataattttccttgtgtaagacaaattaaagaggagagtaggagtgtcgtgccaagcacattatttatctccttaacagattgcagctcaccaaaccccagagctgctgctactgcagtggctgctcacaggagccagcaaaatgcacgggggcaagagtgggggagaaggagttttccaaatggcatggaaatacatatgcaactcagttgagatcattagccatctcactactttgaaaacaacagtaactctcacaacactacctttttccagcaaattttcccatcgagcacccccagatcatgtcagaaagaaatcttaaagctgctaacccacgatcaaggtcatggggtcagatagttattcagtgtggcagagactctttccttgcccatcagaatggagggaaaagaatattacacagaaatcaaagaagagcttggaaggacacgtatttcacaaatgcattgatgagtaagagagaaaacttatccaaggcagtgacaagagactcctgagacaactggcacatcagtgtacagtgagaccatacctttatagtgacagctttgttttggtatttaactggttatcacacgtgatttttaaattaagcctaataaggtaatgctacataatatgcatttgaagtatttatatgtatacgaagctggctaactaatcattgcttttttttttttttaattaagagacaggatcttgctttgttgcccaggctggagtgcaatggtgtgatcatggctcactgcagcctcaaactcttgggctcaaatgatcctcccacctcagcctctcaagtaactgggacttcaggtgcatgccaccatggcaggctaattaaaaaaaagtttaatggaaattggggtccctctatgttgtccaggctagtcttgaactcctggcctcaagcaatcctcctgcctcggcctcacaaagtgctgagattacaggcatgaaccactgtaccaggcctaattgattttttaattatcaattccacaagcttaaactgaactatctttaactgaaggtgctcatttgtcttgatggctacattcagttaaaatgtgctgactggaattttcttttaatccagccacgtttaggaacctactagataatacaaactgagagattcaagagattaagtagtggcatataatttcatagttgcttcttttttgcatgtacaattggaaaactcagcctgcttttacatccagattaaggctcattggaatctgaattcttttctgatccatattctaattctggtgtgtagtatgatgaagattaagcacaacttttgtgcagacaaataaggaccataaaaaaaaattcaaacaaacttagtctcccagaattagactgtctctcagatccacttactttcaaatgtgccttaagacatgaaaagggctattcttctcccacttgcctccttgctaatctatcacctgactgcagatacataaccttttagaaaatgaaactgagcacagcgcatctaaacaagaagagttttctatgtcacaggaaatctgtgcaggctccacaacagccgatgagattgccacaaataccttaagtgcatcagtcggcgtttttcagtgtatggcctcctgctctgcctatggataaagatgtaattcaatcgctctgcagcaaatggacgcatcaaccttagggcatcaaaaccaagtatagcaaaggacaacagcctagaaccttttctttaatgctctctaaggttttctttcttgaaaaaaaaaaaaaaaagaagacatcataagagattgtaaagcaagagctaagattggcttccagacatacatatctatccttgccagaaacaacagaagccacatttccctcaatggctccaaagattgtcagtgtccaccattctattcctctatctattcttcaaactcttccaaaccaacatgcttaatgcatcttttagttcttcggtgtctgcctcagaaattccaaaatgaccttggaaggatagttgaaaattttagttaaaacatatgtattatcctcaactctggtaaccactcatggttttacacttgaacatggtgtgtgtgtgtgtgtgtgtgtgtatgtatgtatctctgtgtgtgtgtgtgtatctgtgtgtgtgtgtgtgttcagataatatttttctggtataaagatacacatctaattaaacagtaggcttcttaaatactcaatattttgagaaatatatgaaattacatttgtaattgcataactgaaatatataattaaatgttttttcactgagccatttttattaaaaaacacaatacagaatttgctttctcctgagagaaatggcatttactgtcacatactacttttacggtttctttacctctgtgtgtggaagctctgcctatgaaatatatagaaaacagtttaggaatagcaaacaaaaagttttcaattttaggggcattgtattttctattcttgaaaagcacttcaacagtggtattaatgcttctgggtactaagaataccataacatgaattaacagctttattttcttagaactgcatgctaacatggcatattctggatctctaaaacaagctcagcttcaagtaacattcatgtaaagcccagggcaattcaaaaataaaatgtcttaacttctaaataggaatacagctgctgagacaatactacactatatcccacaatgaagagaaagtgtgctgtgtctgtttatgtgagtatatacaacagatcccccacctccaccagccaccaccaccactacctcttctgtctctccatcctccaaaccttcactcagaatacatacgggaaagaccatgtgctccagggcacaatgatgaaaaacatgggcgcccagccttcaaggggagcaatgtagagtaacataagttctatgttttctcaaaccataattcaaaattgcccacagcagacactactattcccttagaaggcacttccagccaaggaattcagcttgtacggagtgagcacttggcagaaggagtaggcctggaagcctggaaatccaacccatccaatgagaaactacacgacttctgcccgggttcctaagctgagagtagatctacataagtgctaattccatgttgaaaaggtgaaaataattagatgcttcacacccaaaccatactgaatacattcctcagtaattatatgcacattcaagtcacatggatccaattagggatcactgagatatgacgaggcagggccacccacccctctcatgttaaaggcagttttggacccatctcagtggctggttcctacctttcccttttgggagtgtggactgagagctgtccattggtagaggcatgtgggttcattattaaggaggtcttggaaggtgcagaggaggagacacatgtcgtggtcagatccaaactgctgtgattgttgcctgtggtttcttctgcagtatgagcacttgtcacttctttccagagctgctgcagttctgttggaatcatgcctgaaacaaacaaattggataattaaatcaattaacagctaattccgtcctcttcaaacagcaattaaatcaaagagtcagtaaacaaagcctagtgttaggggggtttttcggtgtgtgcagttttttttcccctcccaactacggcagatgcggtagtaaaaagtgtgtcctcttaccgagcaactgagtggaagttgccctcatcgcacataaaagactcaggtgaaagtgactcaaaacacagttactttgccacaacagtatgcctctaaccatcccaagtgttatttctcaattttgatgaaaagtagatagatgttaccttagttttagacacaaagaagggctcaaaataaatttgttcaactatactattatgacaacatgaactacaaaatgaataatttttgtgcttaagtcttaaatgatgacaaatagctttgttattaaatatagtttttattaatcacttttagacataaattatgaattcatatcgtcttcctgaaatgcttttcaacttttaacagtcaaattgattatactatgattatttcattaacacacctatcttcctcattaattttggtttctagtaccacatgcttaattgatggatgtgtctactgaaaaactgtgtaactttttatacaagtaacactattattactgtcatttcttagatcaatggtaatgaaccattgcagaataaaatgcaaacgtaaaataaacttacagtaatgaagttctcttgtttttttaaaggggatctaaatggacatgggttttaaggagtgaatccagtattttcccccaagaagagatacaatcagtatgccaatctcactattgtgggcctcttcgtctttatcctgctggcatgcctctgtagcccaggtttccaaatcccacctcaatgcatattctagcccacacatgcacagaataaagatattctagatgacaactaacaaaaacaacaacaacgacaacaagcaacaaaacttcctttggaggaacaccgaaaagaaaacataaaccctgcacatcctaaggcaataccacattagaagtggacgtctggattgcagttcattgtttcaatcaagtgtaacacagccatcccagaaagcctgccattttctgactatatagcagcagctgaaacaggcatgtttcttaccaaacctaaggtatcgaattaaaaaagaaggctgtgtgcattatattcatttgaaacacataataaaaaatgccaaggtctaaatttaatttatttttgtcatttagaatacaatggatagataatcatctcaacgtgatcagccaaacatctttactttgctaaactgttaaagattttaattatgctagcattggagagcactggtctaatgaggcgatggactccagagaatccgagtggttaagaactgtgaaatgagtctgataggatttttttatattcaccgtggatcgtttgcatatcaaagaggagtaaattattgcacagcagaccaataaccttccccgcctttctgagaggagcgttaacaaaaacagttggtccctcctaacggttctccacgaaaatgttcaaatgctcaagcatttgcaattaatatatattataaaggaggcttcaaatgatacattaagtggtcagatattcttaggaggcatcctcgacagacaagtcggttttcttctcccttcataaaaatcaaatgccaattatattttgatggattttgtcccaaatgagcatttagttattaggcatagtcaattattacttgtcccctgaaattaagcctcagaggcaaattaaacaaaggggaaaggtcactccacaaccccatgtccggttttgctgcatctgaactattattttccaacacctttcgaagtgacaggtgggatgcgtttgtagctagcaggcccgctactgttgtctgcacaccaacaattacctgtgaacatgggtgaccctcagaccactgtttactcaatggaaacaatagttaataggcttgtctgttgatgatggcatactgatataaaaccacacaagtcaacatctatttttattttctagagagtaaacacatgaaaagaacaagccacctatttctcaactcaaactaaatgatttctgggtcagctgcatgggaggtgggaagactaggacagggtcctaacaactgtgttaactcccgctttctctcgaagaaaagcagaactttgatgctgttttaaaagtaagctgtttatccagcaaataaagacaaagacaaatgtatttaccacttgttatacctacagggtgcattaatgttactctactctcccatctattccaatgggctggcaatcagttccattatccatagagaaaaatggtaaataaaaatagtaactcattaagtgacaacagcgatacttctgggtcaaactgcaatgtgataattacttttaagaacattctcatcacacttaacacagaagcagtcaaatcgctttcctccatcaatgccatatatcgttagtgatgttaaactgttagttcaatgagcgctacctaccaaagggtgttgttatttgacagctaagatctcatgttagacagataaaaggtaacccagtcactcatcagactaaatggataacaaatttccagaaagtatgtatttcttccaaaatggtagactaagaataatagtacgaagttaaacaaatccattagcaggtacatagccaagcatgtaattttctgctacctagagtttacattttaaaaattaaaaggtcagaataagactgaaagaatatttctatatgaaattactggtgctagggaggatgagatgattaaagagaccagggtgaaaagcagataggctaattatgtaaaacagaaagaagaccctacaataaccttaaaaacaacacaaaatatccctccatttcctattataaaaccttcagggaaaaaaaggccttcaaaatattaattctctatctattcctatacttgacatttacatgtttaaggttaactcggcaaggccatgaacaggtatgtaaaataatcttgatgatttcattatgaagtgggcattaccagtatttttaacagataacccccaagtcttgcaacatttctttttccaggacaactggccccttcattataaaagaaaatgcaggcacaggtttaaaaaatgtatgttgtggggacagatgacagattactgttcatggaactcaattttacaaccccaggtatcactggctcaaagacaaacagagttgatcaacctttttttgtccttgtacatccatacccaggtgaccatgttcaagcaagcagaaagttgatttaaacctcataatgacatcagttttaagccatcatctctctgataaaaaaaaattgtgttctagtccaacatgactgaattctctagccacttgaggtgagggagtggggggacaaaaccaacctcctgattcagagagatggaaataacactggtagttcactttactgcaagaacctgacaccagaaatatttatatttacatttatgccatcttgggcacacacagaggcaccccttagatttcaaatatgcttcttcctaatgctgcaggggctaatagttatagcagactgctaagcctatcaatcaatgccatgactagtgaattacctaccagtgtctctgatatgttactgcagagattacacttcatgcatcaccacattcatttctttcacattacacatgagcttgtcttgtcactgcccaattgccctcttttggacagcttaactgatgtactataacaatgaaccttagtgagcaaacttgatgagagaggttggagctcaagtccggtaggtgtgtcagaacagcctgccatatttccaacaataaacccaaaggtgtaattaacacacgctatgacattctgcaagcacaaaaatgcattaactgatgtacatatatatattctttcttttctccttgtattgctcagttacgacatcttctattttgacaatggagatgctgagtatgtatcaagcagctgagcagtcatggcagaaaggagtggaggggcaagagagaagttaagaggaaaaagccctggtctcgatactaaaaacaaaatcagcctcataagggacagaagttgggtgtggtggactcaagggaaaagattcaaatgcagacatgcttccctgacttcacttgacaccaaaagttaccaaacaaatggccatgctttaagcaacacgaaggagtttccacatttttaaccttctttagaaggcaactgaatccaagacagcagtggctttagctatcagcctttaaggtacatataaaccaacatccaaatctactagagttcaaagaactgctgcccttgaggaggcaactcaaatctgccctaccatgcatagatggaggaattgtgtttcaaaacacaggcatggcactttctactttctctttccttcctgcctgcctgtccgccctccctccctcttgacatcccttcctccttccctcccaccttcctttctagttctgaataatccatctgctttcacattacatatgtgaaagtcagagttgcttaaaccaagaggatgtcctaaaaacacctagagttcccatttgtttctgatgtccatcacccttgggataaaatgtcagtgggctttgtaaaagaaatttactaaatgtataaaatcttacttttcatgtgatctcagttgttgaggaactggagatggaagtggtacctgttctgatgagtgtagaactaatttgctcaaaaatcaacagatgaatgcaaaaagaaaaaaaaaggaaactaaacaaagttttcctttttataagagaaagtggttgatttctatcgtttacagaaaaataaacctgaatttatccctagatattaaaacatggcatttataaagcattactaagatttaaaatagcacatgttacatggtataaaatgtcttaaatgaataataaaagccctcaggaaaattcctttgtggttccaaacagaaacactgcaagagtccattaaaatgctcagtaagtgaaaagtagcgcctcattctcttactccaagagtgtccaacagtgggattgctctgttacagctaagccttcagaccaccctgagacttcattttggcatcaacaagcatttcaccttctacatgggtccatcattatcccactccacttttcttaaaagaatctatgtgcatgttttgatggacaatgtccttaacaaatataccaagagacaacccaccacctccacccaaagtcttcacagagctatgccttctgtaaaatcaacgcataccttgagcaagaggttgaaggggaagggcaggctgcccgggctgaattgtcagaaggccttggcgctgcaaagacaggaggtgctgctgctgtaactgctgcatctgtaaaagctgctgctgaaaagccaactgctgggtagccacctgctgttgctgtaagaaatcaggaagaaaaaatgagatggccacttcccaaggaaggttaaaagtatggacacttcaaaactcaccatcatcatcaaatgctgagaatggtcactggagctcagtggagggctccgtgtcaaggtttaaaagggacaaagcatacctcctctgaggaggggtggggagatgagcgtgttatctttctactgcccgctcccataaacacataattcgtccatcaagccagctttccccccagtttgaaaggtctgagttttgtcatcaagatgtaaacttttagactttgaaatttttaattatgcacactagagagaagactgcatcactctagtctgaaggggtctgaaccccgaacctttgaggtgtaaaagaacaagttgcctccctccctgcctgcaccggcagaagcttttaactactctgtttatcacttctgacataaataaatgagaaaaaatcagacctttgaagaagaaaaacttcatctaatattgttaattagccatgacaaacgatgaaataacattgtaaatctttcacagaaacagccactagattttaattacacacattcataatttagcaaacaacatcgtactcgactgtgagtttaacatgaacgacagtctaagcttcagatgccttaacatggctttagtctcagaaactcccaggtctggtggcttgtcctgcttcccccatctgctttgttcttgaaaagaaggggctttacgatatgataaatatctttttgttgattggacaatgacaggaggaaaacttttgttgtgtaaaacatcaatacatcattcctgtgtttagcaggccttgcttcagccaaaaaaattaatgtagatttcctcagtaattatctgagtgatagaaagataatacagtgcagtagtacaataaatagaaggaaattatctaatatccttaatctgctagcaatcgtatcgaggtggaggtcttagccacattatggctaacaattataaaaggaaaactaacccttcccaaactgtagcaaaaaaaaaagaaaagtttcttcaagaaaagaacaagatcagtgttcctaattctgagtatgattcaaaagatcagagagacttttacaactaaaaggactatccaagccctttcagagcttacatgttctggctaataactatactttacaaacaactgcattcacttaacctaacacatgaccttgatctgatacatccataaaatggtatgtatatcaagaccttctgatgcaaagttcaaagaaagagaaaaatggtggtttcctttcggtcttcatgtagtttattttacagtaaaaaccatcattctcatattagcaaccaatttcagacttactaccatgccactgagaaagttaattgagtttcactccaaaaaacaaattctataccactaacaacaaaaatttaaataaatttaaatgaaaagccagtgttttcattttaagaacagcatgcataaaatgatccaattgttttcaccccttcccaagttatcacattaatgtaaaacccagtgatagttatattcatgtcaaaacgattttttcacttcttcaacagatattaactcacaacattacaaaaaaaagggaagagaaaaaaacaacattgacacaataaaagatcagggaattagcttttctgaaagcagactataatggggggggtacagctggaggtgggggagggtgtttcctgccttactgtaaatgaaatgtttaaaaattttgtatttatgtaaaatgactgatgccttttctgttgtctctgtggccatccctaggaaaaagctcatgaaagctgtctacgtttgaaaagccaggatataaaagtatacaaggcccattgtccaaagaaagaatttaaaagcaacaccggttgccaaactgcgctccccacccagttaccaaacacaggatacgggtccatttgtttacttctcacaattgaatgcatacaaaaaaggtctccgtgcagtcccctcggcaggtcagtagtcagtgttaaaatgctaaaatgccctgataaacctcgagtttcggatcccctccctagagctgcagtcaaaggtctgttttcctttcttcggctactccctactgcctaacataaactgtcataactgcccgggacaaacggcccttttaaaacaatcaacttagcctacctcacccgcacaggatggaatctttttttgtagctcgatttaaaatgaattctgctgtctattttcctcaccacttctgtccaatattcatgagcagtcacttcaatagctgtattgggcctacatcctctcttcctcccctacctaagagcacgtatcttcttaaggaaggtcctgtcttggtccaacccaatatggagccaaactttcccaaggaaacatctcaaggcaactttaggagggaaggaaaaaaaaaagagcaaaggtacatcgttctggccaaagatcaggtgtcttattgcagaggtaatcaaaacaggaaaaaaagggggtggggggagcctgacaatataaaattatgagccgctaatgactggggactcagtaaattaacatacttgttccatctgtcaacaaccaagttcaaaccttgttaaaatcataaccaccagtccacatcatgaaaatgctaccgtgtgactccatctcattttagcacaaaaggaccaccacctgcatgataattccaggagactggtccctacctcaggaaactacagatctcctaagcattgttaccctgggtctcagacaaatccactggcaccatgaatccaaggagacccatccactggtctgcctacctcaaaggatattcaaagcaacctatctcctgggtcacctttgcctgggaagtggatgacaaagcatggaccacagcaaacctagcgacctggagatgcaagaatgttcctacaatgtcttgctttctccttgtttagacacaaagtgttctccttctcccctacactccccaccccctgccactcccttcccaaactcagggaccactatcatctttgtgctctgagatgctttcctttctgacaacagcaatttgggagaggtaacttttatccttctttctgctgtgtaactttccccttcccatttctttatgtgccctctgagctcatctgaactttcatgttctcccagcatgcagacgtgcattccaaactatgtctcacagaccaaataagaggttaataagaagtggcaacagaaaggaaaaacgcaatccctggtaactgataagaatgacagtggcagcccttttttgtttgtcttcaaatatagagttaaagatctttaaaaaactaaattttgatgcctttgaaaagaaagaagcacaaaataacaacagggggttattgcctgcaagccacaggggagaaactccataattcttattctcccttttgaaggctgttagcaatctgattcaaaaaagcaacagcagaaggggaaacctcttgaggctgtaaccatttcctgtgatcatgcataatgtgcttcaaaagtgggtttttaccaattctgttgatcaattgcacctccttcataccccttcttttttctgctgtgtttacatctgatgtgactcaatgacaagcactgtctgagactgtgaaacaggcctgtcatgttgatttatgggcgcatcaaaccacaacttgtccaaactgaagctcgcagttcattaattagagagttgtgactttgaagtcagctttcagactgtggtttttaacatttggcttaatttatatgctcttgaatgtggatctctaaggaaaaaactgaaattcccttcttgtctttgaacttcttttgaccgcacaataatcatttctttgtccagagtgatgcctgcaatcccagagtcattaacgcgcattgaactgccactgatgagtaagccctgctgaattagaaaaacagccagcaaaacaaagctgagagccttctgcacagtgatatctcacaattacatgccttccctccctgtgccatttccattttaattactgttagtcctttagatttacattttagacactttttaatctgttcccttttttattatagcagcacccggtagagcgccactgtacttaaggttgtgtcagcattttcattaaaacacctcctccccttcaccccaaaactgcccctactctgcaggggtttacatccggctgctcaacaggactccagggtgaaaacttggcaggacatggaaaacgtccccaatttgtgtcaagggaggaggcagcaaagggagaatgtctgggtcactcccagggtgtaaaattagcacagcccagcatcctcacttaggtgagggacagggacgtcgagtcacctggtaagactccctgcaaaagaacaaaagtggccacctgcttagggctggtgaagaagctgttaaagtggatgaggtgctgtatatagaattataaattgtgtcatcccaaggagaacacttaaacaaaaagaattttcagtccactgtaaaaatatgaggaggcaagttaaattggataactctggaatgggtagaaagatgtcataataacgcacacatgcacacggatactcccacaactgagtctcacccacgcagaactgaatagaaggtgaactggtaactccctggaaagaaaggccttatcatttatgggacgaatgctgtcaaccttcatggtgtggcataatgtgataagttatggacactaccaagcgtggtgcatatagaagctattatgatatacttttctccaccctgcccaagaaaacacaacccaagctggagtcttctctaacttcaactcatgctctctggcacatgcctttagcaattacattatgtacaacttgcaggaagaagttaaacaaaagatgtggatgtttaatcttgttctaacatttttgtttgtttatccaacctcacaaggggttattcttccaatggaaaaggccatcaccacacacccaagctctgtgagctggggaaaaaaaaaaaaaattaagtgtgcatccaagtaaaattttcctgaaagcacttcacttctcccagctccatcctggccctcagttgttaccaggttgcaaaaagtaacctgaagactctgtcaacgatgcctctcctgctcctcacacaggtacacgtgcagtggtgttataaaatatgtggcagcaagcaaatggaacccagaaaaatctgagtgaaaacaggacaataattctcagtctgaaagctgagaaccgatagagtcagctcagttgtgcaatcatttaaaagatgaatgacagtttaatagccactagatagtcctctgggatctgtggtttgaaagtaaaatatgtattgtcggtacctctttaggctgttttccagcatgttgttgttgtaaaagttgaagctgcaactgttcctgttgttttttataaaactcttgaagctgctgctacaaaggaaagagaggacggtaagtaacagagggtagcgccaatccactgtcccttttggtgccatacacaaactgtgatttgaaaaatagcatccttttatctgtaatggcctgacctttagtttgaaactcgacaataaattcagcgcacactgactattcttggcattattgtttgaaaagtaatctccaaaatgaactgatgaaaaacataccattttctacacaaactaattaaaataaggcaaagaatgacctttgattgtacaacaaagctgaaatgcccttgctgagagagtctggtgaatctcttctgcatgctttctaaatgacagggctgggcactatgcagtgttattcagtgtgtgcatggacagcctgggagcttccgctgcatcctgtccccaccaccccaggccagtgactcccaacgctgtagttccgaatctcatctatttggttcaggtggctgtgaagtctgaatattaggtccccatagtgcaatgacaaccagaagttcatttcagcaacatcgtatgtggaagaagtaaaatcaactctggaccttaaaattagcaaattctagaatgcttctttatgtttaaagaaaaaaaatctgtaagcttctgagtcgaaatggggacatcaagagctgtcatatttaaaccactcccaacgtgctcctcattttgctttgattcacaccatttaggagccatgtaaacctaaaagatcttactgctaccaagtccaattacagccctgatctcagtccatcgggtactctccaggcccaaacactagtcaccatggcagggctcctctcttttgggcatgcaaaagcacatcgattattcagggagtggtctgtgtcctgccccacccacgctgctttactcttcactgagcaaaggagctgctctggtggaggggagattgcgaatggagtgatgggggcccctgggttctgggggagacaggctggaggtggaggaaggacaattacctgttgaagcatgagggcctgctgctgctggaggagaacctggagctgctgagggctcagcacttgttgctggaggatctgctgcatttgctggggagtgataacttgaggtgtcatcatagccactgacacgggaacctagaatgttaatgaaggataaataggaagccaggaaatcagaagcacgcagcctcccaggttcagcagctgactgccatcagcctgcttaaagagttgaccaatttcccatgcaacatgtatttatccagaggggatgcagcaacagatcctatttaatctatcatggagtttattttaaagaaagaaaagtaaaatcttgcagtactgatgggggttccaggcagccttgcaagcacacaaaaaggacaaacttaataaatgctaactggagttaagatacgacagttctcaattgcttattgagagtgagtttttggtcaaaaccatctgtgggaagttaacccagacttgaattttgtttgagagaagacaaatggtaaccagcacctttgcaggtggagcccatatgagcacacttgctctgtggacagtgattttaagaacaaccaatcaatgcttatacttgctgggaagggaaccttggacacaccttccgaacttaaacacagacccttcgcatgatgccttttactcttccttattcacccagcacacagatgtctcaattctttcatattatgtgcaataccattaaaacccgctttccatgacatttcagtgacaaacagctacagtgatgaacttgatagcatttcatatttgcaactgttaacacgtttctgcacgggcatctttgcaaggaacctgcacactgtatctgaaaggatgatgtcttgttcagataaaacactgacattaaaatgacaggctgtcttggccaaggttacacaaattgtattcaagcggatacctaatgacaatgctatgaattctgcaagctttctagaatgtaatttagctattcaaaataatcactgcacttgtgtttaatttgcagactacatgagacccattttgtcagtccccgtaatgcaagaagactatttcatgaaaaatcaccccccgccccaaataaaaagataaggaaagaaaaaacaatgaaagaaaagacaaaacctgtatgtcttctaaccgtaatatttaagcatcttacttttctttggtttctaatcaaacatgtgacagcaagaagctagaagcagtaaaggatatactttgttaaaaaggatatgctgtcatctcatgtattacaataaaaggtaataacatgttttgcactttgcctgtgtgctacttaaaaaaaaaaatccggcagacaatagctgatcagaagataaaagaattaaaaaatctttcaggggagcagtaagcaaaaggcagaaatgcagtattaattttatgtaacataatgtcttaatatgcagtttatcctgactttttcacatgatttgtcctgtcatttgcatagcgagctctcattcctaatttcacagtcattatgcactgatgtcccgatttctcagcatcactaattttgatgaactaaaaatggttcctgaaggtcagattcatgcacagcgaatgttctccactgttgttgtgggcttgtttcatgtgtggggatgttgatgtgccagtgtcgtgtgtttggaaaacactagttagaacattcgaaaaatttcattaacccagctctggaaggtcatccatgaattcttcctattccagtggccttttaagtgtagatgtagatacactgtaatttaaaacagatgggcatgtctgaatattttcatatgcaaaatgggacagatgtatatgaatggataaattacccttttaaaaagataatttgtagcacgaaatatcaccaacgattggaacagtgaactcgcattcagtttagggcaaacaccaggaagacattatcaaaacatctaaccatctacaaattaattccagttagtctactttgtcttcatacagaagaaacttttcggatttttaagtatcttttgggtgccaatcggtatcctttgagctgctaaagccagcgtatcacaatagaagtttacttttccttgagagttgcatcatcatacggggaggtttgattaagcaaacaaaagaaccatgtttaaggtttcttttttcctctgcgtttcttggatgatgtacaatataaatattcttgagccaaattctgatggtgatgaacaggaaaacagacaggaatagggtggtgtaaaatctaaactggtgatgaacatgaacttaacagagttagagcagaaatcatgatagaaataacctcctggtcatcgtttttaaaagagctatagaaaccttatactagaaaggggcacaggtgaacttttgggggcgatggaaatgtccatatctcgagtgaggtggtgctcacacacgtgtatacaatcgtcaaaactcttccaactagacactgaaaatcagtatatttgagcgcacgtaaatcatccctcaataaaactgattttaaaagttacatatgtctcctaaaatactttttccccttaactcaggtaaaactagaagcatcttcttaaaggagaaacaacattgtcccttaactgtcaataataaaagggggaatcatggaaaggactgacatatacctgtacagacaatttttaaaggctgacatcaaaccagtggcttaaatctccttttcccataatcatttattcatttttttgcagttacggaacaggataatgaacttgagtctccccttctttttccttttggacattttgatggaggtgctgatgagtaataatatgctttacagcagcaggcactgccaaaggagggaaggaagcaagaggcctgagtaatcctccaaacgggctgatcacttctgaataatcagaagtgggctattatatcctgatggccttaacttcgcttttactatctgaaaccacgttttcatgccagttagctctgggcctccaaagtgggctccagcttcatttacaaatgttataaaaccaagatttccccaacgtttctgttctaacatatcatgaaaagaggttatggaaaagctttaacaaacatattcaaatagaccagaaactatggtggggtagaaaagaaattaaaaaaaaaaaatctgagcagtttttaaggctttaaatagttaagaattatagcctatatatccactcccttaattcccaacgtccaactttttcatgtagctagtccctactaacactaggaatcaaagggcatgcagtaccagcgagaggctattacagcccacactttattgcccattactactgaggtcattagcggcaagagtgattgtagcagtcttaacctattgatcactgtaactactatcatttaatcctgtgttgaatgtctggaaagcggctaaaggcacacaagagagagtgctttagcactgagaaatatggccaaagcttcaaaattacactttgattcataaaatctagccagtggtttaaatcaatagtatttaaaacagtcatgtgagtttttaactacagctctctaatatttatgggcccctctttaaaagtattcagtaaaaacgaaacttttttttttttttttttttttttttttttttttttcagatttcatgccttctaccttaacctccttgagataacaacattcatttctgatgttttctgtgctacagggttcatgccttaactgggagttcaagctaattcttgatttctttctcaaaagacgatttaaatataaggcaaaaaaaaaaaaaaaatttccgatactgtaactaccttaactgtttgagtatatagaaatgagtatgttttatgagttaacaatgaatcatagaaggcaatttatgaagaactagaatgattctgtctagctgccttcagggatcagaaattcaaattaaacttctggcagacatttaaagaatgctagcatacaaaactgaatttaaaaaaacgcacacagttaacactcctcagtggagtttcaagaggaaatcatgaattaaaaaaacacacggcatgatacactgttgactgataccaactgggtgtggtcgatcccaggtgcacccaaacctgcgggaatggcagaaatacagctgtgcttgggccatcacagctctgctagtatgggcctgctgctaccttaataccagcaactgggaaaacggtgttagcactaacaactgctgctaaaagcccatacacactgctgtgtaaattctgcctgatacggttttttcttcaaaatgactctctatcatctgaatgctgaaagactattaaaataatatgccatattatttcctttaacgcccaatggggaaacgtagatgatgggaagggaaaaatctaaaaagcaaacaaacaaataaaaacactcagagaaacaatacttatttctaatctaggagacaattgaaggaattgggtgggaggggagaagacacaatataaatactgaaaataacatgttatcattttcttctctcttcagtttacactccagtcaactacaagtaaatactacctagtacacatacacataaattttgcacgttgggtatcatctcataattactgtgtatacaaataataaaaagagaagataaaaaatgctaaacactgtttcatttttattaatttggttaataatttagaaactctttttaccctctgatcattcaccacatgtatgtcccaggaaattcacttccgttctagccttcaggctgtatttgggtgataactgaccaggtttggcagtgtcacctggttaatcaaatagcaggagcaaaacaaattaaattagaaggctccagaatgtcacaacaaaaccaaacagagaaaatagctccattaaaagagagagaggagaaaaaaaaaaaaaaactatgccaagttttttatgaccatatacaagctagcctgtatagaagaaaattaaacatcatcacctctggccccctgtggaaaacaagttttcataattaacaagtcaatggatacaacagatgtattggcaaacagaaaagttagaaagcttctatttctccatggtattaaaaaaacaaaacaaaatgaaccaaccaggtaccatgcaagtaactatcatacaggaaagaaaacacacttctgatataatatttcggtcttaaaaaaataaaaaaaaaaaagcatgctatttatgtggaaagtaaaattctgtttcattatggaattctgctttttgtataactcctttaggcttagctattttgccacaatactgtacaaagcactaaggcaggtaatggttattatattaatgcaaaatcatctaggtagtcagtcattagcataacagttctctcagtaacaatacaaccaactattaaaaattttttttcaaaagacctctttaaaatgcaattagcatttcattttttatcattttgtttattacattctatcaagaaaggctatctttctttcacaaaaaaattgtaaggccaaggctcgcctgccaatcaggagttatttcaggttatcaaccctaataagcaatctccagcaatgctctccgagctcttctttttgtctttaaattctaaaaagtggcataaatgcatatttgtttacagcagaggtattagtggaacatcaactgctctcctctaacatttcccaggcacacaaggttactccactaagtgccagtataattgttttagctctaataaatatcagcttcatttgcataaaaatgtaaagtttacataaattaaatcgcttctcccattagcaattgttaaatacaggaaacaatggaagctacacatgaaaataatcactcaataagcactgattctttcaacctagcaactattattattatttaaatcaagaaaatgccttctctttcctacttcaaccactttctcctgtagctgggatggaaaacaatttagggcatgtgaattaaacatgctaatggcattttatattaacaacaacaacaaaaatcatgtttaagtgctgcaaatgggaggaggggaggactattccaagaaggtaccccagaaaagattctatccacagatctttagttcttaaagggaaaaggaagaggccttggctaaataagttctcttaaattgaagtattactcaaaaataatgaaagagacagcaactgtttccatcctacctgagacacatacatgattaaaataaataaaagataacttgtggatacagttttagatcaacagttactgttaaatgaagaaaaacataatgtctatcttctgtctaaagaagatttttctaacactaagaattaaatttgtagctctgctttctcatgatttaatcagcatagaaaatttcatagggagcttaactgcaaatatgtattttttttcccatattactgaaagggagaagggactataattgaatttcaacacataggtaggccaaaattagaccatttccgaagttttataaggccttacttagggtgcaatcactctttagaaagaattacaactcaactttctcaaattgtagtttctcatgcctatttccaacaccttcaccttatacatcacagttaagctaaagggtgcaaatgagattctaatgagaaaacatcacttgcttctttgacaatctcaccattcactgatttatttataatgaagacaaagcccaaccaaaagcttcccataagttaaaggtcaaaatatgttcaaaaatgcctagtaaaatcaaggcaaatgggaaacccgtgcagacccgcctcatgaagtggtgtgacaattagagtaattgtacaaaaagccatcttcaggaaaaagtaaaagaaattaagctgccacaactgtaacaggttagatgaaaaaaatcaaaatttaatgtattctcccctgtgtcatcttgttttgtcaagacatcaaatagaattgggaagtacaaaataacaagcccttgagaaatcacagaagccgacctttttgatgttgttgatttaccttgttctcagttatttgaacaatgatgtttcagatttaagggcaagataaagcttagaaattaaaacatgataccaaggtattctaaaaagctcaccataacatttagcctgcatcttcattgattagttgcttttaaccggatttgaaaatgaggcacaatgtatgtgttcagtattcatttttctcattcgaaattaatttctcctcaaacaactcacaggttggaagagggactcaatgaagagcattcctacaatccaaaagtagaggcccagattagctcttctcagataattcaagtctccacaatctgcaaaggcttgtttagctaagagatacctgagttttcttttttaaacgaaagaaaataaggctgaatgcaaaatgtcacttggtgggggtgggagggaagtattgcacgctctgaaaggactaaaacaagagtccagaaatacgctgcttccaagaaaacaaaccttttatcaaacaacaaatttagcttacagtgttaagactatccccaaatctagccatacagatacacataaagctacccttttgccccaagagagctacagctcatcaccaatgtaacttgcagtcttacatgaaatgttacgtgcaaagatacatgaaatcaagctatcacaagacagcattctcaacttttttatgtaggcagttccttctactcaagcatatatataaatcaaaaactgcagcagttaaaactatctatttgaggcactaaaagtaacctaatatttgcaagcgttataatttattataccttgacagttaataaagctgtttaataattccttgtcactgaatgcatattttaaaatgtaacacacatatagacacaatttatgtatttatttactctaaccttctcgatcaactgttgctacattatcccttgtttgcaaatcaaggaatgatgaactacctgaagtggaatctaactgaccactacatttgcctagttaccaagaacatggttttcaggttctctttagtgatgttcatctacaactaaaccacataataaaataaattcctccaaccttcgtttttgccaattcaaattttactcaaatgttagtacagactgagaagctagtcacaacattctctcctgattgtctcagaaacatagtaactcaaacaacgtttctgccacattaaccaagacaaacctgaactttcattgtttttaattaatctagattttaatttcaccgtatcttccaattgtgtggaggttggctgaaaagttgtagaactggtcagtgtcataaaagagtttatctttcaagtgacaggtcctgacaacgtgtaaatgcaaggcagtgacggtgagggttttgttttttaaggtacattaaactacaaacaacaaaaaaaaattcaaccattcctatcataagctttctgatgatttatggtttaccaactgagcagggttacgcaacactgcatgcctttagatgcattatttcagctagttgagatttaattaagatcacagcctctaaaatccctgtcaaatgaaaattcagagaagacaatacactatatatcctcgtgcagaatgtttccattccatccctggaaaaatatgagttaatccgcgtttctatggctgcagacaaaagttcgctaattttgttttcttttgacacttaggttgttttctattacatgtcatgagatcattcccttccagagaaagaagaaaaaaatcgagagtgatacatgttgcagaaaatgcacttgacattattagccgacattatcatagcttagccatgatgccatcacattttcatgtaatcaacccatgcttacaagtttcctttaataaaatgtttaataacacaacacaaacagaaagcctaccttacctaaattactcggattagataattgacatgttatacctctcatttccttaactaaccaacttttcgtcagacaagctgcacatttgggcaggaaacaaagttcttaaggcaaacgggtgaatataaagcccattactttccttctataagtcgttcttagggttaaaaaataatcctcaatagatttctttcttagacgctggtattgacccatactatttttttaaagaaaaaaatgtattactatgtgcccctttacctagtcaaatgtatttttatttgcatcttcttaatatttggttgcttatctcatgccttagaaatgacaggtgcttgcagtctcactcttgacaggcaactacacaaataactgtcttgcctgaaagggctaatgcagtactaatgaacaataaatcaactttgattatcaagtgtcagccgaatgcgttctcagttcagctctatcacatcctacagtaagtcagccagtgtctctgggtaggcagtctgtattttggtttcatttttacacacttttcactgaaatgtgtcaggcagctacaaagaatcacataaaacagatatagaccttttctcaatttatgcaaagggcatcaattaggacaacgtgcttctgtcttcaattgatttacttagtggtcaatcttaataaccaaggaagctttgtattcttttaaacaacagtaacagcaacacacacacatcaaaccctaaactagaatcttaatgtgatcatgttccagctctttggcagtgacatgctagcttgcgctctttaccacataaaccacctctgattgcatctatacattcctcttggaaaactcgttatataaaaacaaaaacagcaaaacagggccgcttttaaaataaaaatgccacttgctttaaactttaaaaaatctggcttaacactgacttcctaatgataaaataaatgtaacttattttttttcttaagcagattagtcattgatagtatgattcacatttcctgttatcaggcttaatttttcccccacatgtgtcacttttagaatgctggaatctatggaaatgaggtgatttgcattttaaaattggtttgattagaacatttggtttgtttggacaaaaatataaaattactagatattttacttgtaactgccaggacttgaaggagttaatcccaaagaggaagagtctatatgtactttgctctaaaactttaccacccacttcctaaaggtcctctccttcccaacaccgtacttggggaggagaggggtaaaaagtcccgtttccactgaccgtccttcatgcagttctgacagttgagttagctacattcagagccggttcagctgggagtaccccgtggcaattcctcagtctgctgcacgtccaaacccaaaccccgctcactacttaattaaccagccaagtaatgcaacagaggcttagaatccccaacctgccagagtgttccattcgctcgctcgcctgctccggtgtggggctctgtgcctctccctccccctttactgtgtgtgaactcgtcgaatttgaacagctaagctgaaaatagcctagacagatatagaaacaaactatcagaagcaaagaaacatccacatgggttacactgagatggaaggctccttgtatatttcacacgctctgaaagtgacagaaatcacaccccagatacgtcccccgaacggagtgatggcgagggcttcaccaaagtggctgcgtgaaggccagaccggcagaaaatgaatcgcaaacgaaaaagagagagagagaaacacacaagcaggacttcctccaactctcaactacaccccacccatgaacatttaaaaaaagagagcgagagtgtgagccaaagagcaaggggggtgggggggtatctctctccaggacccacaggcctgcagctcctttttcttgcccctccactccctccccgcctccacttccagagcgcaactcctacccaacttggtaaacagcgaggatgaggatgattttttaaaagactcaacttcagaaccctcgggctctcctgccttccccagcgaggcccccaggaagcgggcgccgcggagccgggggaaggagagcgaaaccggcaaagatcaatcagaaggaccaacctgacactctccatgtagccgccaggcgcgcggagccgggctcggggcgcccgcgcgggccgggcgtggggtccggcggcctcggcgtgcaggcggactgcacgcgcgcaggggcgctccggctcgcgggctgacaagacgcgccgcgccgcgcccacccgccccgccctgctccaccaatcacaacccgcctctaaacaccccgcgccgcgccgcgccgcgccgcgccccacacaatgggctccgcggcccgcgccccgcgcccgcgcgccccggccccctccgcgcggcaggtgaaatcacgctcgggtgccaccctgcttttgtctggagagcaactccacttaatagctgttaacccggtgacccgcctccggctgacgtctgggtcggccgggctcggcgcgcaccgctccctctggccggggctctgcggggccggggctgccggcggggcggcgtgtttgtttcgtctttgagactgacaaagagttgtcctaacctttccgagaaacccgggaggccgaagaggggcacccggcgctcgcggcgccaagccgactgctccgagcaactgttcggcttcgggagggtacgcaggtctcctaggcagcgcagaaaagcgcttttcctcgaaaacctccctgggaggagaactttcgcttcacgtcgggggtttcacagagccttggcctccccacacccctttctttcccagagtcggtctcgccaaagtgtgccagtgcgcaccgaggaaaactaagccgacgcggggtggaaataaataacaaccaaacgtgcctcgtcgctgaaccaggcgacttcccctctagaacgacagctgccgaagaaagcatctgccacacgtttgctaagaaataattctttaaattcctttcttatttatacaacaatagcaacaacaaaagctactctcaataagcactttaggatgaccttctctattagaaatagtcactgctctttcaggctattgaaagctgagtatagtgtttttttaaaaagtcaacaatgtgctaaactttgttggctcaactgacacgacttaagcgtcaggttaatctagtccatttcggcgactctaaaaaaatcacctatttaccaccttcaaacttggagaaaaacttcctggcctgtatattttttaaagacacacacacaaaatccccacacacatttttattctttttctcaaaatattagaggaaaaggagtagtgtgacatcaatgaatgcctatttgccttcaaaaaaaaaaaaaaaaaaaaggcaacaaaatctgacccagtaatcccaggaattttacttgaaagtacattttgatgtgaagtgtattaaatgcaggttactacagaccagaaagaatattggtaatatttccaatcaagcaaatgcctgaatttcaacagggtcagcggggagcagacaattccctctttactctggctgtaaaagagacaagcgcgaagtgaccatcaaagtatgatcagatgttaaatgggcacagcgcagatcgctcttcaccctaaagtgtttttgtgtcagataccaaatttattaatgggattttttcaggtcacaaaatgtgaccccaccctctcatgaatattcaacagagaaccaagggctcttttgcgaggtagaaggaccttaaatctgccagaaagtcccccgactatcagtagagttctgactcttaaagagaaaaggtgctctttccggaggggctggcagagagccccaacggcaggaaatacaaataaaggaagtgctctccaaccaatgtacagggagaaagtggaaagaatcatttcaaaacgcctaagtgactttctttttcccaaagtattaaaattgagttttaatgtttataaacaaaaactgggatgtactttgaatatgcaatgtgtttttattttagaaactaagttcttcatgaggcatccataaaactcatgcatgctttcagaaggtggactaactccttagcaggtcagtgtttatcagctaatagtctgcaggtgcatcaaaacaaacaataaacaagcaaacaacattacagacgctcatgacccagctgtggagacaagccttaaacaaaataattagagagtgatgcaatgcagtgcttactcaactactaaattgcacggtggtggctgtaagcaccatgggaccacaaagaaggaggagatcactaggaggaggggtctgggaaggcccactggggaggtggcatttaaaggctgatggtttgggtaagggggaggtgacaaaagagagagggaaatggcttggcatactaacttagaagccacctggagcccatctcgccctgtctccagacagacagatgatatggtgactcagagactacttctgggcaaggaaatgtcccatcagtgataaacctggataaactacatatgcccaggccactttggttaattctaaactcctgtggtcctgtgtacttgccctgtatttgggattcaggaagaactggaacttccataagtggaatataatataaaatgttaaaaccaatagtaactcagaagacttcgttaaaaccatttattaatcactgtgagcaccaggtcattttagaaaagctgaataagaaaggccaacaaaaaaattttggattgtgggtgttttaacagtctcatgcagttgtcataatctgaacacaaattccagccctcattgtacagaggaggaaactgaggcttagaaaagcaaagtgatttctcccaagaattaaacatggccaggtgcagtggctcatactcataatcccagcactttgggaggccaaggcaggaagactgctttgaggtttgagaccaccctgggcaacacagtgggactccgtctccaaaaatacacacacacacacacacacacacacacacacaattagccacgtgtgatggtgcatgcctatagtcccaacaacttgggagactgaggtggcaggatcacttggagaccagaagttcaaggctgcagcaagctgtgatcgcaccactgcactccagcctaggcaacagagcaagaaactgtcttaaaaaataaaaaataaaataaaaaaaaaatatatactacaggcttccaagaggaagcagatactggataattataaaaaaaaaaagccataataatataaaatgaatacctgtggtgggggggaggggatatcgaggggtaagccaacgtttaaggaagagtaaaggaaatgctaaataccatactttaaaaatatttttgatgcccacatcctaacacccacaacagatacagctcttgttcaaacaccacatattaagaaacctgtcagttgctaaatgagtccattgtgcagctggctgtgcacttaagaacagattactatgatcccacaccaaactctaaccaccaaataacacacctgggactaaaatcatgtattatatttggttctgctgagccttagctttgaacacagaagaaagtgaaaggttttactgcccattcagagctgagaatggagataagatgtattaaaggaagagtcaggaggagcgtctcctcaggacattattccatacactgatgaatggccctgtggtgaggcagatacagcaatggtccctggcccacgtggtcctcagttccaacgaaaggcctgctttgccagaagctgcttggaaataactagagaaaggatacgagcatggggtgaaaaatcaactgtgtgatcagaggccaaaaccttaattcaagtttgctgtcttcttctgaacaacacttgtgttaacacaacacacattttctttcccctttccaattaatttaatggagtatccaggacatattctgaaatgacagaacttaaagagattcaaccaactgattccaattccggagagagaaagctaaagcaacaggaatacaaaatgtaagcccagtaacatgcctgatggcctactcaggaaagcgcgcctccccagaaggaggactgctttaagtatttctccaaagaatggcaatggggcagccaattagagttactaaattgcaacagcaatgccccattcctgagatctggggatttgtctccaaggaaccaccattctgtcttgatttaagcagtgcttttacttaaaaatataaattaatacatcatccatctacagggagctaaggcagttagctccatattgatattgtttatgtcactgttatgcatatgttgacaatgaagctaattatgttgtttttcttctgtgcctgcaagtttggccaagggaaaacactgagttctcactgttccataggagtttaaattccccttaatgcatcttccaaattgccatttgcattttcatgtaatgcaacattttataaagccattgcttctggttaatttgtatatacacagtgtgacatgtcaacattcaggtgacttgtaagtatgatgagctatggaaaacatcaacctaaaaacaaatcccttactctaaaagcattcataagcatcagaggtaaacaaaatcatgacagaaaagaaaaatgacaacatcctttcctaactctgcatttgacagtaataaattaccctctctcatttatgatgaaactataatcccctgttttaacataatgtaaaatttgttaatggactgcttctgccatggggttagaacagattacactgaagtgtgcaaagttcttgaaaaggtacatgttttggggcagtagagcatgtcccaaagtgctgtacccttcagatatcggggggaaaacatcactgccaccaccaccaccaagtgtaatttgttatttccctcccgaagagtgacagtatttttggcccacccacaggcaaaccctcgatttttaagcataaccagaaatggggcactgaaggggaaagaaaagacggctcttggggaatgaaattacattttaatttttttaacgtttacttatgtagaaatcgctgaatatcagataaaggcaactgaccacctttatttagtacagtcagcttttccagagatctgtggtgtgcagcaggcctgcaaagaggcaaagggagcgtgtcccatcctgccctcagaacaatgctcacacatcttcctcccatgcaacaccaccctcctctgaccctaggttgacacaccctcatgtcaaaaccttctttacgcctgccctctgctggcaagcctgccaggattaggaaattttgactacttcaacttattcaaaagacaacttttaaagccagacagagaaaggacatgtaatgaactattaactggaatatataaattaagacatttaaacaaaatggggggagaaagggggacacccctagtgaaatatggcacttttaatgtaaaaatgcacattcgtctactctattgcctcctcgctcacagcaggggagtgccaaactcgatattttagctcacctaagagaacaacctgtattactgttgggcatcttgccttcttttgctcactctccggggagagcatgtcggcgcattttcaataaaacaccttcttagcagtaatgggccactgttcccatttcagtggtccctaaggtttcacgatacagtatatttggctgactcgcagttcgagttttcttctggcattcctaagatccaaaaaacggaagagaaaaagcaaaagaagagtacttgcttatcctttgtttcagtaagaaaacagtcaactttgagactgattagctggtaggacttacacaaaacaagggcactctcgggccctctcccctgctacgggaaccctccgcgcacgtgtgggccagactcccagctgaaggagggctctgggcattagggggtaaatttctgcagcagcgtgctggggtttaacagtgcaactcctgtcagtgtcaatgggaagcacaaggcctgtacaaatccctgcataccatttcaaaaatatatctccaagacgggaaaatgaagcttagcagttgcaacctcaaaagcattcaggaagtagcactcttgacagcgctttagatgccgagtaaatggtcttataaagaacacccaatccagccgacaataaatcttacaccggggaagccggcacagggctgtggaatcccctccaagataattgccttccacactgtgtggcatagaagctgctacacagaaaacattttccggggctctgcgctcgctatggcttgcttttctttccctaatagtcaccaattacacagacactcacaccctgtctttaagagtgaccacataaaagtctcaaggtttgtctccttttctagaaaaaaaggttgtaaggccagttctagtggggagcgggtgggagagggaggttgagaacagagggtgtgtttaagaactcaggaatggaatctgacacaggcatccaggtgagcaaccctgggtgtctccactttccagtctttgacggttcatgtagtttccagacagctccaagtactggggctcatctacaggccgctgaagcggtcagcacatcttttctagtccacagaggcctcaagcaggctgtttaactctgagatagtacaggagtactacatatgacttaggattctattaatgactttgtcaggaataatagtgtgattgtgggcaagtcacgtcacctctctgcgcctgcacatttcagctaaacaaagaggaagatggatgagatctctctataatttctttttttcttttttgagatggagtctcgctcttgtcacccagcctggagtgcaatggcgcatcttggctcactgcaacctccgccccctgtgttcaagcgattatcctgcctcagcctcccaaatagctgggattacaggcacctgccaccacgcctggctaatttttgtatttttagtagagacggtgtttcaccatgttgcccagactggtctcaaactcccgacacctcaggtgatcggcctgcttcagcctcccaaggtgctgggattacaggcgtgagccactgcgcccagcctctgtagtttaacaacaacaacaacaacgacaacaacaacagctatcattactggtatccttacacctatcatgtaccaagtgcacattttacattagcaaaggactaatctctaggtatttcctgcttacaattaggatcctatgtaaaactaccagaaatagggctgggtgcagtgactcatgcctgtaatcccactgactcaggaggccgagagaggaggatcacttggggccaggagttcaagaccagctagggcaatgtagcaagaccctgtctctaaaatattttaaaaaattagccaggcatggcatgcatctgtagtcctagctactccagaggctgaggcaggaggatcgcttgagccctggaggttgaggttgcagtgagccctgatcacgtcattgcactgtactccacagcctgggcaacaagaatgagaccccatctctacaatgaatgaatgaatgaaaccagaaccaccagaaatatggattaaaattataaataggatttcaatgctcaataatctcgaacactgtcatgtctacagtgagtcagggaacaacaaccaaaaaaatgttttttgggaaacaacccaaaacgtttactgggacattctctaggtcataagccctatgaaacatcaacaacttgtagtacatacagtaagtcacatacatgctttaagacttggtggatttagttgaggggggtcagatgaagactccaaaacaacttgacttctaaacatatttatgtttttttgtgcttgtgactttttcatcctcttccttaaccactttggttcttttatttcaaccatgcctgctttcaccaaaaaagatttctgaatatccaacccagcctcccaaaccacttgcttgcttctgttggttgcatattggaaaggagaaatgagttttaagcatcaggtggctgctactgatagggggtgccttttccatctcagattgaagccacagctaaggtttagactggattgcaagggacatttggaagaaagagtaatctcacagagacatcagaccccttttgtattaacagtttaataaagtcttgagaaaatgcgtctagcctgcaggccaattatttattttttattatttcaaatggcatttcatccttcatgaggaaaagcagtagatgaagcaggaagctttcaggtcatacagaacttccctcttttcaaacaaataaggcattgtgtgtttgaacaataggaggaatgtctaattgatcttaattaaattcagcgatgtccaatttttgagatgggtcagaacacatctatgtaatgtcacaacccaacaggccagagctttgaaatcagggcgcgctgtggttaactgttctctgacaccctttttcatccgttcacccatcccactgggctactaacttattcttccctctaactttgttctctgcttacacccttctctatacctcatgtgaatcctcacctcttcctgccttggggcttatattttaacagcagcaacagcaatcccccttatctctgaagtctgcaaagccctgtcaacattcttacgacaacctatgaaacaagaatcctataacctccactgcacatagagaaggctacctggagtttgaagcagaagagatgtgagtttgaatccagtatttgttactcatcagcaatgtaggtgagtcacaaaagtttatattatccgcatttcctcatttgtaaagtgggaatgattatctgcctcagagtagatagatgtttctgttattattttccgagggggtgtcaacttctaaattaatgtctcctgatttgagagcattggtgtgaatatttgatccaatgtatcgcaagcacacagtgtctagcaaaccctccaatgttgttcacagctgggggactcatctgaggtcctttggctggtgaatggaagagctgggatgtgactgtgtcctccagggctcagtctcttgcattagggaccctcttcatttgctggctacagagcttgggcaactttgagacaatgctaagataacaaggaccagagccactcatgaacagagaggtgcaggaaatcctctaaagaagccaccaatcacaaactgggaagcacgtactgtgaccctggcacaggatttgacaaagaaagggaaaatgagggaaggcttggtgcctggtaacaagatggctgagaaatacagcagtacttatgggaatgtgtgatgcatttggcatttcctatagaagtgcttaatcctccaaacaaccggatgaagtaggtattattgtgcccacttaacagacagataaactgaggctctaagagcttacattattattattattattttgaaatggaatcttgctctctcatgcaggctggagtgcagtggtgcaatcttggctcactgcaacttctgcctccgggttcaagcgattcttctgcctcagcctccccagtagctgggactacaggtgcctgcctccacgcccggctaatttttgtatttttagtagagacagggtttcatcctattggccaggctggtctcaaactcctaatctcaggtgattcacccacataggccttccaaagtactgggattacaggcgttgagtcactgcacatggccagcttaaattatttaatcagtatcttgaagccggtcagtggggtgttgagacttgaatgactccaaaacaaggcttctaatcccatatgccaatctggagactaggcttgggggtaaaactaagcctggaagaacaaagaggctggttcagtcttactcccatggaaaataaatgtgaccaagtgtcaccgattagtcagcatgaatggaagctaaaataacacaaagttaaaattctgatgtcctctttgattcttacaggaatccacagtgacaacccacaactgggctggctggatgtgggagtgggaacatcgagggagtgagaccaggggctcatgcattctttttgagttacttctccttgattaagcagtttcttatactcccatctccactgctggaaagagagacagacagacagacaccgatgatcttctctcatctccttccgacacatgactgagcaccaggcagaggccagcagcctcagtgcctgagttctcctggtaatacacagtgtctcagatgtaaacatgaaacatcagggtggtggagcttatttggtctctaatcataaaaggcaaggagagaattcagcatggtgactctggagagacactgccatcggttctgatcctggtggtactattctctggctgtacatttagtaaattgctagtttctatagacttcagtttcctcatctataaaaaagaactaatcttagtacttcacccacacaaggtttaaatgagataaaacagatcagtggctggcacacagtaagcacttaaaatgcttcctaatgtatcattattactattactacataccacttttccttcaatttcttccttttgctataatgaaattacagaatccaaaatttattttagtttcttagacttcttatttttttgtgctgtaggtactgttgatcctcactccaaaatttaactcagcagcggcagatccttcagccaaacaatggaagaagacatttggttgttttttaaccagggtcactagaccaagaatcatctacaagaggcaaaatagcagtcccacttaaatctctaggttgtggtgtgctacataccccagccagttcatcacttgcatgtggtgaaggagtatggtgatttgctaaacactgagctctcaaggacccactgggttttttttgtttttttttttttaaacaaatagggtctaactctgtcacccagactggagtgcagtagcacaattatgactcactgcagcctcaacctcctgggctcaaaggatcctccggccttagcctccccagtagctgggaccacaggtatgaaccaccaggcctggctaattttttatttttcttttttgtagggatggggactctgtatgttgcctaggctgctctcgaactcctgggctcaagtgatcttcctgccttagcctcccaaagtgctgggattacaggagtgagccattgtgccaggccctgctgggatattctaaggtggggtctctgccccaagtgtcaagaacaatgaactgtaggttgaccaacatgagacctaatttatggaatcttcggcctatattttttcaatgttttgttactcacggtggagcctgtctccagaaaggctggctttcaatgtagtcccagccaccctggctccagagagggctcagcttgcacccaaatagcatcattgtttaacaggcctactttaagattatttttcaagttcccaatacccaactaactcgaaggaagaaatggaaatctattttcttttcttaccatcatttgatcatttgatcatttgctgaattaacaaatacgtacatacgcagacatcagaaaagaagggctcctaccttggcctcagggggaaaagggaacttgtagaataagacaagagttatgctgaagatgaaaggataatgctctgccgtagggagatgggcaggcaggaccgggaagggcatctgagctactggaatggcacgtgccaacattcatatggcagacaacatgagtcagaataccagagaatgtgaaggatttggtgtggctggggtgattataattcatgctccagctcccttcctttgagatgaatagtttttcttctttttctcaatttcacctgtatttcctatctcaaaaatttacttatctcttcctcttctccttcttcctgttttgagcatggtctctgttcttctttatccatgtcatggccatgattaacatgatctcatccagccttgacctcagctgggtcaaacacacatacatagttttcctccaagttagcagagtttggtgttctttactcctatcctggcacactctcaactgtgattgctaagcttctaagccagagatgtttgagtcagtggatctctaatatgtctctggattttttgaagggctaatctaacattcacacagggattggaaacacataaagttatggagcatgggctcatgggttagatatttcagtcaccaagtttttaaataatatcacatcagacatagttatcttattatacaattaagtagaacaaagcttgaagagagctcacatccaagcaggggcaaacttctaaaacaccaaggacttgtatgctaatccttcttagatgtctagaagaggaaatagaactctaacaaaaacggcatagtcaaggctaccactgacctttcacatgtcactcccattctgcagcaaggtgtcaatccctgaaccctgaggtctctttttagtgcactctctcctaaggcagcctcgctgtactgaagtgaaggtagctcttgttaatttttatttacttgttccttatgacctaagtggggagtgggggaaagacagctaaagacctgtttatagtacagtgaaaccgaatgtcatgaaaaggagccaagtctaaacaaaaagtattcctctgttaggcaaaattatcctttttaacaggaacgcacatacacacgaggagaagaggtcaccaacctagccatcttcccaaccatggcactaaatttggggtgttcccacttccccgacttcctacagcattcactctctgtgctagtcacttcatcattccattacatattgaactagctcatcaaatgccgttgtacataaccctgtacataccactcgtcaacaaagatttcatgaatttataaacaaatgaataaaccaacgaatgaatgttttctattttctcttctttgccttactcccctctcacttcctcccctcctaagaagcatttatgtttcctgtgcatatatttttttttttttgagatggagtttcactcttgttgcccaggctggagtgcaatggcgtgatctcggctcaccgcaacctccacctcccgggttcaagcaattctcctgtttcagcctcccgagtaactgcgattataggcacgcgccatcacgcttggctaattttgtatttttagtagagacagggtttctccatgtctgtcaggctgctctcgaactcctgacctcaggtgatccgcctcccttggcctcccaaagtgctgggattacaggcatgaaccaccccgcccggcctcctctgtatattttctctaaactgtaagctctgagagatgaattgtgtgctctttcttctttctccacctgtggtgcgtttcacatagtgttaaggaaaaagtaactaagtccttgctaaataatagcatctctataggtaagatgaatattcagtgagaagcatccctatattgccatgtttagggactaaaatcttttgatgacaattttatgactgagtgacctcatcacgtgcaaaaagtgcatttgtacacagcaatcaatgattagactcttcgaaaattaaaaaacaaaacaaagctgggtacaaaccatgattcagagattacacaaataataaatgtcattttatggctgtgagtaaacttgaatgacttaccctaataaaactgtacctactaaaggtagacagctactccagggttttaaaaaatcatctgtttttcatttctcttgctaaattttgttaaatgaaaagaatccttctgaatggacataagactggaagggcacgaaaagcagtttttctaaactgctaccaataccagcacatcctgcaactagataacgttgcccaaggagcttccacttcattttgttttgcctccaaaggctcttcactgatgcagctaaaaaagaggaggacgaggaaagacccacaggaagactgcagcccagacttcattggagccactagtcataaatagtggcaactttaacccttctccttggaagcacaagagctagtgtgacctttgcttctctttcgttacctggattctgggaactgcagacttaagaaccaagttcatcccaccagtggatgctatggaactcctgcactataacaactcccccacttcctaccacgcccactcacggtttggttttgccccttcctgctaaagtcctaaataggttctggttttgtttaaagcatgtagccagtatttggtaagtgacaggcaaggccacccactctgtcttgcccctgcgcccctccaaatagagtgcgcagaaatgagcatggtgggacaggtgtctgcccctctagtccagaggaggacagcagcccaactcctcattattctattaatacagtctgaattctttgcccctgccccccacctaggtctcaactggctcctactggtgttacaatcattcctcactaattgtcacatgaactgctgttaagttagagctcttcactctacactagtaccatggtatgggctttgcattcatgcccattaacgatctttttttcattttgattgagaacttcagcctgctgagactttgttctaaaaaaatcttcattcttcatctcagcatattaactcttccccatcctccctcgacacagacaatttctattatctctaaatttcttggatcatattcatctgagagatattgtgatcagttttctaaatgtgtgcactccaatgtttcacaacatctaaactggggtgctattgttactatttgacaattaagaagacctgttcacgtcagggcttattctcatgtatcacccactccaggtgtcgggttattcccacttattacctgtaccaagagaggtccggccctgcctcctcctgccaccttcactcagcacccagcacagtgcctggctctcagcagaggcttcattgacaaaggtttttgaatgcatagatgagcgagcttacttaatctttatcataatcctatgaagattctgttttcagtctacattttatagatgagaaaactgaggtctagaaacttaaataactcactcagagttaggcacctgttacacagaaccagcatttaaaaataatgcctagaaagtataaacaacatgcacaagacacgccaattgctcatttcagagcaggacccccaaatcaggtcttgtgcttctctttcttgtgaatcactagtatggaccatacctctccaatcacctctcctaccagctttctgtttctcttttctgcagaaacagacgtagctaaagaaatttccaaattaaaacctggcaatggtttctatattcttgtttcctaaacctataaatcaaaagtgtctaaacaggtcataaatgttcctcagcaatataatgggaaaagttctgatttatagtgccggtggaataattttaaataattacataagagttttgaaaaaatgcaattaacacctttagaagttttttgagatgaaaatgaatctctggagatgactgttcccatacataaagatagccagttaaaaaataaaaataaagctacaagatgcaactgtgtctgaaagatcctatggagacagagaataggagctactatttacaatgggaattcactagcgtgaccacatcaataaatgtttaactttgtcgcattattacacgataacaacacaatcatcaaatgtactattgaacattgcaattaaatcaccaaataaacatcttatttctattcagccccagctgatggctttctgcctctgtactgctttgacacatcctaccacactgtcctttggaacacttcaaatccacctacctgctcttgcaaatctggccaatgttcttcccttcctctttctcttcatttgtgattcatctccttcagaatccagccttctacagatgaagtcactccaagcaaccatccttaaccctaatttccctgggtatcaaagaaagtcttaccatctctgaatttccttcttctggcttagcaagcagtagtagttatgatttgactcaatgaacccatttctcaagcgcacttaaggtactaacctttcccttttgtctctcactgggtgatcttcactttggcccattctaccagcactttgtctgaaacctttacctccacaggatttgcaactctgaaagtggcagaaggaggcaacctccgactaaactaatttttaaagtatatactgcttaacgctaagtgttctgcatttgtgtccaggtttaccttggatacgacactaaacaataatgaagcagaacttgactttcctcagggctccttcagatcccgtggcaatctgaaaagtgttctaacactccataattcaaaactgaaatggcccaaggtatctccccagttctttccagcacctgtactcagctcagtaattacacaaagagaaccctcagccattatcctggtcatccgaattaagaaaaagacacagaatcatagaaactctgatctggaatagatttagcgatcatcttaatcccaccccctcactccagataaggaaactgatgccacggagggaaacatgaagagccaaaggtcatacctctaaatagttacaggcagaaccgagaccagaacctaaaacctgcgactccttattaagcattctttccattgcttcacgccaccagacaaggaagatacatgaggaaccacaaaactaaaataatcagcctccaacacttagaactgctttggttgggggatacatagggagaaaacagtctttctgtatttgttggaaggagcagtgctttttatttccactacaaattatgaatgaaaaatacaactaagtattactcaccaaaggcacaagacaagatttaagtcatcttccatggtcactcacatttcacttgtctactatgtagctagattttgtcattaacccagggctgaattgtccaacagtgtacacagtagtcacaaatggctatctaaatttaaatgaattacacttaaataaaataatttagttcctctaacatattatccacatttgaagtgcacaatagccaatgtggctagtaactaccatgctgcaaagtgcagacatagaatagacggtgctgcgctgggcgcggtggctcacgcctgtaatcccagcactttgagaagctgaggtgggcagatcacttgaggtcaggagtttgagaccagcctgaccaacatggtgaaacctcatctctactaaaaatacaaaaatgagctgggcgtggtggcgcacgcctgtaatcccagctactcaggaggctgaggcaagagaattgcttgaacttgggaggcagaggttgcagtgagccgagattgcaccaccgcactccagcctgggtgacacagtgagactctgtttaaaaaaaagaaaaaaaaaaaaaaaagaatagacggtgctgatgtctagaacatactagtctgtgaaatgggcatcatatgaaagccaccacataaattataagtttgtaaacaacacacgttctcactcgtaagtgggagctgaacaacatgaacacatggacacagggaggggaacatcacacaccggggcctgtcagggggtggggggtaggggagggataacattaggagaaatacctaatgtagatgacgggttgatgggcgcagcaaaccaccagggcacatgtatacctatgtaacaaacctgcacgttctgcacatgtaacccagaacttaaagtataataaaataaaaaaaaaagaaaacaacaacaacaaaaaaaaaacagacaaaaattgtaagtttattatataaactttttacagtaacaagggactgcagaaatattctagagcaactttttctggtttctaatgaaggaactgagtcctaaaacatttatttatactgcgctcccaatccaggtttgggattaaacgtcgaattgtccaaatctaggaagtgatttttccgctaaccagctgactggctaaacaatatggctagcaatatgatatggctcacctctttaagataaggagcaaaatgtctatatagcacttactcctccatcttctaaaaggaacctgagtggcaacaagttactccttatctattctggatctacgtggttttaagggagccaacatcatccgggggatgcaggggtggatataatgctaggtcccactgatatagtttgaatatatgtccccaccaaatcttgtgttgaactgtaatccccagtgtcggaggtggggcctggtgggaggtatttgggtcacaggggcagatccctcatgtcttggtgctgtcctcgtgacagtgagttcccctgagatctggttaagtgtgtgccccctcacccccaaatctctctctcactcctgctcttgccatgtgacatgctggctccccttctgccttccaccatgagcaaaagttccctgaggcctccccggaagctcagcagatgctggcaccatgttaatgcagcttgtggaaccatgagccaaataaacctcttttctttataaattacccagccacaggtatttctttatagtgacacaagaacagcctaacacacttaccaatcagcacatctcctcccttctccacagtgactggttcatgtatagataagtgacccaagtcactcaattgattcaagggatttcgctggaattactgagcaagagatactctctttctgaggggttgctaagctgtaagtatgtgaagcagggactctcagaagccctctggcctcagcaagggaaaaacttgacaaagaacggagccaataggaaagaaacagaacagaacagaacaattggaacagacccttcctgatgacgttacctgagtgcctggttccagctgggtctgaggccaggctaacccttgaacttttaagctctgtgagcgtacacactctctcaccccaacccctcatcacttgccagtctgagctgggttttgacatttgcatgggaaaaagtcttgactaatacaggtacctccttccacaagaagattaggaagtggtcatagtgtaacacttccaaacaacctagaaaagcactgcctgagggaaaccccaaattacaaggcacaccattgcagttgcaaatcttggttcatctgatgccattctgggagggattccccaagtcaaccccaactgtacacggcctgtcccagccatgcaccattcaccaggtttcagttcaccacctgtgcatttttctttcgatcaccccaattcacaaatttctttcaagggtatgcctgcaacatcactttgaaattcagtaaagtatcttctattcaccaagccctgggaatttcttcaagacattttcaccctctaaaaaaaataaagaaatcccctcaaagtcttatgatgaccatactattaagagttctcagtccagtgggttttcactcaaaattctttcagtgtgtgtggtttttttttttcccccaaaaacaaactctacaatgattcactgattcctcacccatgggtttgtttctcatttttcctgaatctgatagtttattttttgttcttgatccactctgccaaattatgataatctcactttcatagagtctggtaataaatgatttaaaggaattcattagcaactattttattgtaatacatacattctggagaaatacacatttttcttcatggtggcctctttcaagctatctgactgaaatcacttactgagaccaggcatgttaaaatatagaatagatttttcatgaataacctgcccttgcatagttaacactatttttcaaagtctttgctttctcctaaataaaatgattttttaaaataaatcattgttggccaggcgcagtggctcatgcctgtaatcccagaactttgggaggctgaggtgggggaatcgctggagcccaggagttcgaggccagcctgtgcaacacagcaagaccccgtctctactaaaaacacaaaaattacctgggtgtggtgttgggtacctgttaatcccagttaccagggaggatgaggcacaatagttgcttgaataaataaacaaacaaatcaatcaatcaatcattgtttaaatatatggatttgggcataaaatagtcattccttgttagtggctgttcatttctttcactcaaagaatttgccaaaagccacttatttctatgcattttctgtccagctctgtaacagcttgcaactactttttttcttccacttagctttttgcttttcttttctgagacgaggtctcactctgtcccccaggctggagtacagtgacacaatcacagctcactgcaacctcaacctcccatggtcaagcaatcctcccatgtcagcctcctaagtagctgcgactccaggtgcataacaccacattcagctaatttaaaaaaaaatttttttttgtagagatagggtctccctgtgttacccaggctggtcccgaagtcctggcctcaagcaattctcttgccttggcctcccaaagtgcctcacatcacaggtgtgagctactacgccaggccccacttagctttttttacttcaccccattaatatttagtatcccaaagtttcatttattttcctgttactgtgaaattccaggtgaagattactgggctcctatggcttcagctttttactattaaggaatattatattagaatcatcaacaacaatccagtgaaattctaataacattattagcacctttcgttaagcgtatgtcacatgctgtgtgtctctagctgggtgctttatgtccaagttttcatttggttcttgtatggtgggtatcatttatggccttttttttttttttacatggagtctcactgtgttgccagactggagtgcagtggtgtgatcttggctcactgcaacctccgcctcctgggttcaagcgattctcctgcctcagcctcctgagtagctgggaccacaggcgggtgccaccacacccagctattttttgtatttttagtagagacaggatttcaccatgttggccaggatggccttgatctcttgacctcgtgatctgcccgccttggcctcccaaagtgctaggattacaggcgtgagccaccgcacatttacggccattttatagacaaagaaacaaagttttctattttgcccaaggtcatggtggcaggtcacgattcaaacatgaatcctttgtttctaaagcctaaagagactcaggatgacatggctgaaaattctagcattggaactgcaaatatcggattgaaatccatcacaactgtattctttgtagctgcaaacctgaaaccagtgtctcatgttgacaactggccttgcccatgttttgtccttggccaaggggcaaaaagaaagctctgccctctttcagactgtgcccattacagttctagcttacttatctaggactgctagttaatttcatattaaggaaatctgtgagcatcccatgaaaggggatcttctctcgttcttgcttatgtgacaacaacatatacaaacatcattattatgcaatgtaccggggggaaagggagcacatttgataaatgtcatgataattttattcttcgggaatctaaaattgctgttgccttttctaatctccagtgtctctagctggtccagagataacggctcccatcccaggctagagactccatctctaatttccccaagtctgtcaatgagaggcagggactgaaatcccaagttctgtctcaccggatattttccaggaatgcctctcttccaaatcatcagcgacatttaacatgaccctgagcagcaaacttctgccccagaggaaagcagaaaaccaatttatgtaaaattaaaagcgatttgcttgatccatcacttgcttccactcccgtcccactttcaactgcaacacattcagctggaattacaggctacctcttcgtcctgcactggggcatagaatctatctatgcacaaccatggagaacaaacattacagagaaaataatgactttggaagcaccaggcaccctacccaaacacaagctacatgtgtgttcacagatggaaactaacggctgtttaccctgaaggccccataagaaaaatgcagtcaccataacagtaaaatgcaacttactattcaacatgaaacaaagtgagataaagagagggctagggactgaattccaacaaagagctcttatagtaccttggatttcctcgggacagtccacaccattcaagagctgtgcaggccctgaagaggtgagctgcacaactgatgagatcaaaagaccaaggcaggaaaagggttgcaggttagctcagttctttgttgggtgggtcagagaacagaactcatgtgacatcattttgtgtcttgctctggaggtgcacttagcaaagccagaaatccaatgttaattgatcaaacaacgacaacaaaataccggttttgtctggcaaaggattatgcaacatattgatgtaaacggcatcgagccgcatcagaggtactctgaccatttccttgatgcaacaaataagggcacgcattccttgtcagtgcatcacaaaatgacaacaaaagtcatccaaggtttcctgttgagagatgccagctggtattgacaaaggcttaagagtgtctttctcagacctctgtggtttagcactttgtcaaaacaggatactatttaaattaaaaatttactgattcaagttcagaaaaaccctgctttgctgtttttataaccaaatttgtgggtggggaaactttgacctttattttttctttttttatgacaccttatatgggtctgagaaggtactatatttagcaggctagatttgagaactaaggtgtctaagcaagatgactatcactttctatgaattactgtacatgtgaaatcatgggcttgttatattatgcaaaagcgactcatgtgaaacaaacaaaaatacctgtttgcatgtataagttttgtaaaatctttgtggggagagaaaggggaaatacacactagactaggccacggcataatgtacctcccatgtgaatctggcttagtgtgcaaatgtatgttttcagagaaggctaagccagggctgtaagactatggtcaaaaaagcaaagctgacggtcaaccataagcagtgcagtggtgagaaccaagatgctggggaatagatggagtctctggaaattgcgaaagagcaaccaagcttgtttctgattgggggctcttaaacttgctcttccccgaacctgaaactttcttccctagatagacgcaagactcagtccctcactcagtcaaggtctctactcaaagaccatttcctcagagtccttccctggccagccagtcaaacatgggactgtcatcaccacggtgtttatcttaatctactttgttttcttacagatttcatcgtcacacaacatgtggtgatacattgttttgttttttgtttttttttttttggcttaccagtttaatgtcccataagaatgtaatctcccggctgctttctctgctgctcactctaggtgcctcactctaggtgtctaggtcaacacaaccacccaataatttgtcagatgtttgttgaacagggaatctcatgaacagtctatttgagttgcgtaaaggatctcattatttttcttgaactttcacctgtctagctaactatttatgggaaaggtactaacaaagtcattccaatgatgtcaaagacttctgagacaccagagatgcagttagatataaatattaaactacttattttgccttaaaatcactctgagattatctttgaaggtcttacagctttgagaatatgcaacttcccattgtttagggggaaacgctggaggaaatttgcataatttgagaaagaaatcgaactcaccaaataccttagtgcagttcatctcttttgtcaatctctctttcttattagtacaggcaaatcttttagtgaagtgaataatactttggccaatgaccttacgccaagagtacaccagtgctcaggtcacattttgacctttcttccatccaacatagctgaaggatatgacactttataaacaattacactgacttgctcttactctgattctaaatagggctaatgaggaggttggaatcagtggcacccaacctccgaaacaagccccaaagattctcaccatttggtattcatgccttggatagtaccttccaacaccatgtcagggccggtctctgtgaccaataaatatggcagaagtaatggtatgtgatttccaaggctaggtcacaacttggatcactctgggaaaagccagctgccacatcacaagggcactgaagtcacactatggagaggtccacagcctgagaacttgaggcctcctgctgacagccatgtgagcgagccatcttggaagcggctcccctagccccaatcatgccccagcctcacattttgactgcaatctcatgagatgctatgagcctgaaccacccagctaagccactcccctatctctgactcacagaaagtgtgtaaaagaataaatgtttaaactgtaagacactaaggtttggagtaaataacagagttatccaaatctgatcatgagggcagttgcatgtcatctggcttgcacacactttcttcctgcaggaacactcttccctgccccatccttgccacatggggatcactactacccacagtcctagttaagaaagaggaactctaattttcacaaggcagccagtttaaaaagacatcagtctataatcagggtacaaagatacaaagaaatcaagaattccaaaatgcctgggctctagctgggccactatagcgtgctgttgcctttgagactctgaggtgaatctgttcatgaaaccttgagccacttagaagagggatagacagcagacaggcaggctactgaaatgagttgaagtccatggcaaagtgggaatgggcagcatttctctgctccagataactggtgctatgtatattgcttgaacttctgatttttttcttttttaggagatgacagaaaatgagattttcatgggaaatctccagattttttaaatctttgcaaagaaaaagaaagccttcaaaaagttcgaaccaaaaaaaggttaaatgttgtgtgcataaacaaaacagtatctagcctgcgggccatcagtttgcaatctctaatggggaatcaattccttactttcttcaaccttgctcccatcataaaacaaatctctcgattcctattttcaagaaatttcattttctaagcttctttcacatttttcttggatattcccatgtttttcaactaaacagtacctccctgtttgtaacagagttgtcacgatggctgttagaaaacatttgccccgtttttcataagtgcagtatgtaatgtgataatacagaagtgaaagaacaagtctcctgcaggtgtgaggagaaccacccttggggggaaaaagtaacagggcaatgaagagtaacaaattactcagtccccaggagaagcaagtcaactctaactagaaggcttgatgaaaagataattttataatccatgcttcccttcccaacacatcaagacacaataaaatgagcatactccctgatcttctttgcatatatgtaactataatgtcaaataaaaaataactgtgcaactgcctccttaagagtgcagggaagaactaggagggggtcagagtggggaagcatgatcattgcactctgtcttttcttctcagcagttgcactgccattacaggagagctagggtcctgcacagaagacctacagaagtgaacaattcactgtagaatttgcaacccatctggcatatatcaaagattcagagacgataacataggtatatgataacataggtatggccattctaaatgcacttcgctctgaaatgcatagggggttgacaactgccactctctgcccatctactaccatcagaaagcctcagtattatataaaattcaattttttgtgtgtccagaccactgtaggatctcacaagtaataacccaaaccaacatcatcataatataatgatcagaacaacagctataagaagggcaggtaacattttgagctacaggtgccagattctgtgtgtgtgtgtgtgtgtgtgtgtgtgtgtgtgtattcttaaattaatcctctgaattaatctgctgggtagacatttctactttatagaagctcaaaagtgagctttagcccaggcacggtggctcacgtctgtaaccccagcactttgggaggccaaggtgggtggatcacctgaggtcaggagttcgagaccagcctgaccaacatgaagaaaccccgtctctactaaaaatacaaataaaatgagctgggcatggtggcacatgccagtaatcccagctacttgggaggctgaggcagaagtgcttgaacccgggaggcggaggttgtagtgagccgagatcgcaccactgcatgccagcctgggtgacagagcaagactccgtctcaaaacaaaacaaaacaaaacaaaacaaaacaaacaaacaaaaaaaaaactgagctttacttggacaaggtcccagagatggtaaatgatggtttttagaatttgggtctatctactccaaagagttaccaaattaagcttaattgtctcatcaatatctcaagctcaagattaagggtaaccccaagctttttcctaaccagttaacatattcaaccaatgaatgtaatgctatgacattatgagtctaaaataaaatataattctcaattatagaattattaataaaacaaagaccaataaacttcacagctgggagagaggtatgagaaacacaactgtaatcaacatttggaaataagaaacaaagttcaaggatctggcttttacaaaagccaacaggaaaatcacgatgtaggctgagtgccatgactcacgcctgtaattccagcactttgggaggccgaggcaggcagatcacttgaggtcaggagtttgagaccagcctggccaacatggtgaaaccccgtctctactaaaaatacaaaaattagccgggcatggtggcacacgcctgtagtcccagctacttgggaggctgaggcagaagaatcgcttgaacccaggaggtggaggttgtagtgagctgagatcgcaccactgcactccagcctgggcgacagagtgagagactctgtctcagaaaaaaaacaaaaaacaaaaaaaaacaaaattagctgggcatggtggtgcacgcctgtaatcccagctactcgggaggctgaggcaggagaatcgcttgaacctggtgagttagggaggaggttgcagtgagcaagatggcatcactgcactccagcctgggtgacagaaggaggctccatctcaaaaaaagaaaaaaaagaaaaccaggatgtgccagtctgtgtctctaagagggagggcaagtacagagacccttgtgggaccctaaaatcagtatcagcggaaactgaaggtcacgttcctccccctcagattgaggacaggaggaggctggtctgtggaaccgaagcaaaccttagatggaaggaaactttcagaggaaatgatttaagcttttttggtaagtagggtatttttcaaattcttttagaagttcttatttccatcttaagcctgcacaaataaaaataattgtcagttttcaaatgtgagggagggcgtttggcttattttccttcaaacttccaggtcttgggagtttttcttattttgaaggaaaacttgagctcccacagagaaaatggaggcagtagatgttcccagagatgactggagtattgtcttacactggtagcaatacagtaaaagaaggatatagagagacacgtgacaaagagttgcacagatatactttagagatatatgaagacaccacattaaaagagattagttcttgatttttcatcaggaagacatatttaccaaatgctttaaaaggcaaaaaagctcaggcgtggtggctcacgcctataatcccagccctttgggaggccaaggcaggcagatcacctgaggtcaggagtttgagaccagcctggccaacatggtgaaaccccgtctctactaaaaatacaaaaattagccgggcatagtggcacacgcctcagctacttgggaggctgaggcagaagaatcgcttgaacctgggaggcagagggtgcagtgagccaagatcgcactagtgcactcagcctgggcgacaagagcaagactccatttcaaaaaataaaaataaaaatgaaaaaaaaaaaaattaaaaaaagcaaaagaacattctagatagcactgtccaatagatcttttcacaatgatggaaatgttctatatctgcattaatcaaaataatagccactggccacatatggctatttaaatttaaatttatttaatgtaaatacaatttaaaaatccaactctttgactgtactagccacatttcaagttctgttcctgtgtgtgttcccagtttaggaacagaacttgaaatgtggctagtacagattacctctgttagtacatttattacatcatattataattctctgttcagtttcaactgtgatataaggactaagaaatatgcaattctctacttcagtactaagcaggatcggtacactacaggcacataataaatgttagaatgaggataagtgaatagatggatggatgaaagaatcactaagcctctggtctgttctcacatttacttcccagaggccttgctctcagaatcgctatgtcatttacaccaaactttaaaaccaaatgaatcctatgattataataatatcaataaagatcaaaatgagacttagatattgttgatggtgatggtaacgataaaaatcaataatcttctcatgagaatgctgtattcttgcctctcagtaacattgttctctatcagttcccaaacattttggtaagaaagctgttttcttgtttttcatgtgtttttccctataaattcagtaagtttctagatgcccaagctccttctcccaaaggtgtcctagagaccaaacctgaactttgaagccaggggccaaaaactttctctataaaaggccagagaataaatattttaggcactgcaggacgcacagtctctgtcgcacccactcatctctgctgaaagcagccatagacagaaaaacaagttcacaatggctgtattccaataaagctatagttgtggacactgaaatctgaatttcatataattcccttttttttcttttctttttttttttttttttttgagacagagtctcgctctgtcgcccaggctggagtgcagtggcgtgatctcagctcactgcaagctccgcctcccaggttcacaccattctcctgcctcagcctcccgagtagctgggactacaggcgcacgccaccatgcccggctaatataattttcatgtttcatgaaatattattcgtcttttgatctttccccaaccattaaaaaatgtaacaattttcttggctcctcagtactatagaaacaagcttcggggtttggcccatgggtttacaactgccaacttccattctaaggcctgtttcctgatcatgtgcttcccactaaaagtttcaggtcacagagtcatagagatatcctgaatctaacagaaactaattgcttattgtatacaacagatattcaatagctctacagtccagcagttccagaggccaaccaggagccacaccaggaagtgttggtttggggacggggaatggtggagatgagagctatcctttattcacccacctacccctggtggcagctccagctgtggtcaccatcagctgagcagacagatgaagcctcagctggtctcaagatccttttataaaccagttttgtccagacttctattagtcaaaatcctgatctacataagagtttctgcaagcccattaattatgcctttgatctgcagttacattatcttcaattaagcattaatatattgtgtgtgaactgacaccgtgtcatgcaaaatggtgaggcctctggaatacgtttccaaagccagccttagaaatagagctgcgtaggcagcgaaatatttattttcaaattcatctgtgtacattttcaaaattactgctctctaaattttctttgaaatgtctgacctgctgttcataagtcaaaaaatataatctctcttttgtaggaatccaattggtaaattgtgttaaaaaaaatattagactgcctactgccattagatggtgggtatctgggcctcacacggttggtcttaccttaaagaaaaactgccttaattgccatgtggccctcatggaacatgctgtagtaaggtgattttgccttcatcaattaatggccccaaaattccagaacagttgtagaatgaagaggattctatttgttaaaagccaaatgatatgctaatgtaaaacagataaagaggtaagaggcccagttggtcttcctagttccacactggcagttttttctttccatattttgcagaatgagcaaagaaggtatttgtttttaaaatactggcagaagaaagctcctagatcaacacagagtctacattttaaataacatttaggctgctgaatgaggtatgccctaaactcctagagaccaggtgtgacactgagacatgggccaatttcaacacttacctgaaaggtatccaaatcactttggtcagatatcaagttagcgatctggtgagacacagtatttcccaatttgggctgagctaggaatattgtaaaaatggatgcatattacaaaaaatgtggcataatcatttcaaagcagaagtgcataaaatgtgtagagaaaaggagatgaactgtacattttaaatctcaaggtagaccttcaatataccaaatggaccacccatttttgtcactccctggacttctcaataggactttaagattaacagggtgggtggcctacttaattcttgtattaggatattcagcttcctgtccaatgctacatcctgcataaatttacacaaaggcaaaatctaagactcctgagctgggatttcccaatatcttctgatgactatagatggcttgcattgctgaaataaggtcagagagttcatttctgctaccctagaagaaggctagggaatgaagaaatgaggaaaaagcagaatgaaatcaatactaagactttaagttggaaatgtacttagctgtcttcttgactggtggtcttcaaacatgggtgggcataaaaagcacttatgaaggtttttaaatatacacatgcttgggccccatcctaagattctcattcagaagataagagttccggagcctaactgtgagttttaaaagctttgatccctagatcttgataagggtaataattaccttagttctgatgcacccctaggattgaaaaccactgactagtcatttatagataagaaactgagacttacaaatgtaagtcactttgccaaaatccaacatgcttgggttcaaaatacaaacaatggaggaaaattatgtgagcacctgactgggcatcttaggagggctccatgttgaagcagtcccattatgtcttggattcaagacagagctgtatgcattttagatactgtagatctatataaccagtaagatatttctcagacagatagtagtgaagtgttttaatgtaatacaatcagatatattatgaaaatattcagaaggacgagagtaaagtgtcttgaaagggtaccttcctcaatatcacacaagtatgtggtataagccaactgtagccctgccagctgtggccattttcctgaatctcaaaatacccaaaaaattactagtttcaccattacacctatcttaatgcacggatagatttcaaactaacacaatgaaaaggaaggaaagtggggtgttaggtggcacctctgcgcaaatgaaaaaaatggatgcctcttcctccaagctgacacagccccagtgccatgccagggtacactgggataaacaattgctagatttcggcccttgctagtcccctcaataaggaatcctggttcaatgaacaaactgcatgatcatatccagtcatctaaagcacaggtcagccaactacagcccaaatctgggctgccacctgtgtatggcccttgagccaagaattgtttttatattcttaaatagcagggaaaaacaaaagaagaatgttttgtgatgtgaaaattatgtgaaatttatacttcagtgtccacaaatgaatttttattggaatacagccatgctcattcatttacatattgtctatggatacttttacatgacaaaaaacagagtaagtagttgccacagagacagtatggcccacaaaacctaaaatattcactatctggctctttacagagaaattttgttaatccctgatctaatgggaagaaaagaactactagtaaaccaaattccttttgcagatatcataaaaagttccaagcaaacatggcaggtgaaatagtttatacatacaaacttgaaactgagacaacgatggaggaaggtcaacttcattacccagccaccttgacagtacctttaaatgtcatcaatcagaatgcgccttgcaggacttgcaggggctcattataaattacagcacacgggccactgacacaatccagggagggtaacagggctctggtgacgtaacatgataaagagatttctttgtagagctctacatggcacagagctggagaatttccaggaaattgaatttctagagtgccacctttgactatccaagacaattccatccaagcaccgagcatctttgaagaaaattttatcttctggaaatgcttgccactgggtgtcatcctcaaaaatataaatttgaagctattttttccagtgagacagactaaatccaggatgtagattttccaattagactccttttaaacatctgttggtaggctgcatttaacattagttatttgtgcaaaggacaatttgattagactgtctgaaaccaagccaaagtctgcaaaataatagctcaattaaattctgttttgctttcatttgtcttagatttccctgagtgtgatactgttgcaaataatcaagtaaaccaattcctttcaaaatgagagatttaggtgtattttccttcctccctgcaagtatattccatcttcactatgcttcattgaacgtaatcttgacaccaaatacatttctgtattttgcctttagtctcctttaattttctatacttacgaattaaagttctatgccattaatattataccttaaatggattagcaaatgtacaaaggcaggcacagggcattagggtagtctaaccgcactacaggaatgttctgattttcactccatacctggcaggattcatttcatcaacccaatgaaagatttaggcaggactgacacaggattttttttaatgctgtttttatggtcttgaaatgtttctaggggctcgcgaacctgagaccagtctgaagcctcttcaactgtgaaccagtatcaattttcctttctttttggcttaggtattttactccttcattcagtcactcattcatcactcagttattcactaactcattcatgaataagtgtctatgctttatgtcaggaatggtgcggaatgtcacagcatcaagatttcagattaaggaccagttctttgctggtgagactacctatcattaattcatgtaaaattctggaagacaagaacaaaagaaagaccaggatggaatttttagaagaccatgacccttatttgtgcctaaagtgacacatttaggaaaaacactgtgcaatcaaaataatgctgctaaaagtagttagtagcacggatgatgacagaagctaaactttattaagtactttttatatgtctttctaagctatttacagatgttactcagctaatattcataacaacaccatgggataaatgctatgattaccacattttacagatgaagagcctgatgtcctcccatcaattccggttacccaaaagttgattataagcaaaacgatggtccacattacacagctaaaacacgcatttgaaaaatggccagtacctagtgaactaaatataacttggaatttactaggttattttccctttaaaaacagcttttaggttgcacacagtggctcacgcctataatcccagcactgtgggaggccgaggtgggcaaatcatttgaggtcaggagtttgagaccagcctggccaacatggtgaaacctcgtccctactaaaaatataaaaaattggctgggcgtggtggtgcgcccctgtaatcccagctactccagaggctgaggcgggagaattgcttgaaccctggaggcggaggttgcagtgagctgagatcatgccagtgcactccagcctgggcgacagatcgagactccatctcaacaaagcaaaacaaaacaaaacaaaacaaaacaaaaaaaccccacagtttttacacaggcacttttcatgcattaatcagttaatcttcacaactgccttaggtaggtgaggttaccagccacattctctagataagaaaacagaaatacagagaagttaagctacttttccaaggtcacacaggattaaaggtggtaccgggactataacctgccagtcagacaccagaggccatggtattaatcacaatgtaatgctgcctcctcccccaacatattctgacatatacaatctccaaaactcaaccatgcagctgagtttgtgtggcagtccagtgtaaaagatcctgtggctttaaaggacaaatcacatttcagagctgatcaagaagagacatggttttaggataagaatgcaatttgcccagtctcatttaaggttacagggaaaaacacaaagcatatgtttaagtttagataatacttcaatagttaccacagagtctattagacttcccagagaaaaagacctctccactctgacatggatcagcatagactatggtcagataggtctatggcaagcttggcaaacagaaggtgcacatagcacttctcccatctccagtgcccatggcagacatacctaatcaatcgtggcactcttcagagcccatctcagacccacagtccttcaaacagcactctaggtagagccacttcatatcctcaacaaagttggtagtcacaacaaaacctcttcggtgtgtaattctatgtggttcagactcttattctgtttctagaataaataacaatccctttacgctctcaaacaaacaacaaaccagacataatttcactgatgtcttattaaaagcaatttcattaagtctgacaaagcggctctcccatgtgcagacaagggagtgtctcgccttaaggtcttatagtcagaggagatcagaagaaaccttctagggggcagtggtagataccaatggaaaagaagcaggcagtcacatggtggagaacttaggaacgggacagcccttcacatcatgtggtttttagtttctttctgaagaaagcagacaaagataatctcctgaaattaaactcacacacaatttaatcaccaaaggtcttctctctaaacagcaggcaacacagtacacagtatctgcaattctggattttggggactctgaactgttatcaaatggactgcacttttatccagctccttacaaaggaatgatgactctgaattcatgactctctcccctctccccagtcagaaggctataaacttcttctcgggacatctaatttaatgcaaagctggaatgctaattaactagatgaaggcagcaggatggagacatggtatgatacataacggttctgaagagcagaatgacatggcgttcgaggagaggataggaggtgagcgatgcataaagaacagaagattctttgaggggagggggtgacgggttggaaaaagtctttgccaaaatcccagcaggtggcacctgaagggacagctctagaataaggtggcagcaggggaaacacagaaaaaggaacggacagaaaataccagcggaaggaaaaatggcacatgtgaggatgaataacatgctgaggatgaaggaaattcctaggtcagtgatgagtcaaatgactgtgactaataagacctggggacaaaagggatctgctggattagagatactgaaattcatgtgaaggcgagctaagagagaaccacaggtaggcacttaggagcagtacaacaggtctggaggcacccatgtgtgtgaaggttctagaacaagcacacagcccagatgcactgaaattaaaggggatcaaagaaactgaacttgggggaaagagtgaacttgggttccagaaatgaactgggaagcagaaagaaaacagcatggaggccagggggtactgatttgaagaagtttaaatgatggcattttccaaaaaaaacaagttagcccatgcaatgtattactaagaaggccagacaggttagaaggatggagacatggccactaaatttagtgacaataaaattcaagaaaatgatgaggagaaaagccagacttgggaggagtttaggaaagaaagtgactgggaaaaagcaaaaaaaaaaaaaaaaacaccacaaggaagcagcaggcacaatattctgagtctaaaagcttggcagcaaaagaaggagctagaggagagtagctgggaaggatcgagtcattcaaagttttggaactacccatttaaactccacatttaccatgaacaccgctaaacgttgagctctgtctgcttgaatatttaccaaagttcttcaatgggacataatgtaaaaggacaagggccggcgctctttgcccaactgtgtccagcagctttaaattctactacttaagtagttaaaaatctgttcttttgttgaaggagagaacttatgaatagaaggcagcaaccccagaccctttagaaatgactagtattcagtccctgtaatttaccgggcaataatttcaaactcaaacaatcccaacagcaaggtggctgaagtccaccaaaagttcaaaatgggatatgttctctttaaaattttgagagcgactaaatatgacaaccatctgatgtatgaaaattattcacaaccaaaaacagacagtctggaaatagccgggatgacttcatttagacagaattacccaaatctgtttctaatatacacagtacacataataaatttttacaatatgacaaggaaaacaaacttaataaaagttcccgatcttttgttacacaagcatgctatatccatgctatgtttataatagtttgctcatgatatcacagctcagtaacaaaggcccaagcaatacaaaaacagttactaggcatgacatcagctcacaactaccgtaattacatcggtacacaaatttcccaaactgtacattttccaaactgcttctcaatttcaacggctgcctttagacaattacttgcagagctgtctgcaggctttgagtaatacccgtctttcttctctttcccaagcgtcatttccctttagaaagtgcatatttcaattataagcactatttttcaaatatgcccatcaacatatgtccaaattaggagacggtgtggtctggtggttagcgaggagcattaagcatcagcaactctgattccattccttttgctttccctgtttgcggggcccaggtggtagctcagggagaggcagtagagtgtaatggatgaaagcatagactcttgagccagattgtgtgggctagaatcccagctctgccacttatcagctgtatggccttggacaagttaacttctctatgctccactttcctcccctgtaaaatgggaataataatagaacttaccccatatggttgttgtacagtagttggctcctagaaagtactatatagtatttactatttaatatgataactattatctttctgggactcagtttcctgtttgaaaacctggcttaaattaacctgacttagggtaaactgtttaatttttctaatgtcagggtagggggttgcagcctggtcacattatctcaagatagtgaagttcaatgagtaaagtttgaatgaatgaatgcatgcatgtatgaatgaatgaatgaaaatataggtcctgaaaataacccatagttacagaagtgaaaaatactatattgtggaacttgagcttcatcctattttctctaattgcttattttcatgttcctgcaatgaatgttgataaacatctctgacccaatagaaataataagtgtagggaaaacagatattgccttgtgattttagaagtgtatttctctaagcaccaaacttttcgagctcatcctatatgcacaacctctgtctcaccgtgttgtgtggtcagctggctttcctgaccgggcagggtgccaggggagtgcgactacctccattgtcacttctggtccatggtattgcaccaaatgctgttattctaggctccaggaaattttctaaccactggacagggtccaatgctgtgtgctaatgagtttcagattggaggacctcactgtgcatgtgtcagaaaagtgccacggtttatagcaaggtggggggagggaagaaaagacacaccaaaagaaaaaacagtagttaaaaaatgctggctactcaaattgacagggaacgtgacctctgcacttcagcagaaattcttgcagacttacaaaataaaggagtttgcttttatcgcacactgtgagactcatatggaaaaatggaaaacactacatcacttgacctcagcgtgccccctttcaaccacagacgaatattgtgtacaaaaattctaaatcaacttaagatgttccccccccaaaaaaagagagaggctttaattttctacattagacttgatgatcactattttggttctgagattttgctcagaagattcacacaggaaaaagactcaaaattccaggaagagtattttaccactttggggataatgatgtagtggtctctattggcggggcgcatcatcgtctatactcccattgcactggagaatactgagcaagcctgactcgcccaggcctgaaagtcactcaagactaaaatcatgattatttgcttacattaacagaacactaaaaccaattttaaacaacttaaggaaactcgagccatctttgctgggtgattcactgccatgggaaaccaagaagctcttttctcccttcaaggcaaccaataggcttgatagcaagacctcattgtgggatcacagcctatccaagaagaagccgcccttctgctgctgttgctgctgcttttatttttttcgttaagaagaatcacttcttaggagtgtctaacagaacttttgagtaatgagattacatttcagttttttttcttttgccacacttagtcctggggactttaaaaatccaattctttcacatcctctaactgtcatcaacattttttcagatggtgtcaataaaattgattgcttgcagttctgaattctgttctgcatatggaaacaatataatttattttaaagaattttcaatagggatggaaggagaaatggaacctcaggaaacccatccacaacatttggggaggggtgggagggagcaaatccaaagcaaagtaaacatcctgaacattaccggacgctggaaactttgacaaaacgtcctgatatataaaccctaaacctgactgttgtgctgactgatacatctttctgtcagatatgaatgatgtttctggagcattaatatgttcattaaattctaactccctatacttaaaatattctctactttggctcagaggcatcttgacagctttgttgtaatcatatatgtgaggcccccagtctacacagttgtagagatgcctcatacctacaaccaatctgttgcttttacaagttcaatctagttattaagcagctgattgtggaaccacgttgcttcgacatcttcaactcagctgtatatcacagaaaccactatgggtggtgacagagtcccatgatgcctagcaactgtacatgcccctaactccttaatccgtgatactacaaaatatggcttgcgttttctttttttttccccctctttccctgaagcacaagtggacgaccagcaagggtccgacagtgttattcctaattaccttttttttcactcttgatcctgtggctctcataattagttacctggggctgcaatccaatttgaagtgatgacaagaaagtgatccatgaaaaagtaataagttaaatccaatttcagccttcctctaattaaatgcacatggaactaatgactccaaccctagcattttagtgataatggtaattagcgaggtgggagtcactctctttttcaacactggaggtgtaaaccacaaggtaaaatggcaggagcactcttaattacatgtgtcattttgtcagcaatttacacatttttgaccagtcaagtatgtttttcccctgtccctctccacctcctagccccaacaatgattataataaactagtccatgttccaaacgcatggacgctcataagagcacttcagacttgaaaataagaaataactttgctttgctgttgttgatcacctttctgtccccaccacacacacagacacacacagagacacacacgcacaggcacacacacagacaaataaagatatacttagggtaattatgcagatctgagtcctcttaattgaaatccagatatttatagtggaactgatttttgttggtttcagctgtcttttttttgcttataatatggaaaatagcgtaatttacttatttatggaaaatatgacactcagtaggtgctgagtaaacacacataaaaagagaggcaataattaacctcttgacggcacactggttatctgtggttctaaaaaacctggcttcccatcctggtgctgttactacctttgtgctgtgtagcaagtcagttaatctctctgtttccatcttcctcatccattaaatgatttaaggacactgcctatactacagagtagctaaggagctggcccacgttcagcactgactaaacattcattatctatcacactttgcatgtggtggcaaagacatgattacatataaaatattagcatcacatttgcattgtaattcttagatacatttaaactagtgatcatataattaaagtccaaactgagttccttattttttgtttctttttgagacagagtctcgctgtcgcccaggctggagtgcagtggcgtgatctcggctcactgcaacctccgccttccaggttcaagcgattctcctgcctcagcctcccgagtagctgggactacaggtgcgtgccaccacgcccagctaatttttgcaagatggggtttcaccttgttggccaggctggtcttgaacacctgaccttgtgatccgctcgccttggcttctcaaagtgctggggttataggcgtgagccattgcacccggccacttttttttttttttaatcgaaatagagtcttgctatgttacccagactggcctcaaactcctgagctcaagagatcctctggcctcagccttcttagtagctgagatatggtgcacaccactgcagttgcacctggttcaaatagggattttttttttttttttttgagctaggatcttgctctgtttcccaggctggaatgcggtggcaccatcatggctcattgtagcctctacctcctgggctcattcaatcctgccacctcagccatcagagtagctgggactacaggcaccgggcccggctaatatttttgtattattcacagagatggggttttgccatgttgcccaggctggtctctaactcctggacttaagtgatctgcctgcctcagcctctcaaaatgctgggattacaggtgtgagccactgtacctggggataccttcaagagtgggaattatgaataaacaaaaccaatcaatagccatggagtgggctgtcctgggcagactgggacacagggccacctatgcacagctgaagttgaaataacaaaaacgaacgaactcattatattacaacttgcaccaaaattttggaggcaaggacaaaacagactatcaaagaaaaacaaaatcttaaagcaggagtatcagcctggaccccaaggtgaacttcttgaagttcatgaaatccctaaaactggatgtgacattctgtgttcatgtgcgtttttctgggaggaggggtcactgtttctatcatatttgtaatggtgcatgtaatcagaaaggcttaagaactatttctaaaatatttctgttttattatttcttatcgagacttatttttagggttttgggattctcaaaagtcatgtgataacagtaacatcttaaagatatcaaaatttcaatgctttgtatcaatttaaaatgctaggggtgccaattctagactatgttaactctagacattaaaaaaaaaagtttgcttctctctcctaaattatcctccttactaatcagtgcatagggctatttcttaagggtcagtacttcaaaaccattccatttcactatcaacaacataaagttgtagtttcctttacaggtttcctcttgccaatttcttctttagtgaataacgtggaaatgatatgagctactaagattatatgcggcattaatgcaaagcaaaatgctgcctaaagcatgttttatataactgcaaataaaaatgctaaaaaaacacctgctgaatcttgtattttaacctcctccacttaaagcaagaatccacatgatcaccctgagcttccaagtggactaaagggccggccttctaagtgggtttcactttccctgcagtgaaatggccttctgagtaaggggctcacacatgacatcaccttggaaggaagggcatgggcaggaaggaaaactatcagatgactggcttcaggttcaaattctttatagagggcctgaagctggtgagctttccactgtaagcaacacacaaagtttactttctttcctaactttaatgctgccagaatacacatgtactcttactttcttaggagaaaatgtgtcatttgatttccttccagtttatgtactcgtgccaacaactaaaatgcttaaagaaccaagatgaattactacccagaaacggtggtcaaagttccaaaatttgatcaataaaattgctcatcgactcacaaattaatcttcagccagtaaagttacgcattttcgaggttatgagtacacctgcactgttaagcatttatttcacttgtttaagcaatcttcagaagtatataaatatttatagaagaaagcctatgctgggcacagtggctcatgcctgtaatcctaacactttgggaggtcgaggcaggtggatcacctgaggtcaggaattcaagaccagcctggtcaacatggtgaaaccaagtctctactaaaattacaaaaattatctgggcgtggtggtgcatgcctgtagtcccaactacttgggaggctaagcaggagaatcgcttgaacctggaagacggaggttgcagtgagccgagatcgctccactgcactccagcctggatgaaagagcaagactccatctcaaaaaaaaagagcctactatttttactcatctgtaattttcgttttgcagcaaaatcttgttaatttgtttacaactcataagcctcctgaaggcagggtgtgtatcttcaacagttctgtatcccatgaacaccagcaccatgcccagcctgctttggaaatgttcaccaacttgcacttaattaattcagatcattctgattctgaatttatgatggggccaattttcaattttcatttgtatcattcataaaaaaatttgcgaagcaaatgaacagactaagtaaaaagataattttggttactaagtagaatatttctcaagaacttcagaagcaatatctatacccgattaatgccttcattaataaaccacatcacccaagaatgtgaccagctcagatttggttcagtatgtggatctgcaaagagtgccatttctctcttatttactctcatctccctgaaattagaccaaattggtgatgtttgactatattttatgatctctatcgagtaaccacttatagcctcctctaactttccattttcttttgtttgtatcatcagcctgtgaaaccagagagcgctgccaaacataaagcagggaagtgtgagatatgcttaaaatatgagtcacagtatatttggggatttgggggtttttttttttccctcaagctatcagcagatcaaatccttcttccctgtcaagccttcctctatgcagaagatctgaaatttgctaaaatcggtctctcagtgtagttatgaagggtgagaagatcagagatgagcactgttaagatttgctgtaggatttccctttcatttcagagccactccggcggagacgcctcagcaaggatgcagtatggcaagatatatttaaatatgaaggttattccttctgtgaatcaccagtctatatgcatatttttataatgaggtaatataccatgtgacctaggatagtaatttctcctctgtttgtggaaggccagccaacctaataaagcttactgaatgtgcatgaccctatcaggcagctgaggggtccttcagcaatcgtctgtgatacacacacacacacaccagtccaccaaccttttagatttatttcccccggccaaatcttaaagctggtctaaattctctgcttgtcaattcctctacttggggggtaggggaaaaactcaagacatcttctttaccaaaaccagcgttcaagattaccccttctccccctactttttatacagactgaagtgctcagcagaatgtgtgaggttggttttgacactgtccttgccaagaaaaacggagccctctatatcatccacttctgcatggtggctaaaaaccctgtaacaggcaagaagaaaaagagccctcaaaaggaaatcccctgaaactttacttcttatatttagccctcaaggaacttcgttcatcttggaaaagaagttacctaaaaatgccatatgtttttaaaaagcaagtatgagggaaaataattctaccataaaaaaaatcacaaatgatattcaatactgaagagcagtgtgatcagacagattgtgtatgtgtgtgtttttttattatctctaaccaaagctctactatgtgtaagatttcccccccaataatatattttcattttcccaatgcacttgaggcctgatgaattcaagaggactcggggtatttttaaggctgtaagagctccaagagggaggcaaaaagaatggaccatcatttgaatcactgagtgacaggctgggctagctccctgtatacattaataaattagaattttaattgtgtctctgtccacaggagatgccccagtactttaatatgtaccaacaattggctatgttatggaatctgcaatgtggcctccgctgctgacctctgaaacacaattcccagtctgactacggaaactgttcagtttgatcctttcaacttatttgaatcctgacaaataagctcacagctgaaaggtcaacatagtcgtatttcatcctccagagctgttcttaagacatctgcacaacaaagcacttcttatagcacctgacatgggccctcaatggcactgtacctcattaaaaatgtcccctgcatgcgcacgcattccaaggcacatggtctggtgatggtttaccaaataagtgtttacagaagggttagtaaacaaggcagattgtcaacttttccaataaagcgtcactatagtgctgaactctctctggaaagtgacagtttcccaagtacatgtagaagaactagaacttgttggtcaaggtcagtttgatctttggggataatctgggaacaggctgtggttcaccctgacctgtgaaaagtaaacacaagctagaatttaggttgacctcattatccaattaattggcaccaagttatatacctatcagctaccgcttatagattctgtcccctcctgtgacaaggatgcccaccttcagctatgaaagtagtctgaaccacttaggacccgggtgccaagtgccctctcttaaacgtgagcatgaagaccctgattcaagtctctttgaaacttctattacaattttctactttgagtcaaaaacccaaattagattttttttgttgttttttgagatggagtttcactcttgtcgcccaggctggagcacagtggtgcgagcttggctcactgcaacctccacctcccgggttcaagcgattctcctgcctcagcctccctagtagctgggattacaggcacccgccaccaagcttggctaacttttgtattttttggtagagatggagtttcaccaggttggccagcctcgtctcgaactcctgacctcaagtgatccgcctgcctcagcttcccaaagtgctgggattacaggcgtgagccaccatgcctggccccaaattagatttttataaacttactcattcttctactccattaagcccttgccttcaatgtgcctgaaatcagaagttgctagaacaaccatttttgtatctttacataaaaatttcttgccatttaaaaattattgacctagaaacattctgaacatatccactgaagaattgggtatatattataatcattacaagccataatgttaaaagtaccacatcctcctcaggccgagtcatagttcttgatgctattgacattctgggatgaatcacggtgtgtcgtgtcctgtgcattgcaggatgtttggcaacatccctggcctgtacttactggatgccagcaacacctctgccctgctagttgtggcaacgaaaaacgtctctagacattgcccattgtctcctggtggtgggtgggggggtgggggggtcgccaaaatcttcccaattgaggatgactacactaaagtaaggtgtgtgtctgtgtgtgtttatgccatttctagacccaacataagagaatgtggtgacaattctgagtactatgaacttttctcattggtaacctacactgcctattagcaactcaacacttacaactccttatccttctattatattcactaatcagcagatcttactcctgacaataaaacttttggtcaaatacacattttccccaaaatgttacaacttgctggtaaaccaaaaatgcactttccacagaagattttcttacatgatttgcaatgctcaacacaatccactcctgaactgcttgtcacttatcccaaagggtataatgtcaatttaaaaagaaaaagaattgttacctgaagagctggttgtttgtcattcctcttgggagattttaatccactaacttgctgctgctgttgctgctgaagaaggagctgtcttgccacctgaagtgcctggaaggaaaaacaagaaaatcctttgcgttactacacaggttcaggggactcttcataaaaaaggattccaggaagtgcgctttgggactgggtcctgactttcctatttcctggcaaatgaaacagcaaatgaaacttcccaccagtcttagttggaaaactttccagaatttgtttacgttccctttgactcggccagtttcatccacggttccacaggcatctaagcagacattttattcctactaaagatctgacatgaaatttaagaccatgagtgattgagactctgaacaaagatgacagagagaccaggagggacccaagcaaagacgaaaacttgggagacactacagggcccttttcagggtcaccttcaccctccccaaattcttcttggggaaatgtagcgactcaagttgaaagtaatactttcaccccatctgagtccaaataaagaaaaagaactaagtggtggaccacaaaaaaaaatatactatggattaggctacgtagaaaggaagattaaacagatgagacatacctaggatgaccttgatagaaatcagagaggaaaatttggcaaatctgatctctagtcatcttaaagaggcacattatgtatctgtgaacaaaactggttacgtttattataaatgaccctttcaagcttacaatatgggatggtttctccttaaaggtagacattggggaggtagtatgaattggagataaagcaggaagaaaacagaagagtcctctaaaatgtttaacatatgactgacaaatctttttaaaagttcaagcaggctgggcgttgtggctcacgcctgtaatcccagcaccttgggagaccgaggtcaggagttcgagaacagcctggccaacatggtgaaaccctgtctctactaaaaatacaaaaattagctgggtgtggtggcagatgcctataatcccagcttcttgggaggctgaggcaggagaatcgcttgcacctgggaggcagaggttagggtaagtcgagatcgcaccactgtgcttcagcctgggtaacagaataagcttccatctcaaaataaaataaaataaaataaaataaaataaaataaaataaaataaaaggtcaagtaaaaaaagaaaaaaacaatgtcatcaataaaccgccatgaagacattcactgccaaagaattaagaacaggaatactggctagccacacacctttccaaagatggcactaggaccagcaacagaaaactgaagtttgaggatatcatgctagaaagtcatatgaaaagttgggttacttgagtcaatgcagctgagaaccaagaatgtacacatggcagagatgtcaagaatgctcattaaacgatgtgcttagagtttagacacaaaatgagacttcttattatatcaataataatttctatatggtaaccaaattatttgcgcatcaaagaagaggcacacatagatgtcatcaatacatcaaaaggacctgaagctatagccttagaaagttagcataatggacttatgacggtagtgtgttccttaaaaaggaacaggtgcttcatttacataagaaaacaacatggatatttacaagaaaagttacagggacaatagtggaatggaagagaggtaagggggcctgcgtgtccctgtgcctggaactcagaagaaagagagaacagagtggtctagaggattaatgttcatgagcagacacgtaaaaacgtggagtgtgcaagagcagtgcttctcctaaaaggacacgctcactgaactgtgctcataactagagttgtaacaaataatacttttaagacactgcgtaaggttgagtggcgcctttgtgtttaagaggtgcaaaggaaagctaagaaacacaagcaccgatagatgagtgacaaagaaaagaccatgggaaagtggaaccctgctatcccacctgcctactgcatccacccccgtgtcccagggaggccttctgcctactgaactcaccacgaccagcccttcagatgtaatgcacaggctagttcatctgtgaagggagagacagattcgacaaggcctgcctggaagagcctcgagaaaaggggctgtctgagtggggcatctggaagccaagacgcctgggagagttgcctgagactctagcctgctgtctcagggaggattcaccatcactggactccgggtttccttgtctccttggagacgctcagtacatgcgtaggtgtaaaagtgggcagagtgaagatttcatttatatcatataagaaaaatagtcccctttgcaaggtgcctgcaggagcaaaagcctcttctcctactatatatgttcccttagctattgcacatgaaggttttatggctttttaatgtagaaagggaactgttatatattttaagtgctatcatcagagttctcagagtaatagactgatcagcaaagaagggtttggttgctagttggaaaggcagagagagggactatagatgacagtgcagagaaaaatatggtggggaagaggagaaaggttacacacatttaaggctaaaataaagcaagcaaagaaaaacaaagtaatgaagactctatataacttaccacattccaccaaatactgggagaatgggcactcaattattattattattattattttatttatttatttatttatttatttatttattttggagacggagtctcgctctgtcacccaggctggagtgcagtggtgcaatctcagctcgctgcaacctctgcctcccgggttcaagcaattctcctgcctcagcctcctgagtagctgggactacagacgtgtgccaccacacccagctaatttttgtatttttagtagagacggggtttcaccatgttggccaggctggtctctaactcctgacctcaggtgatctacctgccttggcctcccaaagtgctgggattacaggtgtgagccactgcacccagtctcaatttttaaatagtcaagtctcagagcagctatagtcaactcctcacttcagcaaagtgtctttaagaaaaacattcacacatacacacaaaactattcttttttttttttttttttggacaaagtcttgctgtgttgcccaggctggagtgcagtagtgcaacctcggttcactgcaacctctgcctcctaggttcaagcaattctcctgcccaagcctcccgagtagctgggactacaggcacctgccaccatgccttgctagcttttgtatttttagtagaggcggggttttgccacgtcggccgggctagtcttgaactcctgacctcagtgatctgcccgcctcagcttcccaaagtgctgggattataggcgtgagccaccgtgtccggccatcacaaaactattcttacatgagcatggtctcataaatgtacataaggaaaggaaagtatagaacttaagttttcaacaaatgcttactgagctggctctacagaatgatcacacatttcaaaattagctactgggatcctcagatttattcttctggtttgaagggggtaaaaaagtcatgtataagtttttttttcagacccaacatagggtacatgaacttaaataatcatactgtaaaccccagcctcttcataccatctcatacagaggcccactaaagatgataatccaagatacaagcacggggggaaaaggtttgcaaacttgtatgaacccaagggaaactgcagccgacctactgaacagagaacaccacgagataaagatgtgcaaactgacttccaaatttcagcccccaaatgaataaacacaggtaaaataactttaaatatttgggatggagagacaacactagtgcagagaataattcattttgatgtgaattgctatgaattatcccacaataattccccagctttatcatgagtatgttaacagagtaggaacaaattattatccatatcctccccaaattaaaatccatttaaaaattgccttaggtctcagcaggagttttaaaacctaactgaacagaatttataacatgctttgaaatcaaccactaaaaggtgttttcttttctaatttccatgatctataaatcactgtggtctagattttaaattgtcacatgcaaggagaggcaataaatccttagtgtataacactatgtatctgggcattataatacaaatctccaccatctatgatttgtaaaaagtaaaaaacatgcttattataatgttcagtgttgatcagtggaaaatgtggaatgactgatgggatcccctttggaatctgtgtcagagacctatgttcaccatgtttcctgcagatgatgacttgatagccatttttacctgttatgtgatcagaacagattatgtccttcatctccaactccaatgcctaatccccagagataaatcttttttttttttctttgagacaaggtctcactatgttacctgggctgaagtgcaatagcacaatcacggctcactgtagccttgacctcctgggctcaagcaatcctcccacctcagcctcctgaatagctgggactacaggcatgagccaccacatccaactaatttttccatttttgtagagacggggtctcattgtgttgccccagctggtttcaaattcctgggctcaagcaatcctcccactttggcctctcaaagggttgggattacaagtgtgagccactgtggcaggccagatattattccaatacaactgaggagtgagaatggacttttcttatttttataacaatatctcaaccacaattagagaaaagtcccttaggatacattgtttgaagataaaattagattctctggatacagaatgcgtgtgaatatgtgtttgtgtgtatgggagagggagagagaagggtgaaaaaggaagaaggagagggcaagcagcagaaagagagagacagaaaggatatgaataaatgaaagaatttctcttttaagaagcaaggatcaactctgactcaagttccagatcaattgctaatgtaaataacttaaaaggtccaatcccatctctggagaccttttactcttgggtggttcctgggtgggttgagtcaacacttcctttataacagatgtgacaattgcctggcactggataacctggtgctgtattttcatgctaggctcgggttacagtaaagacacagtttgaggatgtcacagagtggaggtgaatgataaaaccaggcacttagagcccagttgcacacattcacatttattttccttcaagctaaaataagtggctctctgagctaaaagaagaagtgggtgggtcagggggagtggtggcaggcacgcatcactttcatctcttctgtggattgactagtctcccatctatgcccggatctgcacaaggagttggaactgcccgatggctggcatgtcatggtccacggccagctctcagcactcagagccagtgagatggccctctcgctgctggctcggtaggtcctgttttcatactaacttggaacctggacatttttgacacaccttccattctattggtccaagattacttcattctcatcagtgccttcatattcttagtaaataagtgccatctgttatttacaaattatgttttacataagcgtgtttacaacttctgagctatttacattctaagatcatagcaggtgcttataggggctaggtaattctatgtttagcatgtttatcaaggtagccgatgttcaaaaacatgtctaccatattttaagaaacatcaacaagtttatataaaatatggtttgaacaggcatgcacacatacataaagcaagctggtagaaggagaaaatctttctaaaatgttttgcataacacacttggtgacggggtctgagataaccaactgacacatggaggtcttcaaaaaatatgactaactggaaagtttctagtcacgggtcagcaaactatagcccgtggaccaaattcggtctatcacctgtgttgtatcatctgtcatatatcagctcatgatataagaatggtttttgcttacttaaatggttgagaaaaaaataaaataagattatattatgacatgtgaaacttatatggtattcaaattttggtatttaccaataaaattttatttgaatacagttaagctcattcccttatatataatctatggctacttttgtgctacaaacggagtcaaggacttttgacagagaccacatggcccttcagacctaaaatatttcttatctggctctttactagaaaagtctgtcaatccccatcttaggttgctatctgtagtctgagatccccaaagatttcactggatagaatcctatataaacacatcttccaatcagttccccaaaataattttagagtttggccaaggagcaagaacattattaattagctgttctttaagctcaaattcaatgttgatgttctgaaaaggaaatacatccatgtgcttcttgatctgaaactgtttaaaacttgcctcaaactttgaagatgtgtttctgctggtaggtaattgatagcagttcagatcagtatgagatcctgagcacccacagaatgaagacagcatgtgccttattggtggccagtcgagagttggttatttcctgtctgccctgagaagttgtcccatttccagcttgaaaggctggtctgagtcagccatccttcttctaatttcttttcctagactctctccacccctcaagatcaaacctgtttttcagataatttcatggactaatcaacagtcactgtggatataggggtgggaggaaaagcttgtaaaaaaaaagaaaagcagcataggaacattagtaggaaaggagtcgtgttctctcctctgtttctcatcctctacatactctttgactccctgtagagagcctggttcccctaaactagtttgctatctttgttcaaccccagcaaccaaagcagtgatcatttaacacaacctgacaatcactctgtagcaagaccgaggactgagtatgcaaggaaacttcatcaccttcttcctttagacagagcaatcactccagtgcaggaaggaattaagggttgtgactgacttaaaaaaaagaaaaagaaagaaatgacagtcacttgtagaactggaagtattcatacagagtcaatagtattccaaagcaacaggttcttcaaacaattttttaaaattttattttacaaatagaacatttggttgtaacaagacaatggaaaagtaagttaatctcatggaaggattctggtgattgtgaaaatattagatgttcaaagaaagattccaatactaatgactgtgtaaatattagatacacaagagaagaaagaaagcactgcagtaaatcattgagtcaggttattggtgtcataaatagaaaacaaaacacattctccaacaaaacttacagggggtaatgaccattcacagacagcctttaacagtttctttgtaccagtcactgtttggtctactctatgatactgcaaataagggtgtggactctgaacattcattggtagtaaattcacttgactcaaccccaaaagcaggtgcagtagacagccaagtcttacatcaactgggatatactgaatttgaatcagtggctgagaagggaaaggctctatgtagcatcatccatcctcaagagttccaacagctggacaaattgtcctatgcttacagagcatttaataacagctgatatttaggtaggacattttgcatggattttaaaaagtgttccagtctttgcaaataagtttatgagacaatgtcaagataggcatggagaaaaatcagagcagagataactccacacctacagcattccaacattatgtgtttgagtcaaagtggaaagggacaagaaatagaaaagtcactcttctctttggtcatcattgtcctaactgcagaggagttacagtcatgggtcatgggcagtgtcatctctgcgtggggacggtggggaagaggtaaaggccaggccaaagcactccctccagtacttggaccactttatcaccccacaccagcctgaacccctcttctagatctacttccaatgttaggtttcacatatacttacagacatgattttatattctttaagctacacgtagggtggttatcattgctatgatgccgattatgtatattccttgcttttcttttactttaatgtttaacaaataccgcaaaggtaggtttgggagttgtgctttttgtttcttttaaagtcagcaacttgagtatattttcttggggaggaaaagatggcaaaaaattatattttttctttctttcttttttttttttttacaagaactgggactaaagagaaaaaattacgcaaatgttttcctgcaccacgtcatgatttgcctgcattagcgttgtgagctcaaatgccatcctgcgcaccaactacaggagacatggacagagagagatgccgaaggctctagataggaggtggcattctgctacaaaccccaccgccaatcaagcccaggaaggggtcagcaaaccctgtatccgcttgcaattatgagtaaccttttttacttgaaaggcacgtacaggatacttcccagccagcaaggtaaaggataggattttcatgacaccagaaaaaaaaaaggggggggggatatctatggtcctcttgcaaaattagatgtagtaagtttaatgactacaaacagtcaggaagtctgctttaagtctttgggaagagctaaaaaaaaaacccaccatcatactcctactcccattaacatagggccctataaccaccttgctgaggcactggctggttgcccctcttggagccagtgccagacgctgaatcactacaccaagtctccggcacctgagttgtctttggagggattccattcaagcagtgcccaagcctgagcctgtttagctcacgagagctgacaagatcacagcctaggatgctatgactgtaggccacattagcattgcagtgaagtaaaacagaagtgaagtttattagaaaatgtctaaaatgttaagttggatgctgcatcaaactcttttttgcctctgtttaagactagattgtgtttaaaaataaataagttggacccatcctccaggttcccaaagtagaaaaacttggggtcaaatgcaaggataaatgaatcaaaaggctctattaactcactgtatttaacccactgttttttgcaattgccttttatgaggtgcagctcagcaactctcattatgaataattcagattcacatcttttcatacctcagaatgagacttgctaattttgaagcttgtggaagaatctaactagaattatgctcaaaataatggaggattttccatgattttcctagtaacactgaacccagttctttctcaaacaaatatggtactgtattcctttttttcttatactgtaagtcacacatactcgggatgccctaagaggcaattaacacctatgaatgctttgcttcacaaagtaccttccttttcttgcctgaatttgggcaaagaagcaaagagtaaaaatgatttagaggcaacattccagcagagatagaagacaaaagaaagaaacagaaatgggaatataggaaagggccaaacaagaataataatccaaaatgcggaactactcactactggccaaatattaggatgggggggaatcctaatattctccattaatttacactccttaaagcaagttatttcgaatagctaagattgtatctgtataacaatttaagaaatgaggcacatctggaaacatagggacaagtgcagcataacttccctacatttaagacactaaataaaaacactgtattgaattgcttactatgaaccagacactgtgctagttaaggtgctctctacactaatctcatttcttgttcccaacttttctaagggaagttcgggaaagttttgtaagtcttgatttaaaatgggcaaacagagacagattgtcaagttcagtgacttgcccaaggtcacaagtctacagagtggctaggatggaaaaacaaaaacgaacaaaacattgtctcatgagaacttgatactcacactgtatcaaggtcactgattagaccaaagatggccacgggtaatcttggcaaatggctatgcagacctccggagctaaaaatgcatgactgactgtgggcccttttgcctccagaatgaaaggaagggtcttttctcagtgtcacaccttctaactttaatctcccttcttttccccacacaaaagacttgctttttttcaaccagacctttccatggccaggactctgtgagccataaccatatccacaagtctgccctccctgttctctgcccacatttacatggcatccaagtatcttctttcatctaaattcaacctttgcctaaaaactctgtccacaatccaattccttcaagcagcagtgtcccctgatatccctagacccaagggaccagccctgcatctgaatccctgcagcagcatcctgtgtttctactgttgtgatggcaaactccaagcaggcggacaggaaggaattaacaagcccagctatctctgctctctcgcacgctgtgttttcacctctctggttaactgagttcactcatcttctcttggaatattgatgttgtccccatcataccttgattctcagctcttcctcaagccccattctggacaagtccctcgttctctggttcagctaagccaaggttggatttttttcaaaacgagcttttcataaagcaaataatagaaaagcagagctaagagagtacaggtcttttcctttttaacccaaatttcactaaagtccagccacagttaatgcctctggacacctgtatcttacacttcacctccatctaagtgagatctcttctcctgacccactcggcatggcttttaggtccagtgggatttccagctctttttttaagccactgtagactcttgcactctgctataaatacattcttcttcttctttttttggtggaggtggtatgggtgctaaattactgtgttattaaacctgccctggtccctggtcattggggataaggaagataattaaaaattgtaatgtttttagtgtttattgccagacaagtactaaacagtgcaaacccattatattatttattttttcacaatgctttgaggtaaattatacccagttaacagatgagggagagagacagggagggcgacaagggtgaaaaaattaactattgggtactatgctcggtacctgggtgtcgggatatccccaaactcagcatcatgcaacatacccaggtaacaaatctgcacatgtacccatgaatttaaaataaaagttaaagttatatttttttaaaaaaaaaatgatacagagggactccattatgtctattatctagtttttcacaaatattttaaaacaaagtcatttctatttgtgtgtacctgcatagtcgtttgacaggcccaacctgaaaaaaatttcttttcaggttgggcctttctcagtttttgccttttgagcagtcatatgcttacaatttttttttttcctctctggagagaaaaaaatactggacaattcttggaaaaaagaatatttaaaaaatccccaaataaaaacaccacaattgtttactataaatacattgtttaaagtatgtaaaataactacaatagttaaattattttacctactccaaaatatttgttacttattatgcaaagcctatagaaaaatgtttcaaatatcactattacaattgatacttataatacagcatgatgtatgcaagtgtgtggtgcacatattatgtttgtggttactttaacttgtagatcataaactgtgtgtcaaaaaaaaaaagaaaaaaaaaagagaaacataagaccagagaggataaattataaagattatgtgacatgtgtaggtaaagtccttagcacagcacctgaaacatgatagttattcagtaaatggaaactaaaactattattatatctataacacactgcccccaggcataagagaatatattttctcaatggaaagcaaagattcctttctcccagtgatctcaaaccattggtcgtcctctttacagaaacactaagaaaagttgcagcatcctctcttgaacccaaagggatctaaggcagtcaactttaattgtacaaaaagcaaactgaggacaagaggggtacatggtttatctgcagttacacagatgacatgcaggtgagaatcctggctctttccaatggcaaatgtacttgagcaactatgactctgactcttaccaaacattcacccatgccttgccaattctcaatgcaggaatggctgcctaagaggccaaatattgagctagggggagatgatgatactggtggtgatactatcaatgaagaaaatggtaactaacactgaatcccaactacgattggttctaaattactttatataaacagaaagtttatgtaatgtggtcaaggtcacgcagcctggatagaatcccttcactgtattcaagaacgacatacacacaaaaagtccactaatccatagacgtatggatttggagttcttccattcacctggaactagaactacttgcttgacatgaccgattaaaaaaaattagacacgtatagaaaaatatattcggttaatctaaaccacacaaaaaggtaactttgtaatgaactttagaaagattacatcttatggaggcaaagaaatacagatttgattggtttggttgaggaattagtaactctttaagagggaatctgaaaaaaactttggtcatctgatacacagttgtgctcacagagttgtgctcaaaaagtgacaatgatcttttgaacttccagtaaccatggtttagcataagatggaacttgagtctccaggcatgaagaagtaaggattctctgggaatatgggggaattactgaccctgagagaataacagaaattacaaagaaatagaagtttgctttgaaaaacattaatgtatgtccacagaagcagcatacatagtggttgaatgcacaccaatcactgtgtctggatttgaagcccaattctaccattcgctagctgtgtgacctgagacaagttacttaacctctctgtgtcttagtttcttcttcaataagaatgggaggaactgaaagtacctatgtcaaattgatacatgtaaagtgcatagtctagagcctcacactcaataagtaacaagtgattttgaaaagtgctgtataactatagattatgaaagtaataacttcatggtagaagatatgtaaaatgtatacatgaattgggagaaaaataaaaaatatgacaccatcacctgcaatgacacattgtcagcatttggggatatgattaagaaaagaaatttttggccgggcgtggtggctcacacctgtaatcccagcaatttgggaggccaaggcgggcggatcaccaggtcaggagatcgagaccatactggctaacacagcgaaaccccgtctctattaaaaatacaaaaaaaaaaattagccaggcgtggtggcaggcgcctgtagtcccagctactctggaggctagggccagagaatggcgtgaacccggaaggcagagcttgcagtgagccgagatgacactactgtactctagcctgggccacagagtgagactctgtctcaaaaaaataatcaaataaataaaaataaaaagaaaagaaaagaaattttcttgggccaagcactgtggctcacgcctgtaatcccagcactttgggaggccgaggcagggagaccgcttgagcccaggagttggagaccagcccaggcaacatggcaaaactccgtctctactaaaaatacaaaaattagccaggtgtgatggtgcacacctgtagtcccagctacttaggaggacgatgcatgagaatcccttgaacccgtgagatggaggctgcagtcggctgagatagcaccactgtaccccagactgggttacagagcaagactctgtctcaaagaaaaaaacgaaacaaacaaaccaaaaagaaaaaaaaaaacaaacaaaaaaaaaaaacaaaaacaaaaaaaaaaagaaagaagaaaaaagaaaagaatatttcttaagcaaaaactggaatcattttgtatggtcttttgaaaattacattttgaaattaaaagcacattttgagtagagatttttttttcaaatctaatttctatattcaggttccaacaaacaaacagcttcaggagccaaacaacccaggcacctccaccctactgtggagttttctggaaaagctttcaacgaaggagtctgaacagtaaatggcacttgtctaatttttacactgtgctttagaaacccaggaaggaggcccacggcactccagaattgaagaatcacacagtaccataccaggttaacagcaggtttcaattcttttgcccccaaagcatgaaactacagagcaaccgctgacttaactttgcagcgcccataagcagtactgtatctgtttcttcacaaagaacaaacttgacttgatttttgtggaagttaaattgccaacatcatattgagttaaagagaaacaaaacaaaaatcagaagtttcagcccatgctgtatctttaaaaaaaatacatcctttgaccctaaatagattaaaataaagaacgattagtcttcaccacctcctccctcccccaaccatcaacatcatgcactagctatattttccaggccagtttcttcatggtaaaacactttctcatgagactgcctgtggtcagggctgactatgtcacaggaaaaaatgcttctcatgatctctagatcacagcgcttccaggtctagcctgagcattaaatacagacacacccggaaattgtaaatgattttaacaacaggacattttcccacctcaaaactgggataatctttgcagcctacctatgtccctggggtgttctgagtattaacaagttagcattagtcaggcactttgatttctacagacaaagggctccgtataaatacaaagtatgattatccaacccaactgccttttggagagaggcggaaaggccactgcttccatccttgtcttctcaagggcaaagcaacctcctagttatctgcagggcaatactcatgaaagttgcactgtatctgagcctctgctgcaccgttcccttatatagtcaaggaagagggaatcccttctgtgtgcatattttcaattcacattccaaaacagtataggcaatgaaacagattttcagttgtgatttataggtcttgatacgactgggccaggcactgtgctagaatcacgcacatcacttcttcaggatgtggagaagtaaggaagcccctacagaaaatcatgttccggtatttaaagaatgtgccagtatgcgcacatatatcagtgaatgcctacatattaagaatgatttcacaaagccatgcaaaccccacttgagaactaaaaaaaaaaaaaacgcaaattttaaatctaaatttaatatagatttgagcctttcccttggcctctggaggaatcaatttgagataatgacagccttgaagataatgaaatgggttacataatattaaagactagaaggtatttctgagggacacagacatataagtagactctctgtattacagcacctgcctaacatctttaaagagaggggcaaaatgttggcctctgataaattacgttgtaccctagccacagacactatggtatactttcctttagttgagctattcatgtttagctttaaacatcagaatatagccttcgacaaaacggtaagagtcactggtttgtccaatggtattattatttaaaacacacacacatacaccacacagtcgaactactgaggcagacattcctaagtgaactgtctagaaaaagctaaattaatgaaccaagtaatcctgggaaatcctgtcccataaaaccattagttgcaataggctaattctcaataaaaagcctggcaaattctcagaaggcaaaaagcctcctgagccttaagggttaactcacttgccttaaaaaaaaaaagacacatataatttccttttatcataagacaatgcatttattattttctgtatatctgttaaagggcatggctttcggagtggaaaacaaaacagaacttggtcacatgtttatttgcttcagctactcccttccccttctgataaataatcaaacatgccatccagaaaaaacaaaacgagcgagctgggaaatttgatggtcatcaaatagactaagataccaagaaaagcagcccactgttcccacactgagttttcggcccccacacctacactaacatctgagtaaataccttcagtcactctttccattttccctgcaattactcctactgttaaacaaattgtccttaaggcagtcgcaaacatcttattttttcttgcaaaagagaacaacttctgaacattcaaaaaagccaccatagcgatagcaatacacacacatgcacacacacatacatacaattattttatgtatctaaatgtttcttctatgagaggtttggacaaccccagagcatatttctttctctattctaatagatgctgttttagatactaaaatttaaaaatatttagactgcggactagcaaacgaggttcacagtaataacaattctcttaagatcaaaagagcttattttccatttcctgtctattccctgaccaccatatagttaaaaaagaaatattaacacctggcttaccaattaaactgaagttgggggtcagggaaggggggtgtggagggaggggagagaggcaaaaggagtgactacagacaggaaaaggtggaacctttttcaaaaatgtcaaatcatgtgtttaaaaagtcatttcaacagaaaggactaagagagccgttagattgctcttctactcagagccaggaggcagcccaagtccaagggcttttcctgctatactgattatccacaaggaaaattttgaaaagagccttccaacatcaaagttaacaaccatcacggaaagtgaggcaggctttccctttccctctgcagcccactccgttgaaacaataggaatatgaatgagataatgaccgtgcgtgtttcagcagtctgacttttattggcatgaaattggtacaaatattaccaagaccgattcacaaatgatgacggtgtcgtgatgcaaacatcaggggacaattctgtagatgcagaattacaaaggcaccatccccacattctcttactacttgtgataacaggaagaaaaagaaggcaacacgaaacaatgtcacagtaagcagagagaggttccaatctacgtttagcctataaaactatcctgacaccacccggctgcttacttagctgattatatccaaagacatatttgaaaacaagagtgaattaaacaaggagttagaaggaaacggtcctctcaaatctctaaaaagaaaaaagcctctgatggagagaggagggaagggggaggaaaaaaagcagtaaacaagttggatcaccttatttcgcccttcagagaatgtctgcacaagaacggatccctagtttaaaagtttaacccagcaaaaaaatgtttctttttctctggacacttacagagaaaatgaagagtttggcgaagggagcccgtactgtctgcctttggatttccgtcttcttgctgtagatgggttctggctgtttctgcgaagcgggggttgccgagtggtaaaaaagatgtttgaataaacaggaagtactgtgcggctgaagcacactcgaagagaaaacacactggaacattgccctttgtaggcaacctcagggaggtttgcctccacagtagctggctgggctctcactaaatgacaaagaaaccacaagaattcctcaagtaattcttcactttcaaagttgaaagatcagttggagcttgcaggtaattttcaaagttgcatttagcacttaaagaaatctattaatgccacacatatctaaaccgctccaggtctgcaagcagcgacacagcacacgcagtgcgccctggctagaccaagccctagccaaacacagctcattcacgcagacaaatacacaccaacagggtttcgggaaacctgctcttgagatatttttgtggtgacatttacataggcaggatgctttaaaagaaaaaaaaaagaagaagaagaaaattcagattttgcagactttagaggattttgtcacatgtatttttaaagaacacatcgtcccgtattccagggatatgccctggatctggctttgactggctgtcctttacattttctttctccaccatcaaccaaactacctgtttatctccagatgcctagcttgcctaatggaacactccttaacccgccccaaaatgattgtcacagtcctgtcttccgtcaccggagtaattcagcaaatactgtgaagaaaagtaaactgctgaaggcacagcaagtcagcttgaaaaacaggaggaagagttgaacagccatattcaataacaaaaaaaaaaaaaaaaaaaggaggaagaaaaggattccttctgaaaatgtattgctcttgtggcaatgttcttctgccacagaagctactgatttgttatttagcatggaatgctggactgtctgtcatccaggtgctaatactcggctaaaataactcattgggagctgtcagtgggatgtttacataggccccaatcttttcttcatagaaggaaattttttactggaattcatcttcttttgatctcacattcaaagcaacggcagcttgatagacattcaagtctgaaagcaaatccagacgctgaagataaaccgccagaaaatgacaggcagaagcatctaaagcttataaaaatgaagagaacagcatgtcgcctgagtattacaatagcagaaatcaagagacatattaggtggaactgatcagccacaaaaacagttcaaaaggcagatcatagaaacagaagactaggctgggggaaaaaatgggaaagatctggtttactgcctcatctcccttctgagtctcacagtgcttccacgcctgccttctccactttggggaggggtggagtatccaatgcaaatgttcctctctaactcagctggtccagttagagaccaggaaatgatttcctagcaatcccttttcaaggggcaggagaaaaaggcagactcttaccttgctcagtgtccaaaatcctgcattttattagcatcccctgcagctgctctgcgttgcagtatcaaaaggcacacagcctgggcgccatgaaagtgggcggtcaggaaaaccatctctcaacagaagagctataagtagttcgagatggggctagagagctctaagcagtccagttccctaaaatggctagttatggaatgaacacaaatgttccagcctcagtcacacaaatagatgtgttctgtcctacagatatgtaactgcttaacacctagtagcttttaagccaactagggcagttctgtaaaggaattatcacaactttctcagagacatgcaattaaaaaaaataaagcctcttattttcaataaagtcagtgcatacaatcaaatagtaattctcccaacaattttgttcttaaagctgtttgttaacaaacactgaatgtgaacaggcagcatcaggttaaagggcaacagaattccacattataatttagcctgcggttattcctgattgcaagcaccctctgggactgcaaagcaagatcttcttttgcagcacgcttggatttttaaaattagtgcccctctttttttgcataataaaccaacattaaaatatggattaaaaaatgtacaaaccaatttttaaaagctgtaatcagtttagcatttgccttgtgcaaacgagtcctgggtaactaagttacaaatgcaaaaaacaacacaaacaaacaaagccaaagccctactggatcctaagagtgttttttcaagacacctctgccatgcctatatagctatcagatgtgctaaagtcgatgattttcctttgaactgtactagttcaatctgtgaaagtcgccacagttgttctctaaccataaaaaaaaaaaagcaagcaaacatagttgctttcaacacttactccaaacatctcccaactaaatattccatgttgttgcaattgttagatttacaaaaaacacagaaaggtttgccgtgaaaagcgaaatgcaaattcccttatacattataaaatatgttcttcctctacaaagaatgctgccaccactgctgtgatgcaagcagcagcaacagtccatttctcatggccattagaagtcttttttaaaaaatctgacacgtataaagaccttcattagtataattaaatgactgttgggtttttgtgatataaacaacttttgatatgtcatttaaaaacctcataataacatcattaaagggccaccatttttaaaagagaaattgtctgctcagggccatggaatagtcgtctcgctctgggcctcttcctcctctccctttcagacttctcctggacttgaatgtcaccatagaccttgaatccttgaatgtgaaatggcttcacgctaattgctgtaattgcttgaagatgtgcaggcaggtgaaacctgatccccgtggccattgtagagaccaagaacaacacggaatgtttacacagtggtttgattttaatagacagaagggctgagtttaagacagcaaaaacacagctaataggtgacctcttaatgtagtcctcctctaaataaaaaaaaaaaggacacacaacaaaatacaatttcatgttctaaaaggcaacatcctaaataccaaggttatttgcttgactcttggagttgagtacacgttacattgcacctgacattttatacccgaaagtctaccccgaatatgtgtgtgtgtgatgtttttttttcactttaaaacaaaaaaacactttatatgtcagtcacctcacaaacagattatgactctatagtatttcctagtaagtgcattcatttaaattttaaattgaatatttttcacagctgtaatactccttgtcccttaaacgggaaggcttgggtgtctccttgtttattcctttgcctattctgtccccacccccatttatggaattcttgacccttgtccatttcttgattgcagctgaagttgagcccaaacccgctcacactggtgcttcagacatttgtctaaaggctttcagtatcttgtttctttgttgctgtgtgggactgtggtctgcttctacctagacagactaaggtggccgttagagcagccaaaataattattcaaaaacggtggctattctccttgatatttttacaatttcgaatggacaccaaggtttaatgatggctccccagggccctctcttaacagggcacaaatgtaaccaaggctggacaagaaatacatgatagcaaggccaagagaaaaatacagcagcacctccaaggtatcattaacaaaaggaaacccacaaagattaggggaagtgttagataggtattgagataggtaggtaggtagatagacagatagctcaaggatccaaatgtataggagcatttcatatatagccaaggaaatactgccaaacagaaaatgaaaatgaaacatatactacagtaggaaaaaatacagcgaaacaatggaattattttaaggttaagctgggcaattaaagccaaagatacaccttgtaaatgagaacagagaagcacgaaatagcccatacagctgggagtattgtctaactgctgctctgccaagttatgctgtatattaacttctgatgatgaaatacaaaatgcagcagaaaggggggaaaagccctcttaaagctatgaaaactttaactatataagctaagtaataaatataggcacttcttttcctggactatttgtaccccccaacactgaaagacaaaataatgaaacaaaaataactgcatagaacttccctttgaatcacagccacctcacatacatttctagacaatcctaccttcttctaaaagttataatccccggccaggcacggtggctcacgcctgtaatcccagcactttgggaggccgaggtgggcggatcacgaggtcaaaagagatcgagaccatcctggccaacacggtgaaaccccatctctaccaaaaatacaaaaattagctgggcgcggtgatgcgtgcctgttgtcccagctgctcgggaggctaaggcaggagaattgcttgaacccaggaggtggaggttgcagtgagccaagatcgcaccactgcacttcagcccggcaacagtgagcctccgtctcaaaaaaaaaaaaaaaaaaaaaaagttataatcccctattaagaagaaatgtccttccctctgaaaaaggaggggggaccaaaaggaggggagaccaatatccatttgtacatgtaaagattaagtataaaccagtccaagccagtgagaggaacacagaggaaaaaagtaaacaggcccctaccccctactcccaaaatagttcccctttgaaagttctaagcggtgagtgcctggtaccgagggctgccctgttccttggaggggtcagcaaagctatgctaaactgacaggttcagtttacagcaggccagaactttgtttggatatactggccttgttcaccgccagcttaacaacagatggctagaaaactttcattatgttgcacaggactgaactgcaaacaacccagaaaactgtgaaaagtttaactccctctgaaccaatgtgccaaaccagggcctgcccagagccagtgaaccagcttaaggccaaggggactgtggaagtgatggttaaaataacactgcccaagtcaagtcaaagcacctttccaggctccaaaacggcagcgacccacccaaatctttatttaactcttcaagggccaggccatataaggagttgcatcgactatgccttctttacttttccaaaatgtactgtcagactttccctccctttggagaaagaaaatcttccttcagacagttcccaatccccaagctcccgttctgcctttccttctcctggaagttgggagcgcaggaccaaattgtctcaccctaacacccagagttaaatatgatttatctaaatctgtttataatttaaatattcattaagtagattcaatcacatgaaccctaatatctcctaatgctctgagacaggttataaatgcacctttgaaggtttaattcaattggcaatctgagaagtcttatcactggaaatgtgttattttcatattattcaagaaatgaacaaatgtgttttccacaaatgtattttagaagctaccctttcctgttattgaaagaaaattgtgtttattactcctttagcatagtgtaaactcataaacgtcaacagagagtacaaggaaaactgtcaactaaatattgtttccttcatgagctgttcttccaagtcaattacgcctttcaacttctggggcattgtatgataaactggcagtaaaaatcattcacattaatataccatggtgccttgcctgcaaaaggtaattaaagaagtaaatgactcataagaatagacatattagctgcaaaatgaaaggcaactgagctgccacataaaaatatgtaccattaagatactgcattttcatattcctgtaatcagcttcagtagactaatgcttatttaatccagttctgtgctaagtccatcaacaactgttttttgctgttttctccttgactgaacattatgagagcaggtttagaataaacactgcagtgagatttttgcatacgcaattgaagaacaggtttttacattttaaaatctatttttctttctctgagaaatacaacaaaaaaaaaagattactggtggaaaaaagtatatatgtacatggctatctagacatgtccctttaaatggcagaacatttcagtgaaatatttgtttccatattcactatttctgacctgtaccactatcagcataaggatgtcatgcctccacttgccagatctcagcttcctttatgaagcactcccttttgttaataatgtcttccattagcattagcaggatgagggcaatttatcctttggcagggatggaaagagaaggcaagatatgaggagggggttagtgtagtgggtggtgggagagtatctcagacacgcctagcggcctctgagttcttttccttccagggtgttagctacctgactggataaaccttctcaaagagaagtgaattgaccctcaaaataactgctctattttccaatctctggctttcaaactgacactttgctctcttctccatatccctttatatttcagcacatccttgccagcccagccaaggcacagcaaaacatcctcgccagcccagccaaggcacagcaaaacatcctccatacggtctgagatttttcacttcacttgctcacttctctgctgcgggaagcttaatcttaaccagtgagatgggtccaccatttgtactattaatattttggggaacattagatgcatgaggtttcctggaggctggagaaatgcctgttctgattgtggaaatcagggctctttgttgataactgatgcagcctaaagcttttgtggctccagtttgggagttttagctttcaaagctcatgcagctcctccgatgtccaatgccagcagtgaaaatcagcctaaggtatctggtcttctatcatgtttgtcaacaattcgcccaccttcaataacatccgaatgcatctggatggtgcccactaacctaccaaaaaatccaaaagataattctatttatttatttatttattattattttttttttttggtgcaagaccatgggctttcaataaaggtaaagttctagatttctatacaagttgtgccttctccccttccctcctcctgtgaatacagaaatctctttgactttaaaactgatgagcacccaccagccaggccctcaaggacagtgcaggatgtgagaacggccttacaaggaccctccaagatatatttatcttttcacagttcttggaactgtggagagcctctcagatttaggctggatctctccttgtaatgtattattgcctgagtgtttgagcagacaccacaaggaaccacaactaatgagctctagtcctttttctaattaaggaacaaaggttcctgtgtgcgcagaatggtgacgctgtctggagaacacacgtggaggaagaagcgaatgcttctaattgcctcaaaatgggatttttaatatttaggaacgtaatgggatcgggaaataagaacacttccaacatcctttataaataagcctttacaaaatattgttagctgttaataatacatcattatcaaaaatggaaagtcatgaatacagtgcatgtaacctttgtattcacgtgaattaacctatatgtacgaatacaatgatacatgaattagtttttaaaaatacattaaaaaaaataaaaggccctcctctgaaaaagaaaggcgagaaggcagctcctctgagcctgatattcctcagaccttagcagattaggattcaaacatgtaattaagaaagataaccccagtttttatagtaattaggggctgtgggaaataggatactatctctcaaaagtgatacaaatataccacacttctaaataacctgcaatgcttggaaagtatactcactaccaagggcaaagctgctatgcagtgagggaacagtaaatgacagactggcgttcaagtccattagctgctatgtgataggagcacattcactggcacgcgacctgtgaaaaatcttagatctctttaaatctttgaattggattactgcattaattcttaagaactgcaatccttcaaccaagtcaaattaccctcattaacagtggaaaaactgcctctgcaataagttaaaaaaaaaaaagatatttattacctataatcacttacacatacttcacctagaaatatgatgaacggatgccaacaactctgaaaacggcatcctggtttcgcatgttaatttgggttaaaataaaaatacaaatgcaagtatctgcatgctatttaaaatttgtttcacatctacaggaaattttcttttatgattacaatcctgagataagtaaatagctccattttacaggaggggaaattggggcatacatagagatacggagccagttgtctaagctttcccgggctaattggggtaacgcagaatctcctggtcctctgttctgggctcacactgtctgaattaaatcagaaattcagactcataatggcactgtaatacaatgcactgacttctctaaatcaaactcagtgaattaaaagggaggcaaaataaatgagaagataggaatgcagctttaggtatagaaatgataaccacagtaaatactacaacagaagctgcctcaattcttccatcaccacatttgctattagtgtttaacctgccttgaacattcattgaatgtagagtgattaaaaaaaaaaaaagaaacgttaattgatctactctgcccttgttactccctaaaatagtctcatctgaaatgtgatgacagcttgaccgactttgaacaactttggatactttatgggaaatgaactctttcaagccccactgacttctgttcctcggctctatggatgtcactgctttggttctattacttcccagcacaagccagggcaggagagtcctcatcccaaggaagccaaccaagtggagacagggctgggcacaggcaagccagtctgcatttactgaaacagactctttcgctattatgtgttaaggaatgggaaaaggtgaacaggtagaagttgctttccggactggatatgaatcaatacttctaggcagccacaataaaatgctaactggagttcataataaaacccaggggcactacaaggttcctaagtgcctctgaatttaaaaaaagacaaattgtgttcacggtggttgtatgcagaacgtgtttatttcagtctaaagattttaaacaaagtagtcctcacttaatatatgataataaaaatctgttacatagaatatcttctccattgatcctaaaatctactgtaactttttttaaggttgagtactccttatccaaaatgattgggatcaatgatttcagattttttaggatcttggaatatctgcatacacatggtaagatatcttagagatgggacccaagtctcagcatgacatccatttatgtttcatatacaccttatacacaaagcctgaagacaatctgatacaagacttttgataatttggggcaagaaacaaagatttgatcgcatttatgactgagacccatcacatgaggtcaggtgtggaatttttcgcttgtggtatcatggtggcactcaagaagtctcagattttgaagtacttctggttttggattttcctgttagggatttcaacctgcaacttccaaaagctctgttgttaagatgagcatttcaattccacaccagatttgcagtcatagttaaaataatatagtctaataattgtgaaaacagcatttatcaatctcactttatgtcaggcatttgtattcgctatccttccaatgacttttcaaggtgggaattatcatgcctattttacagggaaggaaaacaaagctcagagtggttgactatcttgcccaatgtcacacagcttctaagtaggtatccaaatactgtgactgtctggaggtgaagcttaagggaaaatcagagagaggaacttttcgaaagaggactttgagaaaggagaggcatctgtcttgggatgttaaaaaaatgtgtcaagaagccaggcatggggcaaccgtagtcctagctattcaggaggccaaggtgggaggatctcttgagctcagaagtttgaggccagcacaggcaacatagtaagacttggtctccaagaaaaaaaaaaaaaattgccaagaaactgtgatccaggctgggcgtggtggttcatgcctgtaatcccagcactctgggaggccaaggtgggtggatcacgaggtcaagagatagagaccatcctggctaactcgatgaaaccccatctttactaaaattacaaaaaattagccaggcgtggtggcaggcgcctgtagttccagctactagggaggctgaggcaggacaatcagttgaacccggaaggtggaggttgcagtgagccaagatggcaccaccgcattccagcctggtgacagagcaagactctgtctcaaaaaaaaaaaaaaaaaaaagaaactgtgatccaaacatcagactgtccatgacttgaaaaactcatcacacgcctcctttccagtgacactgcatgttttcaaggacgacacaaaaatcattcttctttggctctaccatttgtagagtcccctcccccacttttaagagctttgtgactgtcaatcaggtgcttttcaaacaataaacgcttaagcagtgacctcatgattaactcggtttcactactcaggcaacctttcaaaacaaatgttaaagttaaccgttctacaggcaccagaacattagcttctatttacacaccaattaaacacataatttttggtgactactttgtactaagcacagtctaggcactgggcctaggagggagaacaagacagacctggcccttccctttctgatactacagtctagcaggagatagagtaagacatcagcaatcaacaaatccagaaataattagagccactgtgaaggaagcctcagccttcattaaaaaaaagaaaaacttaacttctcatttttaacctactctagataagtccatcaaggaattcatccacgaagaggtgacatttaattggaaacccacaagtaaagaagaaatcaaatagccaaggagcagaaagaaggttcaagaagatggagcacagaggctgaaaagaaagcatgaaacagtgcttaagaaattaacttattgaatcgttagtgaaacagaattgtgttgttcaactaatcctatgtctacttcattcttcttcaacccttttaaggtaaacagaagtacacagattacaaatatgctttcaatcaaatgacttaataaatacaaaatgtgtcatgttgacaaacaaaaaaaaaaacctgtaaaaacattaaggaattgatataattaccacagaaaacaaataccttggaggtggcccttggtcctgtcaatgtgtaccatttttaaggttgtaatgtcatgtggttggcagaattctcaggtgacccttacattcctatgcctggtataacacaccccttcccagagagtcaatcgtgcactaatccaggtgctatgtgaaggggttttgtggatgtaattaaggtcccaaatcagctgacttgaagaaagggagattatctgagtgggcctgatggaatcacatgaaccctttcaattggagtttagagcccagagatagaggaagtcagattctgaagcacaagaaagactgatgtgcccctactggcttcacgatggaagagaccatatggcaagaaatgtgggtagactctagatgctgagagcagctgcaggctgacagccagcaaggaagcagggacctcagtcctacagccagaaggaaatggattctaccaacatcctggatgagcttaggagcagattctttcccggagcctcttgacgaggaatcagtgcagcttccacttgcctccctattctctgaggagagactccattaacagtgcacctgggcttctgacctacagaactatgagctaatttgtggcaatttgttatgcaacaacaaaaaactaacacacgcagaaaaagagatgaaatcacactgcttgcatctaaagtttataaaagagtttctcttaatgagtaagaactcagatgggagggaggtgggaagagagataagggggcaggaaagaaagggcagggcagggcagggcagggcagggcttgcatactggtcccacaaggaacgacatggtgacccaggggagcaatcgcttctcctctctgggcctcactttcctcatctgcaaaaagttggcaataacaatgggtggtggtgagggacgtcttgggaaaacactaagtgaaaacagtttgaaagttgaaaagcacaatccaagttattttatattctttcctggaccattttcatttttagcttccttttctaattattttgattacttattctaataatgatcaggacacaaatacggaattgtccttggctagaaaagagaagaagcattttaagctattgtggatcttcttggcagaccatgcaagggatgtggggatacctccctgggaaaaagtgaaaggaggtcagcatgaggtccctggtgaggaaaaccctgtctctcatcttccttcccctctttgttgcacagtcttctggaagatgaagccagaggcctgcatttgaatcctagcttcactcctgaccttaggcagtgatcgaaccacactgcaccacagtttcctcatatgtaaaatggaaataataatgacaccacctcctaaggctgttgtgaggagtaagtcatttaaaatacataaattaggctgggcacagtggctcacatatgtaattccagtgctttgggaggctgagatgggaggatcgcttgagcccaggagttagaggccaccctgggcaacattgcaagaccccatctctacaaaaaataaaataaaatgcataaagtacatgttaagagagtgtccagcacttcataagcaccatgtaagtgttacgacgattacttttaccactgctatgaataggagctgatttttattttccagaaaatctgttgtccctccaagggaatttggaagatggggctaagtaaatatataaaaatatgtttataatacggcttttactaatgacttttcacgtcgcactataaaacccatctaacctctgatgaaaaagaaaacccttctatactcatgatttttgccacataattttacttttacatgaataggaaaaaaaaaagtatacaagtcttaaaactttggcttactgctttttaagaagtagtttgggcaaaaccagcaaagacgattcccctgctaaaagagccatgaaaggtaagaaatttcagcaagagggtcagagataaaagcactcagaaaaagaaggcaaaagtaaaaccagacaaaggctgagtccacctccggagcagagacctctcatcctcactagtgtatgtactgaactctctgtggcctctttctcagggctggagaatgagcagtggaatcagctcttcccaaacctacaacccagcatgcaaggcagccaaagaaccaggcaatgagagtggtgccctgggaaccctgacaggagcaagaaatgtccaagactgggtgttgttcagaggtcccagtgcgtgtgctagagtctccacacctgagctgtaaagaaagcatctcattcggcaggtaagatgggttggcagaaaagtgggcaggagaggttcttgggcaaaaggctgagcgtgattgtgccctgctagaaaataaaaatgaccacaagtgttcgggacctgacagaacgggcgaggaggctgagaaggaactggatgaatcacaagagataggctgggctgtgtagagcatgtgcagcagtttggactgacacattgatttttggcaggggggtacagagtatgagtctcctcacatgcatggatgtgtataatcaccagcacagtcgggatacagaaggcctccaccaccccccaaactcccttgtgccaacctgttgtaatcacaccctcctcaccacccctggccccgggcaaccactgatggagtctctatcactgttttgtcttttctgaaatggcatataaatggaatcatatagtgtgtaatctttggagattggctttttttgacttaatacctctgagaccattctaagctgtgggtctgttaagagttcatcccttattcttgcagagtaggattccattgtacggaggtgccacagtctgcttacgcacatgcccagtgaagcatgtccaggttgtttccagcttggggcaactataaatacagcttccacaaaccttagcctataggtttttgtgtgaacatacgtcctcacttctcttcaatacatatacaagagtatgagtaactgtatgtttatttttatttatttattttttttaaagaaactgcccaggctgggcgtggtggctcacacctgtaatcccaggactttgggaggtcaaggcaggtggatcacctgaggtcaggagttagagaccagcctggccaacatagtgaagccctgtctctactaataacacaaaaattagctgggcgtggtggcacatgcctgtaatcccagctactagggaggctgaggctgaggcagaagaatcgcttgaaccggagggcagaggttgcaatgagctgagatcgtaccactgcactccagcctgggtgaaagagcgagactccatctcaaaaaaacaaaaacaaaacaaaacaaaaaaaactgcccagctgttttccaaggtggcagcatcactttatattcccaccggcaatgcatgagagttcacttgctccacatcttcaccctcacttagaattaccagtaattattttagccattttcataggtgtatagtggtatcgcatcctatttttttccctttccctataattttaagttgcatttccctaatgtctaatgatgtggaatgacttttcatgtgcttatttttggtcaagtctcttgcctctttttaaactgagtatgtttgttttgtattatagagtttggaaggttctttatatattctgtacacgagtcccttgctggagaaatgattttaaaacattttcttacagtcagtagcttgtctttaatcagggattgtatctgcacttttgaaagttcttttacactatgctatggagaaaagacagaaaggatgttggatagcagcaacttactaggaaatgaaaaatgcaacccggaagctgtggatgggcccagcgtcttgagtgcacagagagggaacaaacaggatgctgtcatggcacagggaagactgggagaagcagtcccttcagggtgatgcttttaatgctgtgactaatgatgccacgtaaaggtgatgtcttcccgtcctctgtttttagtgctgctgaaccatcccaggtaataaatcaaagaagccagggtggctatttgtatggcaagataaggaaaattaatttcaatgcccaaacatggacctccttatattaaaaaatgacttagcaataccagtccttttcatgagaatgtcttggaaagccagcacttggaaaacacacacacagggccaatccaccctctgtattttcaagggaaatactgttgtctcctgagattgggggaagttaagggggaagaatacattatacaatgaagagcaaaaaaataaaaaataaaaaataaaaatctgattgaacaaaaaatgtttgtggaccttcacaaaagagaggattataataataaattgcatgtagcagtcacacactcacttcttttaaaaaccttcactatactttacaaactactctaattgtctcattgtctccgaaattcagatacttttgagtttaaaacgtgtaaaaatatcaacactaggactgtgaacgagagcataactaacaatagtgagactctgaggcagcaacatggctagaacatagaattaatatcttggctgaaacactaagcggaagacaaagtgcaaggaaagcctggagactcctcctagtccccaggggctgtgccctcctcccggctctgagcacagcgcggggaacaatgttaagccatccatcaccagcgagcgctgctctacttgctggcgcccagtgagcaaggttaccacctgtccagcttgcctttgaatggtcccccacacaaagcccctcgtgctccaagttcaaactagcatttactctggatgcctaaattacctggcgtttcagccagcatctgtgccctacctctaacttggagaagtcttagtttaaccttggatctactgactatattctgggtctgcaccaagtaggcacaattttcctacacaaccctctctttgcttcccttcttgccccctataatctcttccctgcatagcagccagaggaatcttttgaaaatgcacatcaggtcattttgttgcaaaagattttgtgctcaggatcaaagccacattccaaagcctgcctttcaaagatggggtcttgtccacaccttcctgtctaccttcatctcatatcacctttacaactgccatggtcttgctgctccagccatcttcatgatccccttccctctcagggctgttcttccgccatacacactattacttatatctcaacacagctggaacccgaagatgttagctgatcttatcacctcagaggtaacatcctctccaccattaatgccccccatcattctgttccactgtcctctcagcaattccaccatctaaaaatattatgcttattgatttacaaataagtgtgaaatttatctctctctactggattgaaaactgccctgaaaattttctagtcaggttcatctctgtctacaacaatggctaaatcaatgtcttggttatatcaacaaccaaatgaataaatgatcataccaaggtagggaggtgcttccaagatcctagccttatcggcatttatttttaaaatagtaaaaaaaaaattctcgtcatctcagaagtgggaatgcattttcaaatgtaattacgaaaaatttaggaaccataaagaaaacacttgataaatagaattatgttaaaactgaatatgtctaaaacagcatagcaaagacaaaagatcgccaaaacactagagaaatatttgcgtgtcagaacctagaaagaaattataatttttatggttcataaaaatcgcataaatcaatatggaaataaataaaatccaatagaaaattagccagataatatgaaaatacaaatgtcggccaggcacggtggctcacgcctgtaatcccagcactttgggaggccgaggcaggcagatcacctgaggtcaggagttcgagaccagcctggccaacatggcgaaaccttgtctctattaaaagtacaaaaattagccgggcatggtgacaggcacctgtaatcccagatactcaggaggctgaggcaagagaatcacttgaacccgggaggcggaggttgcagtgagcagagatcatgccattcattgcactccagcctgggcaacagaacgagactcggtctcaaaaataaaaaaaaaactaataataacaacaacaaaaagtctcaaacatttttaaaaggttattcaatctcactcttaaagaaaacttgcatttgttttactgatttgtttttattacattttttctcatttatttttgagtctcatacccaagaataagcataggcccctgaatgacaggcaaaaactgaagcatactaaggcaaagtaatttaaatgcattactgtcttcttcctttgacatatacttattgcttaagtgattatgagcactagcctcagtttatttatctgttaaatgggaatatagaactgtccttaatttatgacaatttggtgagaatacatataaagcaccattgaatctatggttatcttttattattatgccaggtaatgggagggtcaccaaactagagcaaatggaaatcctgcttttccagtccagcaggaaggcagacatgggtgaagcactctactcaaaagagaaggtggtatatctatagtactaggagtaaagataaattgctacatgagttcaaaaaggaggcaagggcacttccagttcaggatgtcaaagatttcctagaggaactggtgtttaaaccagagcttgaagggtaaagacaatttggataggcctcagacaacgtgcttgtacagttagtcaataatagttcttctgcaattattaggccaggttctgtgtcaggcgctgaagacaaagtagaagagaacacagacagcctctactcttggggcattctgagtgtagtgggaaagagagtttaagtacgtttaagaagtaaagcaataacaggcagaagggttgcctgtctgcgtgggctatgggaggaaaggcaagttataagtaatgaacagttcttggattgagaggcagggtattcataaatgtttcttacattatgctttataattcaccagcacattgtatattgtatttaatagagtctaaagtacattgtttttttctttccattttaacatctctaaaattgggatgcctcttaaaagacatgggataagaaagcattatgtgctaactagcttggctgcatttttactttattactggtttataagataaagggcctacagaaggcccaatgaaatacggcatattcttttttatgtatcaagtattttttagaaagatataaaaatattttttaaaactacatttatgccttttatcagtcaaataagctcagtattattttgtttgctattaaaaaaagacagatatggaaggtatagccgataaatacatagatgaattatgcctccatctaattcagctcgtgatgtaaaatcagattctgttaaaactaaatgcatgacttcaactctgttttcatccatatatgcaatcaatgcatgttttcattcttctctttcattctctcctctcccttttcttattcttggtgggaaggagagaagggaatgcgacaggattggaaatcatttagcaataaaagcagccatgagaatttactaaaataattatcaacatccataacaatgcaaatattttagtccctgactaatccaggtatctggatcatcttgatacacagtctaattttgaaaaataatttggttccacaaaaatcagagctgcaatccatttggaagtgtttggttggcagtctaatagcaggaaatgattttgctaaagccatggcaattgcttgacgcagattctgatgctcagactattcttccttcttttcctctctccccacccaatttccaaaggaaagccacaaatcggctctgctgtgagataagggcgaaatcaacgagtactagggaggatgctatttggatggagtgggatgccctggcagtggcaatgcatgcatctctattttcctttaaagagcaattatggtttaatatggtaaaattatatcattaaacctactcaactggaataaattctccttctgatatgcatttagaaaggcagttcatattctacccctagaatatatctattacatttttgtgtctatccgccacttctctttttaccatgatacttgagataagtttcagacagtctggcaggaggtgaaaaaaacacaacaaccctgaaactcgatacttatcttactcatcgagacctttttgatctctgtgagtgaaaattaatccttaacaccctccaacttcccaaagcacaaatttctaacatctttttacattctctacaacagccattacttattattattactagaatttcccctttgttaaaaaaaagcactctaatttaaattaatgagttaagtttacactcaaatgcagaactgtcacatgcttattttccagttatgaatctttaccgcaagcagattagaagtatcgcttgtaatagagttttcctctagttcaacgttaagtatgtggcatggcggtgttttgttgtctaccccgttacggtctcttttttcctcttttcgtattccccaggatactggccctgtgaagccagttgccatgtccccatctttcaacttcctagattgtaagatatttggaatactggaaagacaaagggaaggcatatgggggtcaagagtaggctccaagtctgaaaattatcgccaatattccagctgcttaccttactggtttaagagcactggctttagcacctaccacacctgtgcaaattccttcttagccccttgttaccatgtaacaaagagccagttatttaactcatctgagtctcagccttctcaactgtgaaatgggaatactgctacctgggagcacagacttatttgagagattaatatagccaagttcttgcaaggtacacgtcatgagtggacattcatgctgtattttattgatcttcttttgcgaagacccggactctcacccatataagttaaattggcagctttcactacgcgcgtcaggatttatataataggaacactgcctagttcaatgtgggaacaaagttgtattgggggagcacttatgattgtggggaaacaggacaaagagattctgaatgctgctcatctgcctgcctgcccaaagaccactaaatgtgtcccttccttcttttttattaaggagtttgtaaaagtaaccacttgggaagaaacacgaaggaacatttcaagggcaagggatatagccacctctgcactagatagaaagacacaggtgtgaagtccagtagtttggcaaaatgaactccctttagtcgagaggatgcatgtctaaaacatttttttttttttttttgcacaaagttaatgaaataattattttttggtcataccttgcacggaaaatctgccaatagcatttgacatttagacccactaggcatcttaagtagcctgctactcacaagacctaccttttcccactgccctattttacaaacactcttagctctgtctcctgctctcctctcctccaggaagctggagaacaatccacgaacagtagtgactaagatggcccctaatgaccatatgcttgtattatggccttcccttgagtatgggcaggatccatgaatgggatggaatacattcctttgattaagttatgctgtgtggcaaaagagattttgcaggtataaagtccctaatcagttgactctgagttaatcaaaagagagcttttcctctgtgggcctggcctaattaggtgagccccttcaaagagggtcggaggctgttcctgaagacagagattctttggttgggttttgaagaagcaaagggctgtgttgtggagagggccacacataggaaacagtgggtggtctccatgagcttgcagcctcagtgctctccctgcatgaattgaattccaccaacagttagtgagtttggaaggggatcccaagcctcaggtgggaccataatcaggctgaccccctgagtacagatttgtgagactctgagcagagaactcaggaaaaccaggcctggcctccacagaaactgtggaatgacagatatgtgttgtttgaagctattaagtttgtggtaatttattacgcagcaatggaaaatgaattcacacacctgtgaaaccttgcatagtatatgaatgggttcccccagaggtgggctgagccccacctgaaaccgctttgtggaggaggcccccagcgtgtgggggacagctgtggctctgacccccacacagacctgctcctgtgccctaggtctgtgacttactagttctatgaccttgaggaagtaacctgactctctgaggctctgtttccttatctgaaaaatgggtataacaccagtgcttaccccacagagctgtggcagagattaaaagagacaacactcagaaggcagtgaacccagggcctggcacacaactcacagtgatagaagttagctttggtattattgaaatacacattcctgttcactggcctcagtttacctatttccaacaacaaaaagggtggagtggaaaggttctgagctgccttcccattctgacgcacttacagagtctttgcttaataactcggcaagtccttgacaaactttccatcccttccccacccatgtgtacggcaggcactcccaagtcaccagcttccagagccccacgctggtccatctaaagccagaatgctgaactttgtgactgagtgcttgcaactgttgtcactattcagataagcacatcctgctttctgtttaccgaccagttaaaggcacagaggggtacccggcaattgtgcggcacttggtgaaggcgcctcccacacacctgtgtctcccaacccacccagctcctgcagccctctcaggagcagagctcaggctagtgaatataccagcaggaataccccagtgagatggggagaagtggctaaaagttactagaatgctgtcgctgccaagttttattttagccctcatcaatccaaacctttattcctgaattaagtattctccagggacgtttccaggtttgcagctatttcctcctaatgattctagcccagcaccaagcacatttcaactttctaaatgactggaaggctttgaacgttgaccacaggctgcccccactgccccccgcaatcatcttgaccccacctaagaattagtaccatgcttgagaaaaaaaaaaaaaaaagctattaatacatcaatgccttctaatcctcttggttaaacatgaaatgacaactgaagatacacatcatggaatggccctgttgtatctgctggggtgtatgtaggtgtgtcacattaacctaaagaggtggattccagcttaacaaaataaatccactcaaagctccactctgatcaaagggaattattctaagagacaatcatacctgatgagatagcacctccacatcacaagtcagacaacctaatggaataaatgacagtaaattgtaaatactgtatactttcctttctaaaggtgtgttttcagaggtacggcaataaacattaatgaataacatttattgggcccctactatacacatatgacacgtagcatactaggtccatagtgattatgtacaattgacacaaggccctcaaacacaaagcaaacatttattgtggtctagatattgtgtaatctatttgttctcatataactctatggaattttgtttttcccctttgcattcttcttcttcttcttcttctttttttttgcaattgactaataataattgaatgtatttatgaaatataatgtgatattttgagaaaaattaaattaagctagttaatatatccatcacctcacctacttatcatttttttgtgtgtgtgggtgtggtgagaacatttgaaatctcctctttcagcaattttgaaatatataatacattattattaactgcggtcaccatgctgcacaacaatttactaaaacttcttccacctctatcctggaatttcttaagactgattcagactgtaatgtgcctgggaatcaacgtattccttaaggaaaactctaaaaccatgacatatttaagcctactgtatgaattagaaaaagcattctaagaggaagtatctcacatatacactgtcaaatcacaagaatagatgtccatgaaagccaggattcctgttagtattcattcactgttggttctttggttccgtcttctcctcactggtggacaatattgggcggaggcaaagaacacggctctagagctggactgcccgggctcaatgcttcgctgtgtgaccttgggcaagtcacctaaccttgcggtgcctcagtcactgcagctattaaatagagataaaactaggtttttccttttgggattgttgtgaggataaagtaagacagttcctgaaaagcacactgcctggttccccatggctctcagggaacattagctgtcccaattccattactagcagctggaagacaacataacaggagccaaagggtgggttgtttgtttttttaacatttgcaataagatttcaaaatagaaaatttgaatttgtcaatctggggaaaatacaatcatttaattatagtaataaaatgtctcataatattactgaaaaaatcactgcattgtctcttgcctaaccacagtgaggtcagagggatattatttcttttacacagtggaggaacttaagattcagagaatttaagatgctgagaggcaagccacaaacaaacaattgagattgaaactcaggtttgtctcagtccaaggtttgtctcagatatgccatgtctatatcatgacatgtatttttaaaggtaaccagggaaccaaagggaaggcctagaaaatacatataaaccaagcagtgctcgggtgccctctgaaacacaatcttacatttatgcctttagtatagtgctgtccaagagcaatataatgtaagcaacatacagaattttaaatttttagtagctgcacttaaaaatggtaaaagataacaagtaaaattaatgtatgtataatcaacataaaattgtcaatgggctattttgctctttcaaaatactaagtttactaagtctttaaaatccagtttgtattttccacatctccatttagattacccatatttcaagtgctcaagagccccatgggaccagtagccaccatactgggtagtacagtggtcacagctctttgcaatgaccactcatgctaaacagcactgaaagaaatcattagtgtcatttgaaagcaacatctaagttttcacctggcagacccaggatttagatacaacccaagccatttgtgtttcttcccctcagctacaatctaacatcacattcttagttacaaagacttgatacgctcacttctagtgcagaacattcagccctcattcaggatactgtatcctgctcaactccatgcatacattccttcttgaaatcagtgaaaactccacatgtgaaacagaactgaaacagacaagacagccccgcagtgcaggtaaacatgaagccaatgggtggtttttctccccttgtgctttggacaatcaaggaaaacaagcccttatttgctaaataaaaatggcttggccatgaacttctttggtaagggaggtagggctcagttggggttctcactgattgcctgtctgacagcaatctctcctgcagggaggacacagcccagagatgaacacttaattgagagagaaatcaggaggactgctgaacgactgagtgatctttcagagcaaagcatcacaaggaaaagggaaccagctccagggggagggggggtgaaagttttcaagagaaggtgagtaacctggggatcccatgatgcatggctctgggaatgaaggatgggtcctcttcctcattcctgctctcttaccttcttccctgtatcactttctttcatcatgcactcagcacctactcagcatctagcactgaacacagagaggtaaatacaacattgccagcctcaaaggccttaattcagccattaactacaacccagcagcatttgtgcttcaatggaggggtgcaccaaacaggaggagaggggaaagcctttccaaaaatgaaagaatttaaatgagcctgggagggggggaaaagagtgagcaaagagaaaggtattttgcagaatgaggctagcatttgcaaaggcacagaggtgtcagaagcctggagagttcagggtcctgccagaatttgggcttggaatggtgcaggggaaaacagaggataagctcttttctaatgggcagaggccatagcatgagtggtaattcaacatcatccaaaggaacttgattttagtgcccaaaggctagttggacatctagaatttttgaaatgggcaaaaaagaagacaaaatctctatgattctgacatgcttccatacacagcaaggagtccaggagataaaaggaaggaaggtgggcctcctaggctgctcaggtccagcacacctgggcaaccattggtcctgcctgccacactgggccaggctggctaatcaggactgaaaagctggtgaacagtgcatgtcctgaccacgaggtgactaaagaaaagccagtttcaaggcctagtaaaaagaaagactgcctggttcagagggtacaggaaaagcacaagagagtggaggagcatacacttccaatgcagagaagcaaagcagatgatgccacctcaggttaattaaatcaagtggcttcaggtctggatctaaccttggcggcaaaccaccaggagaatgttgataggacaaccaaacaggtatagattttcaaacatgtttttggagtgttggaacacagaacgaaaagagactgctgagaaggttcaggagagggaggggatggaggagagaataacacagaaaggacttctcaatcttgaatgcctccaaatttggaatgcctttttaaaaatagtcttttggatccaagaacaaaatcacaccaaaatattaaaaagataaggcagtgtgaaaaagtttactcctgaaatgactcttaaatacaaattggaatgttaccgacatacctgccccacaaaaaggtgaaaattaaagtcaaatcattaaatctgaatatggttgtaaaggtgaagagttgtagagatttatataacttttagaacacatcctttaacctattgattaaataggagaggaaaggaatgccagtaatatccagtgtactgccaaatgtcacactgtgaacccacagcattaagtatgtaaatcttctgataccaggttgttccttcacttcttttctggcctttcatgaagaaatctttgctagttagaggctagtgatacaaagttgggctaagaagctagtcaaggtgcctgtcctcatgaagcttctattctaaagtgtggagggaggccaggagtagtggctcatgcctataatcccagcactctgggaggctgaggcaagcaggtcacctcaggtcaggagtttgagaccagccaggccaacatggtgaaacctcatctctatcagaagatacaaaaattagcctggtgtggtggtgtgtgcctgtagtcccagctactggggaggctgaggcgggaggatcgcttgagcttggagggcagaggttacagtgagccaagattgcaccactgcactccagcctgggtgggagggtaagacgaaagaaggaaggaaggaaggaaggaagggagggagggagggagggagggagggagggaggcagggaaggagggagggaggcagggaaggaaggaaggagggaaggagggagggaaagaaagaaagggaaagaaagaaaaaagaaagacagaagagagacagaaagagtgagtgagtgcctgaaggggagaagtcaggtagtagatcaataaataaaagtggtaactgcagagcctgagcttgttagaagacacaagtagatgatataataaatagtgcccagggaatgttacccacttacctgcagaaagggaaagacaagttgcagacaaagttaggaggcccctgagctgtccctctgaggcactcatcctaaggtatggatgacaaagacactgccatttaggcaggggtgagcagggatcatgaaaccaatgagagctcagtaatcaaagcatgttcccttttcactgtctgctgaatgctctgctctaaaacttttcatatatggtacaggcaacagagaaagtcttcatgtaaataacataacagaagtaaactaaaaggactccaaattaacatacagataaacacagactgaaaggtaaagtcatttgacctctggaattctctttcagcccacagaccaaaaaaaaaaaaaaaaaaaggtaaatggtgatcacaaatcctgatatgttacgttgtcaaaggttggcttgaatgtggaaataaacagttgaaaagggccaagcaaggtggctcatgcctgtaatcccagcactttggggggccaaggtgggtcatcacttgagcccaggagttcgagaccagcctggacaacatagggagacccctacctctacaaacaatacaaaaatgatctgggcaagatggcgcatgcctttggtcccaaatactctggaggctgaggtaggagaatccctggagcccaggaggtcgaggtgcagtaagccatgattgcaacactgcacttcagcttaggtgacagggcggaaccctatctcaaaaaaaaaaaaaaaaaaaaaaagttgaaaagtacttcaaaattaaaagaaaaacaacgcatgaaaatcagcagaaactgagagtaatgtataaaggacctgcttcctgatttcacgtttttagaaaactgtaaaagattggagagaatccagagaagggcaagtaaaatgattaagaggatggaaaatggagcctccgaggaaaggttaaaagggttatgatggtttagcctgaaaaagagaaggctaaggggtgacttaataactgccttcaagtatatgacaggttattacaaaggagatgccaacaagttattttctataacaagagaggacagaggaaattgccttaaattgcagcagaagaaagagagctagcaagtgaattgagtaagattcaagagtaagttccttgaccggacccagcttcatcaagggaggctggcgaatttctcttcctggagagctttttacacaaataacccattctctttgattataaatagcccttactgggtacagtgaggtggagttgagaccaactgaccttcagcagtcctttctatgatatttcaacttttggttcataaatgcaggaaggctttactaatattccatttcctaccttacaagaggtttaaaaaaaatcaagatctaggaagatccacacacaatgggtttatcaatgataatactttataacacaataaaatggatgcaacttttccactgattttttatgacaataaacataagcaaaagaagaactaattaacacagttacgctcataagaaaaattagcccaaatgtaagacagccacaggtcctgattctgctgaattacagattaagtgtagaactgtcatgcacatgtgctaaattcaagctgaacacaaggattctgttcacttccttcaagaagaggcatttactgcagaaggctcaagaaccaataaaaaaggtaatttcgcagtatctccactgtgtcccaatcaaccaaagggccgaaggcagctccatcctcaccacgctgttcttgccacccggctggttttcaattgacactgccgtgtatgtatttcttttttttttccccaacttgggcctattggggttttgtaaaacactgcaactccacactagcctgttggtctctgtttgggctgtggtcaaaggtaaaggatgatttacactcctagagataactggtctcagcattggctctaggtggaggtgaggattctaaatgcaagagaaaatttaaggtaagagggagctggtcaggtactgggaaaactttggccactgggttgtttatctgtggtcctgaaaagtgatcctgaagagcaaatgctgataatcttgtgaaaatcaagtgataaaccactgttggcgttaagtgaaaacagatatttccacttgagttccagagaattctaaaaccctactaccccaaatggtagcaactagccacatgtggctatttaaattaattaattacaattaaataagaataaagaagtcagttcctcagttgcactcacatttcaggtgctccatagctacattggctagtggttacctcatgggactgcacagataaatcaacaattccatgaccaatgcacagcattttattgggcatctgttctagaatactgaaggctgagacttgaaaaatcagccagataattaatacaaatgtagaaacgaaggcctccacagagaatgttacttgctcaaatagttaatgatcatctttcccccaacctcataccaatgtagattgaactacagaagcctgagagaggtcagaagtcactgagtcatgggggccttaggaaagaccaaagacgggagtgactgaacttaaggaatttcccaggtacaaagcatagagtataaacatattctaggagtaagatatagcataagcaaagagaagcactaatcatttttgtgggtttctgagtcacacgtgcctgacattttagaaggtctaagaaaatgtagaataagaatgggaggataaattgaggcttgctttccaaggttcccgcttcagttccctattcctttgtaacaaactatcctaaaacgcagaaggcttaaaataacaatttgttttttctcaaaattctggggattggctgggctcagctaggcgattctttggttggggtaatttatgcagctgcattcagctggtagctcatctgggcctccaagatgtgggtacttcagttcttcctgtctgtctctttctctttctcatcctccctcctctctctccacgtgacctctcatcattcagccatttggcccaagcttcctgacacagcagtggcaagcatgttcctacagaacaaagagaaagccaccaggcttggaactggcacagtgtcacttccactgcattctactgcccaaagcaagtgaaaagcgcagctgcccagagtaaatgtgagaaggcacttagactctacctcttgaagaaaggaatggaaaagaatgtgtggccacttttaatccacctgattccctgcatgtcaagcaagagaatttaagctcaatttcctaagaaacagggagcaagacaatgatgccatcagagttgtgctttacagagaataaccaaattttgatgagtgggatgaacaaaaacagtggatacagagatctgttaagtggttataattttagcatcacttaacaacacattcagatgtccttagagggaatggggaagtcacaagaaccactacatagataaaaatcaacagtgatgagcacctataactgaaggcactggagagaaactgagccaacattccacatcacagcaactaaaagaaggatgcattattcacccaaaagggaaaagctcccttagtatagataagtttcagttctggaccaattgaggaaaaatccctacccgcagtttatgtgcagagtcaaaaagaataatgatagccacaggccaatcgaagtagacaccaagcatacagccagatgtaccttaagtgctttttaacctggtttcaatcatcacttacaattttttaaaattctgctgaacaggtagctcctctgaattagaaagttaaacagcatttaccattagcaagccattatttggagagctgaaaccatatactaaattacagggtataagagatgcttagctaactgaaacctggccaaaatactaggacaaatgcaactaaatactagcccagaattctgattaaccactgcttcccacagcctttgttcatacatctctactgatataagcattgtccatatgatccttttagaagttttattctgactgaagggggagccagtaccattaagacatccaatgttaagatggttaagactttttgaataactgcccattccaatccaatatctattgggttcctactatttgtcaagcaccaaggatatagcagagaacgtcataaacaaggtccccaccttattggaacttacattcagtggcaaaagtcaaactgatagagacaggaggcacagaaacttagacaggggcaggtgtctggtgaagccccacccattgttacttgccaacatgtggaaaaagaacccaaaaagcttcctttggaacatagtacccctttatccacatatgttaattaatcaaagcccacagattaatgaggtaggagaccttgtctactgatagtctagctactgggtacttgagttgaaggctgatctcttcatttttattttttacatttgataaaatcttcccggtagcatttattattccagttacggctgtcatcatttttccaagtaccatcatatgtctttccccattagaagatgtatcaatgcaacagaaagaaactgaaaaaagcaagctggtgttccatctaaaatgtgttttctgtaattatatgcacaaacaaatacaaactagaaagaaaacggactttgagttagagaactttgacggtaactaggattggtttcaaccaaaacgatgcacgtgaataacagttaaattagtggatctgcttcccaaatctttttttccaggcacatccagggtatgtctttaacagtcctgatacttcaatgaaaaattgaggtgccaatgatttataggtgaaattaatgttaaatacttcaaaggagtggacaaataagtcagcagcaaaaattttatgagttcacttccttcaagggaacttagagagcgggattttattgctgtgaattctggtcaccctttctacccctcagcatctgtttgaaatatgtagtagacaattgcttttttggctgtgactcaggtggtggaaacacaggacaaacagactactgtatataagctttcctccagcactgaaaaattttattaactctcttgcatagcaaacgtggcggctgctcagtgcccaatctctgcagcattatcaaggaatttggctaattatgaatcgtgctggccaagcaagaggtgaccatgttgaaacttgtcaactcgatattttctcacatttcagaacaagcagggaaacaacaacaacaacaaaaccttatattctgtttagttcatcattcctatgtgtaaaattccaagttaaatattacatgtgagcttgctacataaatatgtcagtcttgccaccgaggccagccaaaacaaacagtttcaagcagtcccacagtttagagcggtagagttttcatagaagccatgcacttgcccccttttaatcagttttttaaatttttctcccatgacaatagaaaagttagaaagtagtccacagagagtgtggagaaagggcttgctctccttcacaatggcgactgtgagaagatcaagggctgaatgtctgcctggcagaacatgagtctgtctgtaaaattctgcacagacgaaagctcaatcccatgccatcagtccaatccccaaataaagaaacagagttggttccaaagtaatgagtagcctatataatcagatggtttctcttccatgttagggctagaaataaacatggatgctacctacaacttagactgctgtacttatttatttatttttattttttatttttttttgaaacagagtcttgctcagtcgcccaggctggagtgcagtggcgcaatctcggctcactgcaagctccgcctcccgggttcatgccattctcctgcctcagcctccggagtagctgggactacaggcgcccgccaccacgcccggagaattttttgtatttttagtggagacaggttttcaccatgttagccaggatggtctcgatctcctgacctcgtgatctgcccgcctcggcctcgcaaagtgctgggattataggcgtgaggcacagcgcccggtcccgactgctctatttaaagtaatgaaagcacagttggctccaaaggagaaaacacattgctagaaacagtgaatggaatttgaacagaaacttcccaatattaattcccagagactaatacatttttatagaaagtctattcacaaaaggggaaagattattttcaccaaaatcttgtagctaatctcttcacgtgtacacattttttagagacctgttttatgttttcttataataaatctattgaccattttttcaatgaataaagcttactttctcccttcattcggaaactaagaaatgttttatcatacaaccaacagcaaactttctttgaacttcaaatccaatgtcccccctcttcctacattccagcgcattatacttgaaattatttgcctccaaagttataaagaaaaaagagagtagttaagatgaccagagttacaactgttattttcttccttaaaccaatttacatagcccttaaacaaatttacatagcctttttcctagctatcccaaaatgtagattcttcaaggaatatttcaggcatttaaacggaaagtgaactcccatgaattttggcaaaaataatggaaacaaggactgaaacaaaaatatccaataaaacactttctctttcctgaaagggatggaaaggaaataaaacacaccctgaaaagaagatgattttataaaacgttactaggaatagcttttaccaaattgaaagctatttttttgtaaaaaaaaaaaaaaaaaaaatcaaaacctgtttcccagaatgacttctctaaaatcatcagcagctcacgaatgtttttgtgtttaatgaacgtttacctcatttaagctttctttatattcaaaaaattaaggagaccaattctgccaaaaggcatttttaatcatttcgaataaaaaacaagtcagtcacaaaggactaaccagacatttcaaaagtggtaataattttttcttaggtgtgagagctggtttcgctatataaaaatttctattgaaatgtttgttttaactaatgtataccttccttccatgggagaaatttcttcgaagacagaagtttcttgtcttaatggctggttctaaaccccaccttgccttgccttaaatttgccatgtggtccatggaggcaaactaggagggggacaggtgtcgatttaagccaaacaaaacaaaaaaagaaaaaatatggccagaatggtctagacatcacccacccagaggcatccgagacaaccagaatgccacatggcatgccacgaaccacttggaggtctgtgcaaaattcataggtgaggcaggcaacaggctccatcagccaccagtccaggttgtagaatgagaagcaacgtgatcatcaagtaactgtgttgctggtggtaacagaagcaccacgtttgagcaactgaactcaatctttcactttgtatgaagacagaaggctaaacattctcactggattgcttgacattaagaaaacaagttccccaaaagaatgactccaggttaaaacattagccaaattctggtgaccaataatatcttgggaagtaacaatcactctgagaaacacttaagaagacagcccaatacttagcgcctccttggcccacttgccattttctgtgtagtatgtgcagggagtcttccaggaaaatgggggcacagacacaggaagaaaaggcagcccttgccttcaaggagcttacagtcttatgagaggaaaagacaagtacatgagaggaacacaagcaagtggggggtgacaagagccgctagcgtgaccatcacagagccatgaatcattaatgacacctggaaacctgttacggcccccatcttccaaagattcacgcagttccattctttaaacttttcttgaactttctgtgtaattaaacaccaaatttggcaacccatgctaattttgaaaggcactccctgggaatttagtaaaaagtttaaacaacttgtttacatgtgtttggcccatctgtttaaacttcttgtttattttaataggagcaactcttgggtgcaagctccttttgtgcttgagaccactactggcctcttctccagctctgtttccctaatctgcattctaaatctcttctgtaaacaaaacttgaataacaactttttatgataaatgctgaacacctccaagatgactgctgcaaaataaactacttttacaaccagaaagcattctaaacacacagaaaatacttttttaatgctgtccttttcttaaaaaaacaaaaagcaaaaacaaaaacacacacaaagaattttattttctctgtgtgtgtgtctacatatatatgttcttgacgatccttctgaattgtgtgcattcccatcatgctccagtgtttttccagccccgtaatgccctcacttttgattgtggagatgatgttgaagtgcacagggtatttactgatccggttatcttgttctgtgacaggcagaatcaatcaatcaagaggccagctttgcacttacatattccaggcacatctccgcacttcaggatacgagatcacagtgttatccagccaaatttgatcaacaaatgcagttcccctgtgccacagcaatctcagatgaagatgttattatgtggaactgagcaaagtgataaagacagtacagcagagcctggagaagcccggctggaccgcactgacagcttttatatacgaaggcggtgatgtccctttctttcagattataaaagttcccttgatttgaagaaaatcactctggacatatacaggtgacccccaaccattgcgtttccccatctataactaaaatcctcaaggaagaagcaacatacattagtataacattgcaggcaaaatcctttaataacagggcagtatttaaagcgtaagagagcacgtgtgaattttcagagagcttttctgatagtttcttgttgatgttgttattattattgattattattatttggtgaaagctaatgtcggaaagatgaaaaacatggttttagaacttaatcagttacaaataattttatttatatcaaatctctgacactgtgtgtcagtgtcaatattttaagtggatcccaagaaagtcttaagaggatgtcttactgcaccaatagctttcacttcattactgccctgcagttattttacattatttaatcccaaatcccatcttttggattctaccttcctcttgcattttaaatctttaatgggagcctctggcggtccatgggtacaatgattagatacctgcagagagaaactgaaaaattaatcgtggtttccattttatatttttgtattacactaaaaattacttacttgtagagctaacttctacactcctgcaatatgttccttaacattgcaaatgctgagaatgatttcagataaagcatgtccaaactgagccagtaaacagccttaagttattctttgagatttgtatgctgggttttcatccaaatttcatttcaaataattttaattaagacgcatttattgatagaggtttgttacatgtggcctaaaaccagggcaagagtaccccaggctaatcataggaatgacgttaaaattgtttattatccttttatgaattttcctgcttaaattaccgaatttcgcaactctatgcaaaatgtgaaacactgtaaccacatacagtttattatagaaactgatgtatgcattaatctgacctttacctaaatacctccttaaccacaaggaatgagtttaaaagaaaaaaaaaacaaaacaaagtcagctatcacatcatgagtaccatcaaactgctaaatctattaactttgttttcttttttcactattattaaactggaaagaaaaattcaactggaaaattgtgccttgtcggttcccttgtcatcatgtaataagtatgagaaatatatgtgcaatggccaaatggccggtagacaaaacacccactctaagtgacgtactgttttccataccactcagacaaaatcaaaacaacagaactgctgcaaacaaaaacaaaataacatttcccatcagcattccagacagaaaatttacaggaaaagaagctgggaaaagaaccagaatgaaataactgctcatacctccactcttggtagagccatttcttcagacaaacagcacttacttgaacagtgaaatgtttaacaattgataaaatgtttgccagtgctggaaaacttttttcccccgtttttaggcaaacatttgcactgtttaaagtgatgaagtacttctatagaaccaaggggcctagatttttctttttttaaacaggggaaacttaagataaggaaagagacaggttatagatgggtacagaggtaactttgcgatttaattacttctcctttcacagagaaatagagaagagtttctcagtgctgctgagcccgcatgggaggagagcgtaaaactcacttgaaaaagtgaagatgagctctttttacagctgagtcacatttatgtaacttgattaaggtgccagcatcctggaagttactggatcagggttaagcatagatacctgctcataaactgaggtggtgccgtgactatcaacagctgtatttgactatttcatcgagtcagtttacagtgtctccatcacagtggacgcctgtcagctgcactcttgctaacacaattcctgtgttttgcctggcagtaaatggacgcctctgccctagcgtcttctaaacaactccgttaacatttgcccccgagcgtctctctctttgtccagtccctgtcttctaacagatgtcatccaagcctaatcaagcataaaatggtcataaatatttctttctggtagatttcacattcacatttcatgcagggacatgatatttttctgctacctccagggagagcctaatgcaaaaaccagttacttacattctagcctcatgttcctttagtaaaatgcagagcatgttctcagttcaaagacataaaaaggtgtaagactttatcttctggcttttgtttaactgcaccttttatctttccttcctcccccaccgccccccgcaaatgtatcttcatcttatagtttatcctgatgcattagaaatgttcttttgtgcctgagaaaatataaaacagggtctaaaatgagcccatgtctaccatatttcagttactttaggttttcaacattaggctccttaattactggctaaaaaattactggcaaaaaaaaaaaaaaaagattttttgctcagatatgtaattcaaataacaagctatttaaagagtagataagaagaaggctcttctattttggttcattttacgcacaattttgcaacctccatcatatttagttaaaacgatgggatgaatcgaatgtacaaatttaagtttcatgccaattagcattgaaaaaagaaaagataatcacgagataggccccatttccaatacttaaactttgatcaagcagggggagctactccagataattaatcagcctgcttaatgagaggagaactggtaatcagcacaatcgtatttatcttcagcaaacttagtaaataatgagtcttaatctaaaataaaactgtcctaataatactttcaaggccatatgtctgtgtttctctttcctatcccttttgtcaaaacaaaaatcttatattgctatttaaagtgaactgcaaaacacttagcggtatatatcacaacaatgacgctccccccacgccctcactccgttgagcctaatatttgattactgctagtcaaatcaagctttcaggcaaataatctccatttttaaagttaatgagatatggtcatgtcgacaacagcttgcagaaacttttaattttaattcctgcaggctgtgctggcctcttttacagcaactactgtatgaatgagtcaaatttgccaacatggcttatgtagacaagtgcacactaattaaaaatacccactggtatcataatttaaataccatgaaaataaactgtgaaagtcgctcggatccagtcttcatggtttccttggagtgtgcttcttttgactataggatgttttattgctcgcgtattcttagctgaaaaccattttgcatctttgaggaatttgggattttgatgtaattatacaatttgtgttaatatttgtttcgcataagctgttaagcaggcctcccagaacgaccactaattgagaaaaccatattgctgaggcatgcggcaaatttatactcttgattcagcgtccatctacaacttccttccatggggccgtctctttcctctctgagctccagccacaatgaattcaaaataaaaacacagttgttttagtccgtctttcttttcttctttttgtttgagttttcactctttataatatctgtactttaactggtcttcttccaaaccaggaaggcgggcatgattcttcacctaaaactaactgcaaaatgctgctataacttcttttcagccatccatccatccagccttccatccattcatacaaatacacactcacttttttttttttttaatttaaataattttttggctagggaatttctgagtctgcctttgctgggataaaagtacattttatacagggtaaaaagttggcatcgtgagggttaaagctatttgaggggttaaatatgcaattaccgctcactaaaaccagagagacatatagataaatagaagaaatgaagtccccaggttcccttcagaagcctccatcacattactaccagacagaaactctttaagtaccattttcagatgttaaatcattgttcgcgctgcacatattttcgctattcctgggggaacaatatctgaagagagcgtgctaacaaatgcaatcccgtaaacaggcatttttcctcttgttgttagtacctttgtattcccgctcccggctctgtcatccatggcttctctctgctttgaagttaaagtactgaatgagcagtgtcatctattatccagagtgtgcatgtagattataaataagaaataaaagtgactttcagtacactgcttttgcattagcaagttgcctcctctcttacctcctctgtccttcatacttgcaaccaacaatctattagcaacctgaatttcagggtttctttcagagggagacacagactggaaaatgtgtatgtaacaacgtgaaaagttgtattgacacacagggctggggtctgggccaggcctctgcattcaccttttctatctttaaccctatcttacagatgtccttcaggacgtgtgtctggtgatgggaccggctcttcatttacatttttctgttgacaaacagagtccatgaatattaattattctgaagtttatttgcagaaaaggcactttctaatccttatcaattatttattaaaaatctcccccacctaataatctcattaacattattatactaaggccaacagcaaatattcctttgataagtaacaacccaacctgctatccttcctgccaaatctcatgtagcctcctttgcttaatcatggatatcgtggcttttgttttctggaagctcgagggtagtcctccattactttttttttaatacaagaaaattcacaaacagtgccttttgttataaaatgaaaagtttctgatacattacactaaaggaaaagaacaaaaatcttggaaaaatagaatatgcctgctttttaatgccctgttggttatgtgcagaattactcaacagaaatcccaaggaactaaatccctgcagtcctacaacaacatgaagggtctcgagggaatccatcgggtttcaaaatatgtgagagtctcaaagaatgtaaagcaaatgaaaatcgcatccaataatggtgacacctacatttatgtagtgtttcattgcttaccaggcattttgacctataacacttcacttgcttcctctaatactcctctgaggtgtgcagggcagttattattaaccttattttacagatgaaaaaactgaggctaagcaactgcctaaggtcaccaggacagaaggcaggagggcagggactccgaatcctaggttttctcaccaagagttttgcatcccaccttgttgattggtcctgtgttcaaaatgaggatttccttctatcttccttccctcttccttctggattcactgttggtatttttacttgttgctgggaaatttcgttagctgcctggaattccatttttaaagggctgccctgcccactgatttgtgaggtaccaccttcccccaaaattactgaagcgccaattgtctcaaactgagtctgatttctagtttactcagaaacttaagataggagaagcaacatacagtttcagaggcaaaagtaaacttagaaatgaagtcgtatccagaggctcaaagagtgagtgacttgcttcaaatcacagggtaagttacagcagcaacactcaggctggctgaaacctctatcaacattctcagatttttcgcaagagcccatgcattttgcaaacttgagagattgcttttttttccctattggtccagaggtcaccttttttccccctctactgaaagtttctcatctattgcctaagaaaatgagtcagtatccctaaagatttctgaaaaatcatcatagttggataggaataatcagccagtaagatatttcatgagactgtctcaaccccagtctccattctcttctcctcaccatcactacccaatcagcctgactctattcacaaaatttctagaatgggaactgcctcaatttagaaaaaaaagaaaaaattcacacacacacacacacacacacacacacacacacacactttttgccttagttcttgccctgcataaaaagtcctgcaagcataggatagcatgatcttctgatgcaacatattagctgtcatacattagtaaaaccatacattagacatggagaagcagaaggcctaggccaaagttaagatgctacacattccagttagaaattcagtgaaaggcaactttaaagtgagggtgggggtgtgggtgacaataggccagttcatgaagactatgaatatctagtaaggaattaccgaggttatctcctgcatggctgataacaattagatgtggagatgagggctgaagtcatctcaccagggattgctggcatattctgggaagtctaagcctctttccaacagcattcaagaaaacatgggcttgaagtcatcaggaaaaccacaatgaaggaagctttaaggaatgggagttgggaaaccaaccatggtgggaaggatgaaatggggaagtttttgttgtaattgttgttgaagaagaaagtgacaaaataaagttaccaatcttacagtatcatgtgattagcaggggaactttaccaccctctacacagaaaaaatacccatctatgcatggtctaggaagggttttgcaaactactgccctagtcctctgtttttgtaagtaaagttttactagaacacagacagatccattatttatgtaagatctatagctgctttcatatggagtatttgtgacagaaagaacagcctccaaagccaaaaacaatttttttactacttaaaagaaaatttagagtttacagatccttattgtagaaagattactgtggaggggggaaaaacccacttcccaataactgatagtgagaatttaagagtaagctgggtgcagcggcatgcacctgtagtcccagctactggggagggtgaggcaggagatttgcttgagcccagctgcctctaaatagccactgcactccagcctgggcaacacggcaagatcctgtctcaaaaacaaacaaacaaacaaaggaaaccaggaaaacacagacatacatgtacatagtaatacacacataccctatgtatgaattgttgttgttaatagtgtcagtaccatagaaataaaattcctgatttcatccatcttcacagatcatggaagggtccacatcataccccacaagactgtttctgaatacatcaggggtatccatgcaaaagttaatcaaaggacaaagcctttattctgtctgagcttagtttcttcatccataaaatgtgagtctggatcatctaaggaattttagaaatgctatgactctacagataaggaataaggagcaaagcgaatacacaatgtatgcacatgcatacacacacacacacacacacacacacacacacacacacacaccccaatataccccagggtaggaagagaagggtagaagaatcaaggacacagcagattgcaggtatgaccaagttggagtacataaatgtttttttttttttttgagatggagtctcgctcttgttgcccagactggagagcagcgccatgatctcagctcactgcaacctccgcccccgggttcaagccattctcctgcctcagcctccccagtagctgggattacaagcgcctgccaccacgcctcgctaattttttgtgttttcagtagagacgaggtttcactatattggccaggctggtctcgaactcctgacctcgtgatccatccgccttggcctcccaaagtgctgggattacaggcttgagccaccgcacccggcctattttggactttcaaagtagcttgaggggcaaatatgtaagccacccagaaacatgcatgtacttcatttctcattctgggaatcaaaagagcttgacttacttctttggcccatcaagtgtgtctcttttttgcactgacaacacgtatgtggccacgatgacaccttcaaggaatggaggctccctgcctctccaatagcagccccaaaactgggagattttcaattgatgacttttcttcaaataagattgcttttcagccttttccactgttcttttcaaaagcagacccatcagcttgtttttcaaaggtgagagagagataaagacagactaaaaatgatcctctgtagcctagttagttgggcttttgtgctgatccagaatggtgaccaactaagatgttagtgatttcatggtaaagcaaggactcacggactccgggtaatcagctgacttcataaaataagccaggaaaggtaaagactttcctaaaccggaaacaaatatatgcttttgctgctagggaaatgtacatagtttgacttgtaggttatgaatctttaaaactcctaccctaagtcccatcatacctcgtttgtgagtactatcttttatttatcgtgctaagcaattgttctttgttgactggagcagtgttctatgtgagcaaagcaggtgagacacagacacaggaacacaaaataccactcagggagcaaaggacattttctcaacagagctaatcactcttgaagcaaaataatccactctccccagttattaaaataacgaaagtaactgtggcaacttcaaaaggactaactcattaatcagtgaagctgggtgaataatttcctcaagaaacacaaggtaccagaaatattttatccaaatacatttttgttggtcagaatagggttcaagcctgttacataatcctaagaaaacacagaaggtatttccctcatcctgtcagtgtgtgacagctgtttggggcacctggagaaagtctacagtttaagtcttcgggttccatgttcccaaacacaagggcaataaaggggaccatgtcaaactcaaaatagctgcttttcagttgtctataaaataccagttgcaaccaccactacttacttgcaatttattatgtgcagccttattaataaacccagatttccgcgttcttagaagcaatacttccatccccctgaccagtcaaaggagacagcaatcagaaaagttttctgtgctggaggtatggttcagatccttcaggaccctaatgccttagctttattgcctatagcatgctgcaaacgtcaccaccagaggcactgccgaatttctgctatttctggataaaacaaaggcctgctggctgggcctggtggcatgtgcctgtagcttcacctacttgagaggctcgggtgggaggattgcttgagcccaggagttcaaggctgcagtgagctatgattggactactgtactactccagccagggcaacagagcaagaggctatctcaaaaaaaaaaaaaaaaaaaaaaaaaaaagagccggggggcgggtgcggtggctcacgcctataatcccagcactttgggaggctgatgtgggcagacagcttgaggtcaggagttcaagaccagcctggccaacatcgtgaaaccccatctctactaaaaatacaaaaaattagccgggtgtggtggtgggcgcctgtagtcccagctactaaggagtttgaggcaagaggatcaatggaacctgggaggcggaggttgcagtgagccgagatcgtgccactgcactccagcctgggcaacagagcaaggcttgtctcaaaaacaaaaacaaatgaaaaaaaggaagaaagaaaacaaaggccttccaatcaaagtgttttagaaacagatggaatcaggctaacttcggtctgacggtgccaggcttgggtgttcactggaaggacacactgcaacaggtgtgaagcaggactctctcccgttgaaatgaaatgaaaccaacctaagttacaaggcgcagttgcttaagagtaaaattaggtacatctgctacaaataagggctccatctgaaaataggagagggtggaaatggaaaagctgctgtctatgggaatacttagtatttgctttctgaactcagcaagaaaagttgggttgaagtggaatgattctgaatgacaaaacatttcaggaaactcaatggggaaggagagcaggcaaaatgggagaaatcctttcagaatgaactgatcatcaccacaataaacaaacacagtaagagatgcttgagagctctgatgaagagctcaggctctggagtcgggcagatgtagggtgaaatctgggcttgtccagtcgtaagctgtgtgaacgagcgtgggcagctaattaagtttcttcctgtgtagaacaagtattttaaaagtacttagctcacagggtgcttgtgagaaggaactgtactaacacaggtacagtactaagcatgagtatggagagcagaggctttccataaattttccattgctattattattacttctactactcttactactaataatactgatagtttattttcttttctttctttctttttttttttttttttttgagaaagggtctcgctctgttgcccaagctggagggcagtggtgcgatcatggttcactgcagccttgacctcccaggctcacctttcatctcagccttcctagtatctgggaccacaggcatgtgccaccacacctggctattttttatttttagtaaagatgaggtctcgctatgttgcccaggctggtcttgaactcctgggttcaagaaatcatcctgcctcggcctcccaaagtgctgggatttacaggtgtgagccaccacacccagtcagtctttttttttttttttttgagagagtcttgctctgtcaccaggctggaatgcagtggcgcgatctcagctccctgcaacctccgcctcccgggttcaagcaattcccctgcctcagtctcccaagtagctgggattacaggcacgtaccaccacacctggctaatttgtttgtattttagtagaggcggggtttcaccatgttggccaagatggtctcagtctcctgacctcgtaatccacccgcttcggtctctcaaagtgctgggatgagaggcgtgagccatcgcgcccggccagtaatttctaacccataaacatctttgacagctgggtgcagtggctcactcatgcctgtaatcactgcatttgggaggccaaggcaggtggatcacttgaggccaggagcttgagaccagcctggtcaatgtggtgacaccttgcctctactaaaaatacaaaaattggccgggtgcggtgtctcaagcctgtaatcccagcactttgggaggccgaggcaggcggatcacgaggtcaggagatcgagaccatcctggctaacatggtgaaaccctgtctctactaaaaatacaaaaaaattagccaggcaaggtggcaggcgcctgtagtcccagctacttgggaggctgaagcaggagaatggcaggaacctgggaggcggagcttgcagtgagccaagatcgcaccactgcactgcagcctgggcgacagagcgagactccaactcaaaaacaaaaaacaaacaaacaaaaaaaaaacaaaaattatctgggtgtggtggtgcatgcctgtaatcccagctacttgagaggctaaggcatgagaatcatttgaccctgggaggcactctgtctaaaaaaaaaaaaaaaaaattgacaagatgttcaggattttcaataaaaggaagaaatatactcatttattgaaactaggatggcctacctattttaccatgttggaagtttcctcttaacaatcttttttttttttttttttgagacggagtcactttctgtcacccaggctgagtagcacaacctcagctcactgcaacctccgcctcccgggttcaagcgattctcctgcctcagcctcccgagtagctgggattacaggtgcctgccaccacgcccagctaatttttttgtatttttagtagagacaggtttttgaactcctgagttcaagtgatccacctgcctcggcctctcaaagtgctgggattacaggtgtgagccactacacaagtcttaacaataactgtttaagaattgtgcctaaatatggaattacctggcacagctggaagaagatgaagaggggaggagttagaaaaacattagcccatgaatgatgccacttgaaaccaagaacatgaattttcccttaaaactgtaaacacacaaaatgtgaaattaaaattaagatgaaaatgtgaaacaccatgtaagagaattaaccctcacaattctcactcatcagcaacattactgctagctcttttctcatctataatgttcgatggtggcaatgagaatacaaatacataaaatgagaagacatgatttttacaagaaagggaaaacagggtatccactgaaatgttaacagttgttacctccattaaacaggattgcaagcgatatagcttttttctctgtttgctttcttagttgcatcttctaatttttctacaacgaatgtgtcattaattgtgccgttgaaaattcaaaattatttgctattcaatttccaattgaaaacatctgaattgcacccaagcattacacagagccagtgctgaggatttcactcagctctggcacatgggatattttgtaggcactggtggagtgaagtgactgtctcgccacctcttccagcacactcagcaaccattctctaattatgccatagtctctctgccaatattttatgggagttttacaagatgcacctacagctacttatactcagaaatcggaagaccttctaaagttcttgcttaaaaaaaaaacccacctttttgtttttcttgttcttgattctttagaaacttcctcagccttccagaaatcaacacgggccacaagaatcatgtattatttcagactagaacctaaaaaagagactcaccaggtaacagcctaggaagctactgattatatgtagtatataattatttgctgtcttggttctaggtactaatcccatggaaaatatagaaagacggcagcaaggaacattgagacatgaaagtctttgccacgtgtaaaatcgtagatgttttaaaaaaaaatgcaggcacaagaatttagcaagaaaaaaaaatagacatgccaataaaaaagctgcttcttaaaatctggctggcagtgtccttcctctccccaaaggatactcttagtaaagaaaacatggtagatttttttctcccttgcctgtatttgatttccaattaaaattaaatataaactgaaacgccacctggatttcagcaaaatccaatccccgccctccacccttccttttttaaaaagaagaacctgggcttacatatacaaacattttgctaaatgacccgtggcaaattgcgtaatgccagtaaaagttgtgttttttaagttatgagccccaaagattttatctgaaataaaaccctgattcaattcagattctggaggcaaactgtgtccttaactctgcgtctaaatttaaaacatttgtgtgtggggccccttcagtaacgttgctagtaggtatggtggagaaattctgtattgattaggatatgtgttttcttttctaaaatggtaaattggggcactaattgcccacaagaaccggttccctgcagtctccaagtagaggtcagtttctaaatgaaggtttgcctgtcaaataagaattcgtactgagttccatttatcgcctcaatgaggaaagacagaactgtacttccatggagaagggttctccttggaggtctccaacagccatatctacaatgacccaagatgattggattttaatataaagcggatgaggtgggctaaaaaatggaacggttctaagaacaacttgattccctcctgacctccacctttgggtccccaagacctcaaccatggcttttcccagtcttcaaaagattctaagaaaggacaataataaagtaaggagcacgttttaaagggttggctattgtgccaaggtcaataaattatttagcatattcatcacatcgaccctctcaggaagttatctctattgccctgttttacagatgagaaaagtgaggctgtgagagatggcaaaacttgcccaacttcactcatcgagtgtaggcgctggtgggtgggttttcaactctcatcagtggcattccaaaatgcctccaataaaatattcctcctgccctttccagctccccagggcagtttaaatcagtctctagcagaaacaacatgaaatggggtaagcaacgaagtgtatctgtaatgactgtggacatgcgacatgattaagcccacacagactgggaagaaacttagaagtggggagcagtggtggaaatttaaagaaaacaaatgtggccgggcgcggtggctcacgcctgtaatcccaacactttgagaggctgaggaggacggatgatgaggtcaggagatcaagactatcctggctaacatggtgaaaccctatctctactaaaaaaatacaaaaaaattagccaggcatggtggtgggtgcctgtagtcccagctactcaggaggctgaggcaggagaatggcgtgaacctgggaggcagagcttgcagtgagccgagatcgcgccactgcactccagcctgggtgacagagcgagactccatctcaaaaaaaagaaaaaaaagaaaaaaaaagaaaaagaaaacaaatgtggttttttaaaaatccatactctttttattgacaggaaagtgatttttgtcacaaaatgttagataatgagtagtggttgtcaaatttgatggtggaagcacctagaagtgaggcagagatctccctgtggagagataacaccagggagcagctaagtggtagcggaaaacttaaagacattatgggagaaaatccttgtacctgcacaaattgtattcccttattcctatgcaaaaaataaatcttgttcaaggtgcaggtattctctgccatttatatatatcatttttatatatctcacaagagttttccaacagtgtgaatgtgaattaaattaaaaataactgttcatttttattataaaggcaatacatgttattgtagaaatttggggatatacagaaaagtgtaaactatatatatgtgtgtgtgtgtgtgtgtgtgtgtgtgtgtatatatgtatatattcttttttttttttttttagtagagacagggtcttgctgtcaccagtcatggctcactgcagtctcagcctcctggggctcaagtgattctcccacctcagcctcctgagtagctgggactacaggcaagtgccgccatgcccagctaagtttgttgttgttgttgtttttcttaatttttagtagatacgaggtctaagctgcccagactgatctcgaactcctgagctcaggtgatcttccagccttagcctcccaaagtgcaggaattacaggcatgagccgccatgcctggcttaatgtatataaaataaactataatcccattaacagacccccccaaaaaaaaccattgacagcatgttgcttttaggtttttcccccagcaatcattacattatgataatttttaaagtaattaaatgttctacattttaatgggtatataattaatattatatcaaacttatatgttagcattttttaaccttcttctaaggttagagatttagggtgcatttaatttttcatattgtaaataccattacaatgaacatccttaggcataaatctttctgcatgcctcacattatttcggtaggttaaattcctggtgatgatgatcatggcggtggtggtgatgatgataagaataccaaaagttggccatgcatggaggctcatgcctgtaatcccagcactttgggaggccgaggcgggtggatcatttgaggtctggagttcaagaccagcctggccaacatggtgaaaacctgtctctactaaaaatacaaaaaaacattagctgggcaatagtggcgcgagcctgcaatcccagctactcaggaggctgagggaggagaatcgcttgaacccaggaggcggaggttgcagtgagccgagatggccccactgcactgcagtctgggcgacagagtaacaccctgtctcaaaaacaaaacaaaacaaaaaaaacccaaaagctaatgtttgcagacaatttaccatgtggtgtgcaaacttccaagcatgatacattttatttagactattaaatgctaaaattatttccgtttgatggatatataaactgaggcacagagaaacttacacagtcacccaactagcaagtggcagagccatgactcaggccaaacatactgactccacagtctatgctgttaaactctgccagtggttcttcaactggcagcaaagaagagctagaaatagatatgcaaatttggaggccctgccccagatctacagaataaagtactttaggggtgggtccagtaatctatgttttaagaagccctccagcgcctggcgtggtggctcacgtctgtaatcccagcactttgggaggccgaggtgggaagatcacctgaggttgggacttcgagaccagcctgaccaacatggagaaaccctgtctctactaaaaataaaaaattagcccggcgaggtggtgcatgcctgtaatcctagctacttgagaggctgaggcaggagaatcacttgaacctgggaggcggaggttgtggtaagctgagatcacgccattgcactccagcctgggcaacaagagcaagactgtctcaaaaacaaacaaacaaacaaaaaagcccttcagatgatgctcacgcacataaaagtttgagaaccactgctgactgccatagagccactcagtaaaattgtatccctgattcaaagggtgtggctgttttaagcctcttgatgtccaatgccaaaataccctcagaatagggtgtacaaatttacactgccttcagccctataaggggttgtctgtgcacttactgtaatctgtgctcatttagtcaaagatctttcaactggtttatagggttctgtagttagaagaatttcaagagtgtgtaaatctggtgtttacatttcaatagacatgaaatggctcttggtacagattgctttatatgaccttactttccagagtttgcttcagagctggcgtgtacagtgctacattttaaatacctgagaaattattccagggacatactgggaagcattcttccaaaagaggaacccttttccaaattaaagatagacaggtcactaacatagttaacatcaactaatcatagaaaagcctaagagtatttgtcaaaagattgaaacatttggcaaatctaattaacatacagaatagctgtgtaacgtttttttttttggggggggcatattgtagatgaaattgcaatcgcaaaattacacatacaaacacacttttcagggaaaaagttatttgggtttcatcaaattcacaaaggaggggccataaacctgcaaaacataaaaatgatggtattagaggctgggtgtggtggctcacgcctgtaatcctagcactttgggaggccaaggcaggcggatcacctgaggtcaggagttccagatcagcctggccaatatgatgaaaccccatctctactaaaaatacaaaaattagccaggtgtggtggcagtagcctgtaatcccagctactcaggaggctgaggcacaagaattgcttgaacacgggaggcagaggttgcagtgagccgagatcaagccattgcactctagactggatgacagaccacgactccgtctcaaaaaaaaaaagtattagaaacatgaactatgccagtacagatttttgcaaattgtgagatataagtgatccaattacaaacttaaaaacagaatcaagaaagtaagaagggaaagaagaaaagttggaagggagaaaatacaagggcaacaccatctcttcagaaatcctgtcagttcataaacaactaaattgagcaaatgccttcgaatttggcaactatttttaaattaggtattatggtttcagttatttcagctccattatcaatagaggtaaattagctaaaattcaatataaacgtttgtgaaatatggacaacaccaactaaattatcacacttgtcagcccacatctaatctctggaaatcgtacaatcaactttgcacctgggtagacagatagtcccaggccatttcctggagaccaataagctcagatgctacagtatggtataagaagacctctcctcaccatgtgcctctagtctttccaagtgcaaatccaaacttacttgtctcaaaatttaaaatggcaaaatggaaaagacacagctttggggcctttaaaatctctaagtcagaagccaaacccatatagttcagtgtatacttaccatccattatctcctgatggaagaggttaaaacaaatcagcagatgtgcacatactgagactctttcctaacttcaccaaggtctagaatcccaccaacatagacacagattcatcctctcctggctactgaagatttattacctaaatcactcacctatcaattagtcatatacatctcttctacagtttatcttcaatttgctttaaaaattgtaagaacttttcatgttatctgtttatgtcttactgcacctttactaaattatgaaatctttgaatgcagggtgatactgagaataatatatttttatatcctctagccaactataggactatgaacataagataggttatgtttttatgttaattttctttggcatggagccagggccaaggacatctgtctgctctgtgagtgactcactaagtgagtccaacctccatttccttactagactggctgaagattcttttaaccaccaataacgtcaaaacttttatcttgtaagatgctgtcagctgaatgattagaaaggaactctagaggaatgatgacaattagaagtaattttgccactccagaaattgtgaaacaaagtcttaaacaatagtatacctatggccaggtgcggtggctcacgcctgtaatcccagcactttgggaagccgaggcaggcggatcacgaggtcaagagatcgagaccatcctggccaacatggtgaaactccgtttctactaaaaatacaaaaattagctgggtgtggtggcgcaagcctgtagtcccagctacttgggaggctgagacaggagaatctcttgaacccgggaggtggaggttgcagtgagctgagacagggccactgtactccagcctggcaacagagcaagactccgtctcaaacgaacaaacaaacaaacaaatatatatagtataaataaatagatatttttcagagagaatttagaaaagagtgacgaatgcttcctcagttttgtcactgtaaagtaagggtagaagtctgtagaaggcaaatcttgtcacatctgccattcattaatccagagattgacaaactttctgcagagtgtcagattaatatcttaggctttgtgagccacacaatctctgttgcaacaactcacctctgctgctgcagcatgaacgcagttataggcaacagtaggcaagcgggtgtggctgtgtttcaacagaacttttatttactaggtggcaggctggatctggcccaagggccagtttgctgattcctggtgtagtctgcagagttatagtgccttatacctagcccctactcaaagaaggtactgaatgaacagctgagacaagtttaaaattatgtacagaatgcaatcttgacaattacaattgtgaatcactacattacagaatataatcttgataattataactgtgaatgtcacatactcagcttatgcgtgatgcttttcctgtcccaagaacctattaatgggctgggggtggtggcttacacctataatcccagcactttgggaggctgaggcgggtggatcacctgaggtcaggagtttgagaccagcttggacaacatggtgaaaccctgtctctactaaaaatacaaaattgtgggcatggtggcgcacatctgaaatcccagctactagggaagctgaggcaggagaatcacttgaacctgggaggcaaaggctgcagtgagctgagatcgcaccattgcactccagcctgggcgacaagagtgaaactccatctcaaaaaacaaaaaaactactaatgatacagtaagtctatataaatacatgtgatatatacatatagcacacagcacaaaactttgtgtttataagaaatagaaattgaatgagaaaaatcagaatataatcataaaaatacacactgtaaatgcattttcacttaatgcttttggatgttgaattcctactgagttgaaatggaaatatcatccataggaagaaaaaaatgaggaaaggtaagcaatattatcacagtattatttatcatacacattaggactaaaaatagtcaggaaagaaagagcattatgtcattctctcccagtctttaaccttgtaaaaggttgttgagtttgtaaagggtatatcaagagtgaatacaggaggctataaagagaactacttcgtatcatgcagccctgaaaaattaacacttaataattataataataaaaagtcacttttgccctgctttaggatgctacctcttattttgttaattttttccaaaaatattccttcctttggctctgagaggcatgactctgctgttgaaaagcaaaagacattttacgcacaattttccctctactaggaagaggtatattgtgcccttcagtgaacataaaattgatattatcatctcttagtttatatctcactacttaaccttcagattaaaagttattggatttgaatgactaagaagacatcatgtcaccttcccttcaatgtggagagaccgaagttgaagatgagacaaggtaatgtgataaaaacacgaatgtaggatcagtggatgctttgcctctttttttctttattttttttttccttttttttttttgagatggactctcgctcttgtagcccaggctggagtgcagtggcacaatctcggctcactgcaacctctgcctcccaggttcaagtgattctcctgcctcagcctcctgagtagtagctgggatcacaggtggatgccaacacgcccggctaatttttgtactttcagtagagatggggtttcgccatgttggctaggctggtctcgaactcctgacctcaggtgatccgcccacctcgccctccaaaggggattacaggcgtgagccaccagctgctttgtctcttttaataggtggctgtgatactgacaactcagttgtgtttgtgtggataataaattctgaaattaatggtctacctgaagaaactttgctgaagattaatatgtgttaggaagttcattttatttttggtacagtcaaaaaggagctgtctaacaatagggataaaatagttaattcaaggggaacacagggttaccaaccttaaaaaaaaatccaatatcctccacagttggtatctgcactatcagtttatgcagaagatcctgcaaaatgtccacatggaaggactaaagagaaaaacagagcttgcttcctgccttccctctctgggcatggctaaatttaaatacacaaagaagactgggcctttatgtccccaggcagtttaatctatacctcctaaatgagtcttccaatagcaccagctgtttaataattgcacattgtacttttccaacaaaagaaacacaacatacgctcccccaccaccttaaaaacaaagtcattataagaagcttgtgtcaatatggaacaaagactttatcaaagatctaacttcatagttttgttctctcaaagagataagcccattccatgatcaatgggaacacaagcattttatcagtacttcccatgtgacttttggaagatgtattcattagtaactgtcaaaggctaaatggaaaatacttgataattttaacacaaataaacatatgcaatcaaaatagtgagttttagctacacagaatgtctttctgtagaagtctttttaaaaaatgactttttcaaaataagcccatcctttattataagttcttaacctcctagtggcagctaagaaaggagttcaggttcttccccatgcctctctctttctgtttcattggtgcccccattttgccagtcattaagatggaacatcctgactcatcattggtaactcccactccttggtatttgcatacctcataattcaaaaggtcctgtttttcccaacactcccctcaacaatctcttcttatccagtccttcctttctctttctgtgtcactcattcataaatagtctgtcacagaactgccctacatcaggtactgtgctgtgtgctgtggaagtaccaggtaatgaggaaggtgatcccggcccccattccctgatggaacctagacttcactaagggattcagatggaggaggagatgttcaagaagccaggagggatcaacaacagggtgccctcaattcactggggccacgttagtggccgattactaaatgtcagaccaactgcagtagcgctgtcatggccactcatctctccgggatttcttcccttccaagccagctaggttcaaccttctcatttacttttaatacaccacctcttatatgatctttcttctctacttagaaccctcccataagccgaacccaatctgccttttcaccatcttcccatcttcctactgcctccatagttattcttcgggatctagctaagtaaactctaagttattctcccatgttttcctagcacctaacatatcagttccccctccacccccattttcttccacatacggaggctcaataaataatagttaaatgaggctgggtgtggtggcacatgtctgtaatcctggcactttgggaggctgaggcaggaggatcgcttgagcccaggagttcaagaccagcctaggcaatatagtgagacccatatctctacaggaaaacaaaaagaaaaacaacaacaaaaaaaaaacagctggcctgccgtcccagcaactcagaagcctgatggtgggagaatcgcttgagcccggggaggtaaagccttcagtaagccatgtaagccatgatcgcaaccctgtactctctgtactctaacctgggtgaccgagctagaccccatctccaaaaaaaaaaaaaaaaaaaaaaagaaaaagttaaatgaaaatatgcaaatgatcaaagaaataaattgcagctgttttctagtggagctcacttatgagcccacttgcaacaaagctgagacaaggtcagtatgggaaactcttcatgacattttcttgtcggcaggggaggggagataatgtggctctatttttatgaatcaaatcaaacacagtatttagcaaagggtctctggaatgttacaagtaacacttcataattacaatagatttgagttcaaagacaaagtgatgaaaagaaactttctaacatggggttcaattccctacataaacttccttcttgtggctcagtgtaccactggcatttatattgctattcttctttgtcataaaagcagtcaccttgtaaccctttttatcaagtaatctatgcactacctaaaagtacactagactccatcaggcgagctataggtttacattatataaacattccaattctgcctgctcagcactagttgttgataaacgcaagccattgcaaaacagcaaagtaggttccttgccttcagagagcagataggacctgccagttctgcaaaaacaaactcttggcaatcactgaaactaatctgtcaacaaattaccattaaagtcatacctcctgaaagttcaaaaacagacttgtgagtagacaagagatagggcgttctttttttatgattatttttattagctcaccggtcagggcttaaaattatcttttcaaagtggcaaagctttctcttgaagtcaagagggtacacttcactcataatgaaatgtggcacctggctttctattaccacattctcctctgttacaggtcttttttcttcttttgcttcttgtgccattttaattttcaatggagagattaatgacacataactgtttagtaatcaaaacttgaaagaatttcatacaaggctcaaatcacaagttacataaatctttgacaacaatattttgatggaaggcaggtctaaactaacagagtagagaactaaatttagcattcagggtgaaatatgccttttctagaaacagccccaaagggaattaagaacatgttggggggtcagtgttgtggctgctttttctttatttgtcagaattatctgaatcctgtctcagttttgtttcaatttgtttgtacggttatcactaacattttggtggcattgattcctacacaaaatatttttgaccatcaatacttttcacgttatttgaactatgcaaggtcttcaataaaagtgtatctcagcatagcaattcctttaaaattacagctgggtttttacctactagcaagggaaggtgctagcccccagcacagtacctggccccatgaaagcattcaataaatactaataataccttcttctatgccccctttctggaagttccccttctaggacacagaggtgctgatcagcttttccctgtcagcatcaagagaccctcctttcagacacagtcagtctccagcagctacaacgggaaaggccaattgagggcatttctaacaaagttcataagccacctttttcaaagaaaaaagtggtagaatggtacggccaatccagccattgctacccagtctttacacctatagatccataccatataacctgcgtcatttcccataaggtatgaaacaaggccaggaatggcctctggaattttaatatggtgccccagaggcctatgggtaaaaatgagatccaaagaatgagatgcaataagcaccttcatccagtggtggttgctgccagtacagacaccaacagctatttcttgcaggcattgtttctcacagaggcagttaaaaagctggaaatgtttgtgagacagctttcttcttctactcaatgtccaccagcaatttcactaacaaaaactaatgaagggatggattttgccattttgaatgtgaagaaaataattttcatttgcttgtgtattttttgtttcttgaaacagggtctcaatctgtcacccagcccaggctggagtgcagtggcaagatctcagttcactgcggcctcgacctcccatgctcaagggatcctcccacctcagcctcatgagtagctgggaccacaggcatgtgccatcacccctagataacttttgcattttttgtagagacgaggttttgccatgctgcccaggctagtctcaaactcctcagctcaaggaatctgcccgccttgccctcccaaaatggtgggattacaggcatgagacactgcacgcagcctgcttgtatatttctttatgctgaaaagaaaaaagtatttctaccctcctcccccacttaaaacactgatactatggtccctcaaataccatttcccatgttcagaggaccctgggatatcaattcctgattctctcaggttcctctggcactgtattttctacatcccctttgtttgttgttgttgttgttgttgtttatttgtgttttttttttgagacggagtcttgctctgttgcccaggctggagtgcagtggtgggatctcggctcactgcaagctccgcctcccaggttcacgccattctcctacctcagcctccagagtagctgggactgcaggcgcccaccaccacacccggctaattttttgtattttttagtagaggcggggtttcaccatgttagccaggatggtctcaatctcctgacctcgtgatctgccctcctcagcctcccaaagtgctgggattacaggcgtgagccactgcgcccagccgttatttgttttttttttttagacatattctcactttgtcgcccaggctggagtgcagtggtgcaaccttggctcactgcaacctctgcctcccaggttcaagtgattctcctgcctcagcctcctgagtagctgggactacaatcgtgcaccaccatgcccagctaatttttgtatttttagtagagatggggttttgccatgttggccaggctggtctccaactcctggccccaagtgatcagcccgcctcggcctccctaagtgctgggattacaggcatgagccaccacagacagcctctacatcccctttgaatgtacataactagactctttgcctgagtcccacccatttctctgagcttcttgcgttctgggaaatgactaatctttgacctccttcaatggttcattggaaaaattcaacccgatgggtcctctttactccccttcttctttttcaagagaagttccctatctaccgttcccacctccttgctagtcatttcacattttctctccttcttttacattgttaacttaaaacatactcactgtcttctgggccacaagacccaacaccttaaaccagatgtcaaagaaagaagccacgggaagtaaacactttgcttatccacactttctaaataatacatgttcaaattctaaatatggcatatcttaaaagttttttctcacagattccctctaaactgctctcttcatataaaatgatagccacacctcagaactgcagcaaccaaagctctctctatactgacttgcagacaataaaactgccaggtggtaccaaaaaaaaaaaaaaaagaaagaaagaaaccccacaaaaacctcatcattaaatggaatgttgttaagaaatagctgttttatttaacagctattcatttttattgaataaacattttctagtatgcattctgttaattgacctgacagcatatgctgtatatggagaaacttctaaacattatgctctatgtaatatgcttatctgaaaaagctctcatttgcagcaatatggaaataaaattctgctttctaaaattcaagacttttaaaatgcattaatccacacagtttatgaaattgttctggacattttaaaatcctttctttaaggaaaaaaaaaactttagtaattgctaatagtatttgttgctgagtttcataatggagcagtgcacatccaatacaacttttacagacatagaaatggtgcagggataataggaaataaaaagcagttatggtatcgggtaaagaattactcaacagataaaagaaaatgttcagaaactctatcaaattatattattagaaaactattgttataatagtttcatggctcagacataaatagagttgaaacattacagagataatacatttagtcttgaggaagaaagacagtttgtgagtgtgttggcgggctctaccagctaatggcagcacctctcttgggctgatggcttctgagtgatgagtctaccttccagcccagaatcgccaactccgctacctagaggcataaatgagcaatgctgctggtgggaacgagagcaggctggagggctccctgtcttcaatagcaattcatctcccaacaattgttgccgttgtgggactatcagcccaaggttaccagatattctaatttttcaaaagaagatggaaaagccagatttgccccatttctctaggttgtcaactaactaatttttagaaatgacaataccatttgaacgcaattaagccaacctataaacaaaactcactatggaactagtgcactccatagtgaatctttgtcagggccctcccattctgaaaacggcatttgctgtaatttgtaattatctttgataatatgaagcaaacatggaaaggtttgcatttatttattttatatcctggcactgagtaaaaactctccccgtatcctcaatgatggtattggtgcaactggaaaatcctccaacattcaatataacacacagcgtaattaactcgtttttataccaggcccttttaagccagatctttgtgttccatggacttctaacatattttacagttctaattctcttccactgtcctacattaatcaaagctgtaacccctgttgtctttgtactacggaatctgaatgtgcccctggcgaggaatgggggaaaagtcaacaggaattaaatttcagtgcaactgtttactcaactgtggcctgcagttattgaaattttatccgtggttttgtgtgactaccgcagtaatgaattcagcatggctatgattttctcactgctggtattctcacttcaagtaaaaacctgtagaataaaaatgatgaaaacaaccatagtccattgtagaatgctcacatttctccaaactgtctaattgtcgcagttttcagtctggaagaaaactctgataactctagtcctgtagaaatattttcaggcctgtagtttttcttatttcatctacagatttcccttttccccaacaacctgttaaaagccttatcatatacttaggggagttgaacagctgtcaatgttatattttaaaagacttcaaaaggctttgctaatcacaatacagggggttttagccacagtgatagaccccactgctttgtttcttcccaaaatgtgtcaacgacatacggagaaaaaactgtcataaaaacatttaaaaacagtataaaagtctaatcataatacatttcttgacctttgtgtcaataacccataacaacaaattttccaaagtggacacagccaaaggaagatgtggataaatatgtttgcaactgatactttttaaggaagatgttggtgaaatatgcttttataattttattctatgtagccaatttgttatcactgttgtgtgtgtgggcgcatgtgtgtgtgcacatgttttgatggtttatatgtaaagttttttggctggcttactactttgagatcctgaatgatttttagctcctcaaaaaaaatcagaatttcccatttatgtaattaatgtactctaaatattaattatttagtatcacatcagtcagtagtagccccatatcaagtgctcaagtgcttcataaagaaatgggcaatcttgacacttgtctggtaagggcacagaagatagcattcagcaacattaactatttgttctgaataaaatggctgagaacatcacatgaacatgtacttgcacaaatacacggagacccttttactatctactgctgggttttgctaacaacctcactggttggaatttggccatctgcactaacttaaatgcacaaagtttatacacaacaagcatcacaaattccagctgaagtgagccagtggtgcaggcacaaatgggtttgggctgccaatgaaagaaagatcaaatcacttgcaggaagtcctctgaattaagacttttgctggtctgttacttttcctttctttcgctttgttgcatctttctcccaacaggttccacaggctcatgttggttccaccaccttgtaaggagctaacagtctaatcattccttattccttaaaaaactcttcgcaaggagaaaataaaacatgctttatagcttgtctccaagttgcatcccaaacaagcttagcttctctgacacagattccaagaaaatggtttgagcactttgtccctatcttcttcctccccacaagagttcctgcagctttcagaaaggcccaaagatacttcattctttttaattcacctgtttctgagtggcgccataactatgttttgaataagtaaatcaagaacaaaaccggtcataaaccatctattattattaacaaagcctaataatatttcctgattccgaggaatcaggaaaggcgggaaaaccaaagccagtcttcaagcaaatgttgtttacttatttgaatatttatcaacactttgacaacagaacactatttcttgggtcgcctgtaccattcggaaatattttaccagtcactcacaggtacccaggtccatacctgtaaaaagtataactaacaggaatgagtacatcccaacttatgtacattttggggaggcaccaataagagctaatttaaagcagtaagacttagccacaaacccagtgctgcatgaatacagggaacatatgtaaatactctatacccccaaatcctactcgtagagggaagcagcttcctacagtgatgcccgtgttctagatgttttggctgttatctcgccatctccgcctgtctttctatgtatttatttcaactctccttactcatctactctttttctctcttttattccttagctcttatttccttcttcacaggcttaagcctgtttttcgtttaatttttatttttgcatgaaagcagtgggaaccatttctccaaagaataattttattcaaaatggggaagggttaggctgacacacaggtccactcatcttcgtctcagcaactgctccccacaaggggacctgcaggacttccaactcccaagggcttgaaattagtctcttaagccaactgctgggactcctagagggctgatggtttatgagatgccactgacagacagaaagacagatggacagacaggtgaacacaaaacactgatcgcgagatcgcgattaagtgtaaaattcagcagtaaaattcgcacccaccacctccacctcccaagactccaaagcccagtacctgttgctgctgctgctgggcgtgggcgaggtcagctgccccgatgtccacggccggcgtctctccgttggaccgcccctcccgaagaccgccgcactctagtaagtggttgctgccgcccgacccattctggatggctgaaccgttactttttgtctcagtcccagattcttgcatcatgactcaaaaacctgatacaaggatttccaagatggggggagggagggggggagaaaaaaaaagcagctgttaaagcagttgttgtgcataaggagaagggccttggtttaaatgttgccaaaatctgtaaacagttgtcattttctttcactcaacttatcccctcattagtgggccatgcccctagtttcgggtctgaaactgtcattcccaattcaagtttcagtagtattgttttaaatatattacttttttacccttagaaaaactagtatttgtaagtaaacctagaattcaagattaaatttttcttttttctttttttttttgagatggagcacggctcagtcgcccaggctggagtgcagcggtgcaatctcggctcactgcaacctccacctcccgggttcaagagattctcctgcctcagcctccgagtagctaggattacaggtgcatgccaccatgcccggctaattttttgtgtatttttagtaaagaaaggggtgtttcaccatgttggttaggctggtctcaaattcctgacctcgtgatccacccgcctcggcctcccaaagtactgggattgcagccactgcgccgggcccaagattaaatttttcttctatctggttcctttgctcaaaaaccagcaagtcatcctatagagcatattaggtataaacattaaattttaacatgtgcaggcactatttgttggtattacactttttttttttttttgagacagagccttgctctgtcgccgaggatgaagtgcagtggcgctatctctgctcactgcctccgcctcccgggctcaagcaattctcctgcttcagactcccaagtagctgggattacagatgcccaccaccaggcccagctaatttttgtatttttagtagagacagggtttcaccatattggccaggctggttttgaactcatgacctcaggtgatgcacccgtctcggcctcccgaagtgctgggattacaggcctcgtgagccatggcacctggcctaaggtactaaaattctaatagaaaaaatatatataggcctgggggcggtggctcacacctgtaatcccagcactttaggaggatgaggcaggtggaacacttaaggtcaggagttcgagaccagtctggccaacatggtgaaaccctgtctctactaacagtagaaaaaaagaaaaaaaaaattagccagtcatggtgacaggtgcctctaatcccagctactcgggaagctgaggcatgagaattgcttgaacctagggggtggaggttgcagtgagccaagatcacgccattgtactccagcctaggtgacagggtgagactccgtctcaaaacaaaagaaaaaaaaatagggtgcaaaatgagtagctagaaaatatcacttagggccaggcgcggtggctcacgcctgtaatcccaggactttgggaggccgaggcgggtggatcacgaggtcaggagttcaagaccagcctggccaatatggtgaaaccctgcctctactaaaaatacaaaaattagctggacatggtggtgtgtacctgtaatcccagctactcaggaggctaaggcaggagaattgcttgaaccgggacctgggaggcggaggttgcagtgagctgagatcgcaccactgcactccagcctgagctacagagcgagactccatctcacaaaaaaaaaaaaaaaaaaaaaagagagaaaatatcacttaggtgtaaatacatttcacattcactcttattactctctgggcacaaaaccattatcccagagagccgattcagcacttggctcagaaaagatgttcaaagatgagaaaagacagatagcatttgctaataccaactgctaccatctactgatcaccagtgttgggtcaggcaggccctaatgcaggtgatttacacatattctccaatttagtgctgctgatgattgttacccccagtttgcggatgagaaaactaaggatccacaagttatttagtttgtccactacatgtcacagctagtaatggtggaatcaggatttgaagcagttcagttaagtcaaagccctttaccacaatgtgtatttttaaagttgaggttcagtgggggcaaaacaatgaaaacggcaggctcacactccaagttcacagaccagaatttggaaaaggaaaagcaacaatcattaaaggaagtgaagagttcaaacatgaaagctgagaaatgcctgaataattaagactttaatgtgaaataccaatcccagattaaagggcagaaaatttttaggcaaatgtgttccaattgtggaaggacatatgtacaaccaatgctacagatttctgccccatacatgaaatgtgacaacagggaaatttcaatctttgggtatctttagaggacattgttttcttgctagaaattggatgaagtctgttttctacagacttgcacaaaaaccaaatggaaaaattaaaagcagaaaaattcacatgtttcttcatttcctttcactgtatagcatgatccaacttgatacagactcttcataaacccaaagacgtatatattttttaagttgattcaattcaaaagtggattgagaatggcatttttcactagcaggtgggaaacaaactcagaagtaacagctgattcactctcattttttgatttctattattattttttcattctcatgtcttcagatcagactttctaataactacagtcctttagaaattgcagttatattcttactgtccacagagtaaagcgtctatcaaaaataaccaaaatcttccctaagatataagaatcaggtaacaagataatttgtgacaacatgagtgccttgttcatcaccaaaaaagaaatgaattagtgaaacctaggtacttttccctgggcgtttcagtctctcttccacaaacttgcccctttgtacagaactaaaggaaaagagccgggtgcagtggctcatgcctgtaatcccagcactttgggaggccaaggcaggcagatcacttgaggtcaggagttcgagaccagcctggccaacatggtgaaactgctctctactaaaaatacaaaaaaattagccgggcatggtggcacatgcctgtaatcccagctactcgggaggctgaggcaggagaactgcttgaacccaggaggcagaggttgcagtgagcagacagcatgcaacagagcaaggctctgtctcgaaaaaagggggcggggagagggaaaaaaaaaagaattataggaaaaggcacagtgttaggtatttaagcaagagagcatttgtcttagagtaggtagcaaggaaatccatctaattatcgggatatatctcaaatatatataaagaaaaaatctatagatatagatttaaaaatatgtatatatatagatatttttccttctgggaataccttcccataccagggacttgatccccaaaagacaacaacattgcacatatataaactctatccctgccctaagaatgaggcataaatatttagccaaatatcctgtcctgatggaagagaactgcaggtagaatgctgctttcagactatgtgaccatcgggatcccaggcctgagagcaggtgtctaagagattggtcctgcttttgtttccttggtgagacaccattctggtgggtggagtaagaacagtctccaatacacaatttgatgagaaggccctgtttttgctccatgcagttccaaagcagactgccaagtcctccagtacaagttttgcaggcatcaagccaagcagcttggcttgtgaatcaggtttgtgagagtgcaggctttgggaccaaaattgcagaaaggattattttggtctgaggatgtccttaattagtcaagtgctaacagtagtatgtaggttggaagatttaaaatttcccataatctcccacaccaatcaggagaaaacagctttttgaaaagcacatgtgaaaaaataggagtgtcaatgtctaagaacatttctaacagtgtctgggccagcaatatttctatcaaacgttccaagtcatttaataagcctttatatctgtatcacacttcacaaattgcaaaagccctctgatgtgcttttcaaacttgtaacaaggctaggagggagataaggcaggtaaatgttatccccatttcacagataagaaaactaaagctcaatcggttaagggatagatgtagccataactattctgtttcagacatgaacttgtccattattaagaatctccagtttgtaaagtcctgtgctgggtagtggataatgaaattaatgaaaagaaaactaaggaaattccagaaaagacaacaatgagagtggcaggtggacaaagaaaagcattaaaatacaatgatataagccatctgcactattttgcaaacaactgtctttttcttttgacttttcactattagagtcatctgaaatcaagtcaatatataggagaggaatctatcttctccatcaagggacgttgcaccctcttttcttcgaggaagcttgtctcaggcacccggtatgcataacctctgcttctctctgggggaataactaactctataactaactaactgccttgctccatgacatactgacagcaggaaacactgtgtaatcatacaaagtgcctgaatacaaaggtatggccacaccatacccacaaacaagtccttcttccagaaacaagaccaaatcttcctctgctttcctgtgtggcatctccagatgaactgagcctgtttaaatcacgtgatccatttaatataaccctacaaaggtcaatgctgcaattgcatagatgtcaaaaagcctaaagaagccaaaatgatctacttctcatcttgcttggaaacattacagagctactgacttcaaaggttcgatttttgtgctggagggacttgtagaaaaggacaaggactgagtttagcatgcttatttattgttgttgccaacagagctgctctctggaagtattctggaaaattcataatgtccaggccaatgtatttatagtaaattaaagctgtgctttattattatgattatttccttggttacagtgttgatgctgaaaatttagggaaaataaagcccttgttatcatgcttgtgaaagattttaagctaacaaaaagttcagtcttgattccagggcagttaattaaggttgaccaagtcaggcagaagtaaattaacttggctgatcaattatttatatgaagcagaataaatgcccttaaagaagttggtctcttcataaaaggatgtgtaaattaaactaaacatagttttgtaaaatatgtttctatttctatggggagaagagaagttaatggtgaaatcactattaggaaaattattagagtaattacacagtccaccccccatccgaaaagaaaaattctctttctcattgttcatccatgtgcagagaaaaaaggaagatggcatgcaattctgaagagataacagaagctcatggaaaaggaaggaggaaggaaggaaggaaggaaggaaggaaggaaggaaggaaggaaggaaggaaaagaatgtgaatttcactgtgtagatttcattattttggaaatattgaacacatgcctcttactttattgtcagttaactccatgcagttagtagactgagaaagaataaggatgagactcagactagctttagctctaagagaggtacttttaaaattactcatgttgcatcattaagatttaaaaccttcaataatcgtgttcatgccactgaggaaaaaagaagaccaacctgtctatattatgatataaagcatacatttagttctggttctcatcaagcaaacgaactggttcccttttaatgtgcaaagggtttacaaggcaacataagacaaacaaaggagttttaagcagtggggtgcagctccacagacttttttcccctagtaggcaaacggtagggtggcctaggatattaaaccagttctgtactctttaatgctcatgtgggtgttactctcttcacaacagagagggaatcaagcaatggaaatcccagatgaaagccacagactctcagtagaggactgcaacaatggagacatcacatttgctagcatgagggccatgcttttacactgctcacccgtcacctggcgagatgctgctggagcaggtggcaatgaggagatgaggcactgactggtggaggggatgacaaatgagacttagtggttaaggaagcagacagaaagatggcagccccaagatgtagagttactgtctacaaatgggcttggatgggctactcttaagaaaaaaacaaaaagggtagatgggaggagaaagaacaaaacaagagaaacagagttagatcagacaattgttttctcacctgagataacttctacaaattatgaatgaaccctacagacacaccatttgtctatccactgtcctcctgacccgggtcccatttcatggaaagactacccaagagccaagtttaggaggcaaagtcagtgtgctgactgtgttatgaaggcaccgtcttccaataccacattttcataattataacagaaaggcgtaaattttctaaagcatggcagttcaaaaagtaatcaagggaatgagccggagggctattttaatgtatgcaaagctagtgacccacagtaaatgggaggtaagctacaatgaatgcaaagtaatgcacacatactacagtcctggtctgataagggacggctaaaattaacacccaattaatttccgaattgacaaacaaatgaaacccataaatctactttctcattaattttcttgtggtataatttaaagcagtaatatgagggccaaaactgaacattatccatcataaatatcagaaggatagcactgtaacaccataaattatgcatattacctgttgttaaaaatgatttatgtattatcaactttatcatgcaccatagatgtctatctacatgtatctttaaaaatctggaatttcatttagcccctctggaaaaaaagttcaggagcaatgaaattgtcaaaagcatgttttaaaaaaaaacaaaaccaaaacaaatgtggccactcatttagccatacaggaggatcaggtaaaactggaatcattccaggtctcaggtgagtagaggctaagaacccatggaagtgaggagtcgggcctccccagggaggagaaacaaaccagctgtaggggcacccctcctagagaacacagcatctgtgtccaaacggcgccactgacctgtcctgccctctggaacgcaggaggtgcagggcttggtacacgtaagcaaaggcaagatgcatttgaatgcatctgacatggccagtggggatcatctatagctatgatgaccaacgcaagcaaggaacactaaattggcaaaaacttagaaaacccatgcttattttcaataatgtaatacggcagctttcttgccttcaaaagaggaagaaaagaaataggaactaacttgtatttatcaattaaaccaggaatagtttatatttatcaattaaatggaagaagcattcagattaaaatagtttgcttgtccactttccccagctccatttgtttaataagaataataaataaatacatcttttatctcaagtttaactttcaggtatgccttgcacataacaagaatttaacacataattactaaatgtttgactaaatgattaaatgacacaaaattccaaggccaacctcttgatcaaatgagatcaagggcttgtgctggcctccaacttttatattccaactttaaaaatactctatttcctgtacacttctttaactgttttggtgttctgaaactccaaaagtaacaagccattaattaaatctgttaggtcttaagagaagtaggatgatctcattaaacattgaaagataatcaaccaatgaaatttcctacaaaaacccattggaaacactgaatatatatatggacaattcagatgggctggagaaggtagacaatgggatgtttaattttccctgtaattcatgactcagaatagagttggcgggatagggtggtaataaaataatgttcctaacaaaagcacaggcttcccccttcttcaccaggctttcaatgtgaagacaggagacttcatatttccaaggaaaaaaaggatttctgcattccaatgccaaggcagtaaagttgttcagagcaactgtaaatgtcttattcttcagaactgtcttcatcaaactttcttggataacgtaatctttataagacaccaatgagcacagataacaagttgaccccgctccaaaaattacagatgtctcaatttatattttttagcttttcagctctggtgggtcttggttcgcttctttcctaatagacaagagtttaagtgccgtaatcatagcaactgtgggcaaacgagggaagttagaaagaagccgctctaggaaacaagtacaaagcagaatgcatacccactccctcgcatattaatcctgaggagctcaaataattaaatagagactgaaaaggagctttgccaatccagtgctaggctgtttgctttgccacaaggaagcctctgaaggtcaggcatgatggggccaggtgttctggggagcgtaattaaaatgcatttttacagaacaaaatagattttaagtttgagaactaacaaagcccacggaactttaatcatttgaacattcaaacagctgaattctcacaaatagcccagtggaataaagtgaccaacaaccagttcagaaaagtcttttttttttttcatttctatattttctatcatttaatgtacacgaggccaggttcataacatagattaatgactggcgtgatctatgacacacttcacgtatctcccgctttggctcaagcccctcaccgctctagtggccaaagtgaacaatatgttcacagcatcatggtaatgtagtgaatgtgggccatcagaattctgttgcttgcatttctccgttgtgcaaaaggaacaattatttaattttatccttcaaaaactccaatatacatatatgtattttcccccctgaaacttgctctcacagacagatgagcaaggcttctctgacataaaagaccaccatttgcctctgcaggtcatgaccctccagcctccaccctcaccctggtcggtgttgtatctttgtaatttacagcaaatgctaggagagcatacctcatattgaaacacaaggcaaattcagaaacagcaacaaacaataacttaaaaaaaaaatgatgatatgatgcgagctgagagttttctctactgtttgcaaaacatgacaaaggccaggctaatgttcaggtcttatctaaggtggctcccagtgtccaagggacaagcgtcatgtgcacacaccaaactagataaagagccacatgcttgctttacttaactagaaatgatacaaagcataaactcactttaaaatggacaggtaagaaccacaggtaagagtaaaaacactggcttttaaaaatacattatgcatattaactgtgtagtttcttcccagttaaaatatcttcatttatggcaggggggatttattcagaacacatcaaagtaaaagttaatcctcccttctcaaacttgacaaagagtacatgcatccaacaggatcatatcaagcctacaggacaacacgcaagatagacacagtaacacaaaatccaaggattgtacctttcaatggtgactgccttgttcatagtactagactttttctcctacaccttctaagtccttgtttgttccacaaagaaatttctagccatctgatgctctattactgagctagtggcctttcaggagagctctctcccttcagaaaaaagcaaacaactgcatagatatcattacactaaggaaatctcttagaaaaaccaaacaacttgctaatctcaccagccccttcatccaagcaaaagataagaaaagcaaacctaagtctgtttcaaccacattccagggacaagttcccctttttctttctttatcaaaattctagcatttaagtttgtgtgtgtgtgtgtgtgtgtgtgtgtctgttaaacagaccttgcaggataaactgctgctcacacccgcaaacaaagcaatatctgtttaataacgattgctgccatgggtacagtaaacaaggggcccagcatttgtgtttatgaacaaacacatcatcttacaagagcaatttaacattaaccaggtggaataatcaacagatttcataggtgacagcaggggcagggctaacgtaaacagaactggggaggagaaagaggccactctttgagaatcaaggtcgaggtaaatgcattacagagtaaacagctgggaagaaggcaagataaacaaacagtcattctgacatttagagaggcagaaaggttgtatgttacatagatcagctgctgaccaccatgaaatcaaaccggttggagaccaagcctgcttgtttgcacaatgccatgtttgcttataaacaacaatttgctgttaccaacatcacattactcaccatcatataagccagagtgaagccagtcagatccgcttaactctttactggtgacattacttagaaattaaaaaacaaaaaacaggcccctttaagaaaaagaggtcagtcaccccaaaataagaccaagagacctcagtcaatacccttttatttcctggcttgcagataaaaataaagcatccacatggtttaaactactaaaggttggatttgaaaacagctttaaaacactataatgttttcatgcttcagtaactctgcattcatttcttgggctcatcttcttttatcaatgaaatatatgggtcaaacacagattcgaatctttaatgtttcatccagaaggaaaaccttaatgctccagtctcctcatatcaagcttctattctaagatacctttaagcccagtgggcccacaaacagatgcagagcattctcaactactctgcaaaaatccaactatatcagtttatgatgttttccttacaaaatatcaaaaaataaaataatcagttgatgtcccatgtaaccactcaggggttcattctgtcagcttatcaataaaatcttagctcttcaaagcccagaatgaacaataagttcggtgtgtccctaacaaaagtgttaagaagaaacgtttaatctctaaaaatttccctgatgtgcactaccacataaagcagcttactgtgtgttacaagaaagttatcatgccttatcagagatactatatttagaaacacaatcggcaattaaaacattagtttcaatctattttacagatactttaacaccattaatttaattttgatacatgtgaaaaacctccttccattacttaaaatttaataagcaaaacatactgaaaaacagtttggtaatttatctatatcttacacttataatcagttagctaatttttttaaattctgcgtgatgtcagtgcaaagtgcagcaaaacactgtctgctggatatccaaagcaaaatatggaaatgagaaaaggatattaaaaaaataaagatacacctaagtggattctggcaattacatgattaacaatcaggttattggaattttccactctgtctaaaaagaaagtaacaaaaattgtgttggtctgccccaacccccacaacagatatccccctccggagttccactgtgaataaactcctcaaccttctctagctgctcttgtttccaggccttgcttgaattatctaatctttgttctgcaaacctaaagtcacaaagtaactagtgtgttgtctttcatgtttttgttttgttgctctgtggtttgttccctaagtccctctctgccaaccatcatctttccccaaatcaacatagtccctgaggcctcgacaatgtcaggggaagaaaatttccactgagcattcagtgccctggtaggaggccatttttcaggctcaaggacctgttaacacctgatggacatgcagggaagagacatcaagaacttcccttaaaagccctctagggctggagctgttctactgcccttgagaaagaaaatcagacttgctcaactgattgatgatgcaagtccggctgctggaacaactaacagagagaatcttccctctaatgttttgagaacagaacgttctcagattccgtgctcactaccctatggatgactaggaggtagagaaaagtgaaggggcttctataaccaacaccccagtgaaaacctaagagaaaaacaaaatgaaaaagtcaaagtggagggctgtgtcctggtatcctcactgtcctgtcttcaggagaaaatgctgatgattcactctctgcacttcagctcttgtccagttctcctgagcttcagtttttattttcttttcctgaaccctggatgaaccagaatattagtaaaggattataaacatagttgacaattctaaatggtaatccaaagagttgtaacaatttcccttcataaagggaaatcataattgagtcctggagttttgaaaactaggctaaacctgggcatataatcattgcttgaatggggtactcttttctgtttgaagatggtttcacctattccttatcacgagcaggataaataatgtgtcttctttcctcttccccagcagtggtgttacacttgccctaacccacatttagttctatttttccatttttatttttgagatgggagtcttgctcttttgccctggccagagtgcagtggcgcaatcttggctcactgcaacctcttcctcttggttccagtgattctcctgtctcagcttcccgagtagctgggattacaggggtgtaccaccaaaaccggctaatttttgtatttttagtacagacagggtttcatcatgttggccaagctggtctccaactcctgacctcaagtgatcttccccccttggcctcctaaagtgctggaattacaggtataagccaccatgccgggcccacatttagttttacttctatgtacccagtttacttattttattccccatgaatcccaaattgtaaaagttttatttttaaaaaagtacattaagaaggcttttatataagctgttcaacaaattatttttaaaatagaaaatagttctaaagaggccttgggctaactcaagattgggaaggactgatttttcttttcacaactcctccccagaatgaaaatcttacaaattctgagaatctcagaaaggttgtggcatcttagtggacaccggagctagtttcccaagccccatgcattcacttttacttctgtcttcattattttcaccatctccatccacatctaccatattgttattttaaaaaatgattcacttttgataaataaatctaccttcagaggaaactttgtatcacttcttcaaatggaaaaccagtatgtaaccctttgtaggtgagaaagacttttataatgcatgttataaaacctaaccaatgatattaaattctgctagaacctgctgtttctcagaggctctgagtggaaccatgttctttctttgttaaataatgagcttacaactgggagagacagattaaagatactagtaccaaattgagactttctccttggctttatcagaaggattaaaaaagaattgaaaatggaattgcttcaacattgaaccacagtaatgcgaattggtgaatgatttacgagccaccaaaaaatcctctcccaacctatccgtgagtggtacaaggctcatatattgggcaactgagctacaggagacttaagagaccctcatgaacctccacgctataatcttgacccttaagcactggattcctaacagtgcaattcacaaagcacgtactgaggggctacatggacacttacactgctaaagacataatcaaccaagaagccagattctttacacttgcccccaaaccaaatgaggctcctagttcatgggtattacgcttgtagaagacaccctaaaaaccagtagctccaacaatgagcctcccatccaggcctgccttttctcacaccatcaaaaaacttgtgcatcagccacttaagtcatgccgcctttccacaatacaagttcagagtttatttagtagcaagtaactactataagaactataagcatatcattcaaatgctttattggtcaaaaagatgaatgcttttattaatccaacctttttgtaatggagtgccactgatgacccagcattagcctcattccctgctattaatcacacttctaagagctcattttgccttaaaatcttaagaaattgctataatttaaagacatggtgtctacgtaatgggaaatgcttcatagattgtatcatttcagaaaatacagtatatttttatgggaacaatgacatgatgctaaggaattacaaaatgggaatatatatatatatatatatatatgaatgaataaaaagagaaaaatgtaagcctcctttcgtatttgtagcttcccacatctgtaaactttaatcactacctttgtgaagtccattaatccaaaggcatgggcatatagtttacatagattaaatccaaaataacactcccaaacaaatgaaaattaaatgaagggagaaactctaatgtaaaaagaaagatgtggaaacacacggtgtgttttaagaaaattccatcagtggtatattcctcattcatcatctgtaattcctgtgccttgtttgtccatgtgaagacaactaaggcaagcccttcagtaaaggattcaggacaaactacaggcatctgcctatttacattcagcagaattttaacaatataatgatgtccttaacacataagaccttttctcattaagctacccttcaagaccatttaacacagctgaacactataaagaactgtatctgaaagagttttttcaaaatacagagctaaagtaaatcttttttaaggcaccccttcaatttttaccaccacacaattcaaatgcagcatacacatggccgggcatggtggctcacgcctgtaatcccagcacttttgagaggccgaggcaggcggatcacaaggtcagaagttcgagaccagcctggccaatatggtgaaatcctgtctttactaaaaatacaaaaattagccgggtgtgctggtgggtgcctgtagtcccagctactcgggaggcggaggcaggtgaatcgcttgaacccgggaagtggaggttgcagtcagccaagatcgtgccactgcactccagcctgggcgacagagcaagactccatttcaaaaaaaataaaataaaaataaaatgcaacatacatatgtatatattcaaatcttacaaacacataaaaatggtaacattgtgttacatgatgaatgaagggtgcagtgggttccaatcaggtactacgatgatgaatggatctagagtgaatggctgggaagtacaaagaatcagtcggcctaaaagtcaagaatgcagatattgtccctacagttagcaaggattgaacttggaatctgagaaacagccagaagctggtgataaagcgtacttaggtggagctgggacaaaagcatctgcctgcttggtgagaggcaagtccagctctggctgaggggcccctttgcacagagatatgctccgcccatccatccatgtgctatcatgtggtctaaataagcacctagaccttggatctcccccatggggaagtgctgagcctgggaggagatttagaaagaaacagaagtcctttatcaagctaccttaatcatgctgtcacgaacatgccaacgagaaagacagggcttgaggtgccctgaataggtagaacaggtaccaacagtggggccacttctctttgcctgctgagtgctggggccactggatgactacagggtcaacggcgggaccatctgatgtctgataatgccagattctcaacaggattcattcatcaactaaacacccaaagaaacttttgaaagggtgttgctactccctggcatgcccatggtagctgtgaggggtggaggtactggacatctttgggacaggaacaacactctaaaatagggaattaaaattactagtcttcttcacctgtaaacggagacaacagggctcctaataacgagcatgctaaatacctgagttaagattcatcaaagatcacagccattgttgatcacgttctcccccaaaagagagagaggagcgggggagagaggatcataacctaggcacaaccaattgatgagaagagccagtgcatttatccaagagtagacccctgtggcaccttccagaggagactagtacaagggatctgtctcatgacaagggtttccaatagaaccacatatacctccaacagatgagaaagtgatcaacctgtgcactgcaactgtgttgcaggctatgactacacaaagcatggttctgtggacagccgcaaaggcatcacctgggagcttgttagatatgcaaattcctgagcccatctcagacctactaaatgagaacctgcattttaaaatatccccaaggtgattcacatgcatattaaagtttaagaaggcaggtctggtggaaaacaggcagacatacttgggcttgatttctagctcagccaatttttaagttttcaacaagatatcccaccactccctattctcatttcctcatctataaaatcatgctgttctgcatctgatttcactcgtccttctaagcaatatttattctatagttaatacaaaatatgccaggccctgtactgagtgttagggtgccaacatggaacaaaaatcaatacagttccatcaacatgaaggtgattgtctaatcaagaagacacagattaatcaattagacacataaataagtggagattagaattgtgataagtgctaccatgaaaaatgcacagtgttctgagagcacagaggaataatgtatgtaaagtgtcttgtatgtagtaggtgctcaataaatcacagtgattattactagctcataaaacccagccctttgggaggccactggaaaattctcaagtgcaaatactcttctccccatcataaaatgaacgtgaactaacactgaattctcagttcaacttaaagaaaaaaatgtgttttgctgctgtctcctggctatatgaggactataacatcaataaagtcaacatttcttctaatgacagcttagagagcaacactaactttctgggttattgttaagaatcagctcttgtttaccaagttgtagttaaagggaaaaatgcagagcagggcagagggtaatactgcaagccagccctgttcaaagcagtctttgattaccattttaaagcctcgaaatctaaagaaaatctttaattggcttttcagcagcatttctcctttgtatatgcagtttgttgaagtcaagaaggtacatgctaataattgcaggtaggattagcatcctgcaccttatactgtggatacaagtggttgattattagtgcacctggcacgtgtctatacagcaagaaaactggactgaacaggaatcaaacagggctcctaaccaaatccccatcactgacaactcccaccccaggagcagaggcgccttgagtccatcacactgaatgagaagcttgcacagcactgcacctgggtgtgttcacttctccttaaaatagctctccaaagtcccacctcttcctttgcctcatttcgcgtgaactcacaaactttaagaatttaagtatgattgaataagtctccatgtatttacaaatttctggttcttttccacaaatgtgacttccttccaacaggtgtagatttgtgatgggagaattctgacctcacttttatctgaatgcccgtcaactcaagaatgtccaaacagaatggttgatttgaatgggctgggaagctggggcagctgcaacgtgcttcaggtaagccctcaagatcttaaggtatagtagccgcatgatactgaccatcagttcacacactggggctcctactttgatttttctgagttgatgtatgtaagatgggataggaccagcaccactagcagcttggtaagcagacaaaaatgggtggtttccatttttattgcctggaatgagacgtaccttgagtataatttcctttgggtccaacaattaaaaatgcaaagtatgagggaaaaggatacaccaggaattaaaaaaaaaatcagggaaaaatatctgcctaacaatctgtccttctacagcagtcgttctcaactgatggttaattgtccctcccccaccaggggacatttggcaatggctgaggaccattttggttgtcacacctggaggagggggcttgtgccactggaatctggtggggagaggctggggatgctgtcggacatcctacaatgcacagcagagcccctacagtaaaaattacctggtccacgcatcaagagtgctgtgacagagaacacttctaaaagaatttgttctatttttatttttattttattttatgctttaatgtattattattttttgagatggagtctcattctgtcacccaggctggagtgcaatggcatgacctcggctcactgcaacctccgcctcccaggttcaggggattctcctgcttcagcctcccgaatagctgggattacaggcatgtgccaccacgcccagctaagttttgtatttttagtagagatggggtttcatcatgttggcctggttggtctggaactcctaacctcaagtgatccacccgccttggcctcgcaaagtgctaggattacaggtgtgagccactgtgcccagcctaggattttgttctttttttttatttagggatcaaagcaatgagttctacttcttgttcagaagtaaatttattatgttccttaaaactttaatgatttgtgattttttttgcttctgtttctacttcataaatactaccaaactgagcacctattataggtcaggttagccaagacttaggtgatgcccagacatttgagtagagtagtatatttcaagaggctgggagtggagaagagagagatgggctggggcaggcaagcaaataggagaaaagaagtggccaagcttgacagagaagactggagttggaaccctacattagcagagagcagggaagggctgggatgaaatgagctttacaggaagtgaaatctgatagaagtactcaggatggggccaaagcagagagaatgagggacaaattaggacactttcatccacttctccctgcttccagagtgccctgctcatcgaacactcatctctccaaactctacttctccctccaacaagtaggttcgccaatcataaaatcatcttctcaacctcgagtgtctctccctgggattgccagctgcctgaaaggactacacttcattgtgtcgacatcctcccctcccctggctccacctctgcaagctcgcttctgcctcacctctttgctgaaactgtccctatcatattactaatgagcggaggtgacttgagtccatcacactgaatggggaaacttgcatagcactgcacctgggtgtgttcacgtctccttaaaacagctctccaaagtcccacctcttccctttcctcatttcccgtgaactcacaaactttaggaatttagaatatgatgtaataggtctccatgtatgtacaaatttaatgaaggtaagtaactgatagtgatggtaactccaatgagtttccaggtgctaaattcaaaagagagttttcaacccttaccttacttaaactttgatgacacaagacactgtcattcatatcatttctcttgaaaaagaaaatctctcttctgtttgcctccaggttgtcctcctcattcctggttctctggcgctatctctgatggctccttctcattctttttaatgagcatccccttcctctgctcattcttcaatattgcatcttgtctaaagttaaggcctcagtgctgcaaaactcttaaagcaggggtctgcaaactttttctgtggtgttgtacagtaaaatattttcagctttgcaggccagatgctctctgtcccagctacttagcgctgctgttgtggagcaaatataacccagcccatctgtaaacaaacgggtgtggctgttttccaactgttccaataaaactttatttacaaaacaggcgacagctggattcagcgcatagaactgtagtttgtggggcccctactctcaagcactatccctggaagtccttaacgtttctgtggcttcaactcatgcctgtatcctggtgattcctgaattattttccccaaccaaaatatcttctcagagctgcagtcccttgttcctacaaccttctggccacttccactttgatgtcctaaaagagccacaaattttgcctcaaactgaaattatttatttctccaagctctgaaatcaagctagctcctattcctgggttttcagggaaagaatcctattccaaataaggaattatctaataatcttccttctcttttatttcccatcttaccaattcccacccacactacctcctatttaaatattacctgcctctccatacccttgcctgggagcatgccctcatcacatgccctcatcactttgtaactctgaatgtgaacaaatgcaactcctagtctggccatgccatagcccatctgatcatgtgacctcacttgatttaaatcctgggtctctataaggcctatatcctccaggcctgttctgtccaacagaaaaaccactggccacatgtggctactgagcacttgaaatgtggctagagtgaatataggactaaatttttaataaatgtgtgattttcatgaaagtttatttaaatttaaaaaccaatacctaattcagtcatcagaaaatgtttaagtatgtcttgaacaacttgggtatgtgaatctcttcttttaaccgtaagttttatgaaatcgaaatacagatcaagtatttccaatgaaattttaatgtctgaattgagatgatttttcaaaaacttagtatgaaagaagaaaatgaaaaatgtgtctttcatatatttttaatactgattacaagctgaaattatattttgggcaagttggattaaatagaataatactataatttgtatcttattctttttacttttttgaatccagttaccagaaaatttaaaattccttgtgtggctctccttttatttctactgtgcagtgctgcgtgcagcacacacttcaggatctggcctacctgcccctgcagtgctctccccactctctctctctcctgtttccaccctatctatctacactgtagccacacttaacaaccagctgcttctcaggcatgcagagtactccaaggcctttctgtctctacctctccgcctccaccatgaaccctggtggggctgattcctactgaacctcacaactcacctctagccatgaaagtttttgcagaccacctccaccaccagatctggaagagccccatcaagttttatactaaactcttgcagagtaatcattatactacattctagttttctgaatgtttacctgtaagctagggatcatgtcttgcccctaacaggataccaggcagtttgataaataatttaatgtcagacgagtgaatgaatgaatgaatgaatgaaatattatacagctagaatgaaagacctggtaactgattataggaactgaggcaacatgaatgacatttctcagcccaagtgacgcttttgtgagaatggccaagtgagggaacaggccactttcagagtaaagcagaaatgaaaacaaaagctagcagggaggcatcaacacagaggtgacacttgaaagggaatgagtcagatggtgaggggagggccagcaccctggcttacgcctgtaatctctgcactttgggaggctgaagcaggtggatcgcctgagcttaggagtttgagatcaccctgggcaacatagcaaaactctgtctctatcaaaaatacaaaaaaaaaattagccaggtgtggcagtgcacgcctgtagtcccaactacttgggaggctgaggtgggaggatcacctgagcctgggaggtggaggttgcagtgagccgagatcgcaccactgcgatccaacctgggtgactgagtgagaccctgtctcaaaataaaataaaataaaataaaataaaataaaataaaagattatgaggagaaaagaagggtcctcagaacaaaccataggtaattcctgtacttaggaaacaggaagaataacatttactaagttctggtcctcacaactactttgtgaggtacatattaatcctcttttttttttcttttaaagaagaaaacctgtaggccaagaatacttagacttagacacacatatataaagctagcagacaaaaatatgagcatcaaactcatccaatctccacccactacattttagagcggggtccccagctccccaagggtctggggcctgttaggaaccggtcggtaaagcaggaggtgagcagcaggtgagtgggcatcaccgcctgagctccgcctcctgttggatcagcagctgcattagattctcataggagcaggaaccctattgtgaaacgtgcatgagagggatctaggttgcttgctccttaatcatccccaactcttcccctctcctggtcagaaaaattgtcttccacgaaactggtccttggtgccaaaaatgttggggtccactgttctagaggcacattccagggtagagtcttggagagtgacagaagacttagaagggagtttcaaagaaggaagaggtggctaatggtttcaagtggcttagagaagtggaggatgatacgaagatggcgaagcaaaagggagatcccccatccaacatcaaataccttcatccttctgccctcccttctttccttctgaaaataagaggctgttcactttctacattcactctgaaacctgtgtcttccaggcttatattcttccagcaccaacctccttctctctaccgcatctctaccgcctcccgcattttagtctatatataaatatactcaaggcactcagaccaaaactattctgggttactcttctatccctctagttcccatcctgcaacctctttcctccatgcagctaagctttttggaagggtcctgtctctatgtttctacctcttacttacaactctgcgttgcagactcaatgcttatggctaggacagtagttcctcaactctgaagccaatcagaacaaagtccttcgtccgggtgcagtggttcacacctgtaatcctagcactttgggaggccgaggcaggcggatcacgaggtgaagagatcgagaccatcctggccaacacggtaaaaccctgtctctactaaaaatacaaaaattacctgggcatggtggcgtgcgccagtagtcccagctactcaggaggctgaggcaagagaatcgcttgaacccgggaggtgaaggttgcagtgagccgagattgcgacactgcactccagcctggtgccagagcgagattccgtatcaaaaaaacaaacaaacaaacaaacaaaaacccaagtccttcacccagatccatgagaggggctggggcggaaccctggaggcagcattcacaacacgctggcggtccctggacacacctggtaacactgccaagcccaagagaccagagggtgtctgtcacacctgacatggaggccactttgaaaattcttccatggcttccctgatagcacatcctctggtgctcagcctgattcaaaaacccttcactcccttggtatttttatttttatttttatttttttgagatggagtctcgctctgtcgcccaggctggagtgcagtggcgcgatctcagctcactgcaacctctgcctctcaggttcaagcaattctcatgccttagcctccagagtagctgggattacaggtgcccgccaccacgcctggctaccttttgtatgtttcgtagagatggggtttcaccatgttggccaggctagtctcgaactcctgacctcaggttatctgcctgccttggcctcccaaagccttggtctttttcaaatacttcactgtcttccccaacccattcgctgttggtgttcctcaaggtccccttgccctccacatatacttcacctttgcctactcattgatgatcacagattggatccccaacaagcccttctctcctttaccgattatttctaccacttaagttcatcaggctcccaaactcaacattctttcctccaacctgctactttgcctgatcagggaaaggtcactgtcaactcctttgatgttcagtctttcatcaggacctggcaattcttaatcttatatattgaataaatttttcccctttcttttcatcaccactacgatcatccagctgtcatcatctttctcctgaaatcctcaaagaaccttcagctgaaccacaaacaccattaaaaacaaaaaccattctgatcaagtcactcccttgccaggaaagctccccaagctcccccattctaaaaagagtctcaactcctttgaatggaataacaggtctcctgtataatttcccagacttctttcctgcttcctcctccacgaacccagcacttttcctagttagttgctgttttccaaacataccttactctttcatacctacattatgctattctcctcctcttggaggcacttttttcctacattgacctgaattcctatgaatgctttcaaacccagttcaaatattacctttaaaaagaaaatatttcattctagccgggtgcggtggctcatgcctgtaatcccagcactttgggaggctaaggtgggtggatcacaaggtcaggagatcgagaccatcctggctaatatgatgaaacccagtctctactaaaaatacaaaaaattagccgagtgtaatggcagacgcctgtagtcccagctactcgggagactgaggcaggagaatggcctgaacccaggagacggagcttgcagtgagtagagattgcaccaccgcactccggcctggtgacagagcgagactacgtctcaaaaaaaaaaaaaaaaaaagaaaatatttcattctaaagtactcgagatgcattttatttttatgctgaccaaaggtcaggttcattgcaatatgatagtgaccagatggctctccgctcaggccaggagtaccccattactgcttcagtaaagcctaatagtactggatacttaggagtcactcagcagaagtttgctggatggatggataggtggatagctcatgggcaatggaaggatggagagtctaggcttggataatcacgctccctagtatggcagctggtcagtgagttgctaatttcttcctcctcatagactaaggaggtgatcaaagaagaagaagttggagattctgaatttagaggaattaagattaacgagttgtaccatctgtatagtaaaagaagaatcaaatcatctgctgaaatctggtgaggatatagcagaggctcaagggtggtggtcaagttctaggatcatcactgtagtgaatgagaggactctaaaaccataaacactgggattgatgagcccatgagggattgctcagttacgtctaggatgcagaactgcatacagggactcagcatggttttgggagagctaccagccatactcattcccttaggaagaagagtagatgtgatcgtagatggagttgggggttgcgagagccactgcagtggcagaagaagggataagggagggagagatggtatagagggtactactgaaatggctacttatggactctctgctgggtgtggagggatgtggatacaggacagtgattaagtacaatccgcacaagtgatgggcaagaggcagagatgggaagctgtgatcaaacggaggactggaagtgtctcagaaaacatacacagcaaaaaaccagtgagactggacaagcttctaaaattatccagcaagtcaaagggagagggcccagcacccagcacagtgacacatagtaggtggacatttgttgaataaacaaatcaatgaccagatgggacagaaccatcccctcacccagtggttctatgtgagttgccagcatcaaattagaaaataatcacagattagcactgtaggccaaggacacccgacagactggttgttgtgacaaggttatatttgacattattctaacatgataatgtaggcaatgtgtttaagagaattagaaatactcagctacaacggtacccaaatctgccaggacttggcacatcacagtcaatattttgaatgagtgaatgagtgcctaagtggatgaatgaatgatagaatatacatgacctatacaatacctgcaataaaacacagccaccttcaaaaccacactcaaggaacaatattcacaaagccagactgaacaagcaacattggataaggagttaaggcatcttgtttctcaaaaatttcaatgatacaaaggcactagctgggaggcggcagtgtgagagaagtaaagatgcctgtgattctgttgccatgttattccaacacatttgcggcataaatgctaagctgtcaatcccctttgcctggatagccacagttcagaagtggctcaatctgatcagcagtgagctctctatttaatacctcttacttcataaactactagtgtagctcaattctctgaacaactggaaaggaaacagagctgataagagaattaatactttcttcccaaatcacatcatctaggataataaaagcatgttaaacaaataactcttaaaagaagtaggagaaaaacattttaacgtgaagctctaagcgatactgatgtttataattatgacgaggaaggaaaaaaatttctgagctgtcataattgctaatgctacggatttgttccctgtagaattctgtaagataaacagagatttgcatattttgaaggtattttgtctgtctgttaaacactcctgttactgtaaagatgtttttccttgccagaaatagctagcgatttttctcatctcatttctagttctctgcccacttgctttcccctccctaggttttgggagttctccctcaaatactaatggtggaggaaacaaatcttttgaacagtggagacatgaacagaaacccaatcacatctatggaaaggagctggatatgaggacatattagtgcagaggaagaacgggtgcagcaaagagagactgggcacgggggcccaagacggactgagaaaaatcatgtcttcagatatttaggcaacactgagtttcagagggcttaccaaaaaaaactttcactttctagaaacaaatggtagctttgcaagctgagtgatgccaagttttaaacagcctggttcagattcaggagagacaggggcagagaaaaaacttctgagacactacttctatttttacagtcactttgcttagacatcaagggcatgggcacttttttggcagcctgtgctgctggacgcctctgaggaaaagaagttgaaattacatcaattgaatcttcccatttcctagagctaactcaagtccctctggttaggaactggtgtgtcttgctttggctcttgaggtctgaaatggtaacaatcttgggctctttcttgcaggggaggctgggattcttcaaagtacagatccttgttctaagcctagatggatgaggctgacatcagagcattgccttttcagtttgggctacttgcctcaggcccagatgtgactcctgccagcctcactgctcaactccacccggcagccatcctgaaaatgcccgtcacctatgcaagagcctcttccaggcacaagtgatggcagggtctactctgggggtccctattgcttcccggggttctctctctctctctctctctcctgtctctctccctctcactccctccctacccccttctgcatctcattctggctcaatctctttcactctgtctcaccctgtcacacagtctctttccctttcagtttgccatcttcctcttagtatccctttctctctgcttgtcattttcctctcgcagtcttgctctccacctccatctcacatcctgtctcgctgagtctctcttttgctcactccccgcacgcactaccttgctcgttctcaggctccctgcaagggcactaagtgcgctgttcaccggccaagaagagggatcctgtacagtcacactggtcagactggggtaagagccaaagcacgcaggatgtcagacggcagctgacagtcccctctgatgacagggcagagcgcacaggacgactctggtttggctgtgggtggggagagtcattttggtcttcgtggtaatggcggtgccgggcctcctggaccacatgagaaggctggtgcggttctagcgatgcagtggttctcacactcttagtcatccttccactgacacacagtggctcagagcccactgcagtcccctgctcttgtctaagtctgcctttacagccccacaggcacgcgaccatggtgacatcgggcagcttttatgatcctcatgtctcctcggatccccttcccacacaactctaagattcggaacacaaatagcgtttacgtgaagaccacgaccacagggcatcaaaaattaccgtgtcttcctattggaagcaacagagccctctgatataatgagtctgtaaacatacacttgtcaaaacaaattgaaaacactctcccgccaaagaaaccccccagaaaactattagtcaatttgaaattattctaaggtccagcttagtctagagcttatctaacggtctattgagttctcagtaagtcatgtgaaaggaagtcctatgataacatttcctgagacttctagacatttgattaaggagttataaatcttacagtctgacttgtcacaagcagagtgagattacacccagggctgtcaagattaagtaaacttgtcttgttctcttacaggtctttctcagccttataccatagattaaagatttgttttgagattaaaaaatggttaccatcatgctcaatgtttttaaaaaaaaaaaaaaacagtcaaaggagtataaagtgacaattttcaatcttcacatcctgaaacgtatttacctgctattcatcggcaagattttaataagcagtaagtaaagaggaaggaggagtgccttctgggctagtccaaaactgttgccagattaattcattacagctaaaatgaataactatattaaatcgaagaatgtgtatgactatgcagctcccgatcttccagtaaccaattccaagaatgtggtggaatcaaatcaatatcatggtggggcgggtggggggcgggggaggtgtccagaaacctctttgcagaagcccctgtcaaattatattgctaattttgaattgacacattattctaggaatgaccagcagttaccatcagcaaacctgtggagactgaggtttgaatccaacacatcacggaaagagaggatatttagggagttctaggtcactgggatgcttcctcagtttagtgacaagagatttggtacctaagtggagaacttactgttttcaattctctatacgcaccgaaattattgggttaaataaagacatgacaagccataaatcaacctgcttttttttttttcctgtggagtttttactcaggtgtactctaaatgtgcattaaactgcagctccattaagcagttacaatgaaggtaaagggcacaaggctaaacaccacaggaccttgtatggatctcatagctttaatggaatcaggtttttaacaactcttttttcgttaaatacagtcagtgtcaggaagatgcgtcccactcataaagcagcgcaatgacaatgtacagtggcactaacacaaggacatagttcatcatgacatttccagcaattcccaactgattagggtcattatgttggaggtctgatttatgttgtcatttcctctcaccgatcctgcatcaatgaatcttaatgaattggtaaataagggtgaagattacactctatgacactgaaacattcctcattctcaacacccgagatttatgtagccaattagtgactaacagagaaaattggctggcagaaaaataatattctttatggtacaaaatggaaaaagctttctcgttgaagggcaatgccacagcaaaagtccataaagtagcttgatatgtggaaacacaaaagatgtttaaaatgtgctctaagagggtttcctagtaaaatgcttttactgttggttgttttttttttttttgatgtctcattttttaaaggttattggtttaatgagcagacctgtattttataaagggggaaagttggccttttaaggggaaagagttaagtacacccctatattatacaaatgctaatgctttgtatttactgggagaatgggaaaaataagcaaagacgacaccagtttttcccccagttttagccgagataccagtttctcctgacttcttgcagacaggtagccataatgatttgtacataatcagagaacattaaaatctttcattctgattaattactagtaagtgtacttaaagtactgagcatgtttcaaataccagaactttttaatttaaaaaatagcctaatcattaacacagaaatcactcagcttactagtattattttacattcacctgttcctgacctcattataaaaccagatgaaatgactgtcataaacaggaaaaaaaggtaaaaattccccaatgaaacataattcagaaaatcttggcttcacctagtgcttgaagcgtaaccctatggagtgtgttcatgaatgcaaagcatagcttcagagtcattactgcttaagtatatacttaatgttgaatactgtcagggaaaaaaagggttctcaaaatccacgtatttattcagatttcatcatacaggctccacactatccttgtagaatatgcaaatgggccgtgtctctttctttcagctgttttctagtcaatgtcaagaatggagctttgaaatttaaaaaaaaataaaataaacgccggaagttggatcagctacaatgggttctccgtaccatctccttaaggtacccactgtctagtaaacaacaacaacaacaagagctaatctgcactgacagaggagcccattctgttcagttctggaaagctccacggccactcgagtatcctccttgagggttactgcttcatctaggacttagggataattgtgccacttctgtcaagctcagattatctcagtggcgctgcaacctccaggactccctggaaacttgctactcacaattagagctcctaaggcagcctcaagttctacaaggtgtgccaaacagcagggctgcaggaaaagataccagcagccaaagcagacaccactggggaggggtgggtgggggataaaggagaaaaagacaaaacaaaaccttgcaaaggccgcaggcttacaagagcgtcactgtgcggctgtgaagtgttcagagatgccaagcaaactgtgtagcttttcaaatggatcgctttctttaaaaactgctgttctttgaaccaatttctcatagaacaaatgcagtgaaattctaagggcatgtggtgctcctgacttctggtgccaagaagcctctacttacatagcagaatgccttgggcagacaaaactgccctcagaggtagtactgtgtgttcaatgcccatgaatgattaaagtctttaaaaccctcctctacctggaaacaaaggaacaggagggggttaaatgcatctcctttacctatgacagtaaacagatagtattttaaagtgcaaagtgcaactaccatccaaaaaagaataattaagcacaaatatattagtagttaatccgtagctaaaaaccaacatctaaagtctgctaagccaaacctgtgagtaaagtaatactcggggaagaaagaaagattggtgcataaactcaagagtacagggctcactgtgaattctcaaaactgggaagagccaagagaaaactctacacatgttttattttaaaattactatttgatactgattccaaaacgaaagtgttttgtaaaatattttcacagtaggtggcatcacttatcaactgtaggaggggggtggtggcttgaagcattttcctttattaagttatcaaataatcatttaaatggctttcacacattctgttccatttgagatacacctacaagtaagacaggcttgccagagaacgggaaaaaattccagtagagtctgactatccagatacttgtttttccctccgctctttaatcataagaaggggaaaaaagcaagtttgcaaatctactttttttgttaagtaacagatcattttggtgaaaaatcatgtttctgcagctgacagcaaaagtccccttttctttcaatgaggacaatttggtttaaaatagcttctttacttaaatgaaccatgaatcaattttatacatcctgacaaggaaagatgaagatgtaggctttaaaactcaaaaaataactaaacataagcacagtgatgttgagacatgatagcacctgcaaacatgcttccttcttgttttgcattcaagagaaacaaagtgaactgattctcctttttaccttataaatacaatgaatcaaaaaacatgaattctgatgctacaaataagacagaaccaatccacctatagctaccttataggaaaaaaaaataggagagattttctaatctttcaagagagaattactataatttattataaatgtccaaagaggggaaaaatacacaacaccaacttgttgactcagtggttattttggagaaactatgaattctggacacttcaaatttccatgcattaggcaaaaaacataaatggactacaagcactgtttatcaggcaacatttttaaactataaagttaagacagaaaaattccagggaaatataagttaaaataacgatgaaagatgagtgaatagaaaaagcctccctatttttctttttcattatggtgcataaataattctggtagattcaactagattatggtctatggagatatcaaagaatgtagggtgtcaggacctagattcctagaaatttagaacgaggggaacaggcaatttgccaaagggcaaagagttcatacttcaacgttatctcctgtaggaaggccacatccatttcctgggtgatccttcaattgcatgtgcaaagaattatgtacctaagaaagagttatacagctcaaagaagaactggtacttggcctatttcagcatcgtcacctgaaagggatttctgggggttgtctgtctctcttgtcaggtcacatctgaagaaagagcatgtgtttaaaaagctcatttggaaggggctaggtggcttagcaaactgagataatataaaaagaatctgatagtatcaaaataaaagatgtgccactatttattaataatatctcatcagccaatttcacatgtagtaaatcacaacaattagagaagggaggggaaatacatttcagtcaagtgctatcgattatcagtggctggcactccttgagaggaagattcataggccacagtcaggcttgctgagaaaaagtactgtgatcaattagcaatgtctgctatgagaactgacagagaggagaagcagcactaataatagttattctacccatctgctagctgtcactctacaggacccctcaactgatgctccatgtcatctccatggtagtacacaaaagctacagaaataaataatgatgtcttctttacggcaggaagcttattcacatccatagatctcaaaaaatgaaacagagaatagaaactccgacaaaaaaaacaaaaagaagatagggtcagggctgggtgtggtggctcatgcctgtaatcccaacactttgggaggtggaggtgggaggatcccttgagttcaggagttcgagaccagtctgggcaacacggtaaaaccctgtgtctaccaaaaatacaaaaaatttagccaattgcagtgatgcacacttgtagtcccagctacttgggatgaagagggaagatctcttgagccctggcaatggaagttataacgagctgagatcgtgccacagagcaaaactctgtctcaaaaaaaaaaaaaaaaaaagcaagaaaaatggggaccaggtgcagtggttctctacaatactactaccaccaccaccaccaccacgactactactactactactactaataataataaaaacataagctaggtgtgatgtgcctctagtcccagctactctggaggctgaggcaggaggatcgtttgaacccaggaggttggggctgcagtgagctatgattgcacaactgcactccagcctaggcaacagagtgagaccctatctccccaagaaagaaaagaaaagagggaaagagagaaagcgaaagaaatagaaaggtaagaaagggagagaaggggagggaaggcatgggaggggagggaaggggagaggagggaaggggaggagagaggaggggagggaagggaaatggtttccactttgtatcaagaaaggtctatggtccaactcataaaaaactgagggagcaggagctgagcttctgtaaatccacagcttaccatgattgaaaggaaggttaaagcagctgctatagtttttttttgtttttgtttttgtttttttgagatggagtttcactcttgtcacccaggctagagtgcaatggcgcgatctcagctcactgcaaccgctgcctccggggttcaagagattctctcacctcagcctcctgagtagctgggattacaaatgcccacgaccatgtttgactcttttttttttttttttttttggtatttttagtagagacagggtttcaccatattggccaggctgacctcagatgatctgcctgcctcggcctcgcacccccccagctggtgctatagttttatacattgtattctctgattcctggggaccccaagaaggacaaaagaggatcaggacttgtatatttttggaaaacaaggaaggcagctaagaaaactttttaaaatgcataaaagtggaatcaaaaagagaacttaagaccttggtaaaatggacattccttttagcccaaatcaaacatcattacatgacagagaaattttgctctttcttcgagggtttgtgttctcaatgttctctggaattgccgttattatctggggtgggagggctgcttccagtcctggtttttatacaacccacactgacctttggtggtgcaaacttacttccagactgttcagtagtgatgtttctcgcatgcccatttggggagatggaggcagaagggtatatcttcaatgaaaagtcattaaaatcgcttttacatgtttaatattataagtaaaaaaaaaaaataagaaaagtttaaagcattaaatcaaaaaaccaaaaatctttttggataaccagattatttgccaaatggctgtcagggacaaacacctcaaaacacaacggagtaaaaggacactaaccattcattatattccaactcggaattaatccaatcagcacactcatcctccaccactggagatcatccgacaaaatggacaagccaagagtaccaaagactgtccttccaaaacatgtcctctgccttcacccttgcaaaagaactgacaataaaatatgggtgagtggggggaggcgaggatgctcttcaaatccttggaggcacaagttgcaccgcctacagaaagtttcgtcaccccaaggacatccccaagaacaactctttgattttgttcagaaaatgggtgtgctgtgggcagagatggaggctgtcctctctgaggtgtctgcaaagaaatgtttagtgcagatgagtctaaggcattttcctctccagttatgcacaggacaaaagctaacatttacattattcctctgtgaatgttcaaagagtgacattaggccaactgtggataagatgattgaaaatggaagcactgtatggaaaatatcaggcagtaatcatatccaggagccagtggcccagagatagaaacaccctgaaaaccaattgatactaatgaatctgcagcttcagggcagaacagggcaggaggaggggtgaaaattttaagcacttaacaagtaagtgggcgcatttcatgctgggtactgatctttgccaggacccagtcttcctatggtcatctcacatctaataccctgtcccttgacttctgaaggaccaaaaagtaaagtgagataatatcccacttgaatgtctgcttttaatggacaatgtgacagctataatttccatgtgctcattccagtgaaggcttccatttattctgatggggaaaaaaaaaatcttagcaaagcgactgtagatctaagtccccttggattttaaggactggcatggatgtttagggaaaaactttttggtgtataactcacttttctgtaggggttggggttactgaaaatttacaattaaaattatgctttccctagatcatctatataataaatagaatgtaggaaagatgtggatctttaatgaacaccgattacgaaacctctagaaaaaaattaaagactctttttataagccaaacaacattgctttgatttggcaaccattgaatcttgacatcttcggttgaagctatgacatttcttacctgcctttatgtagtcaacaagcttcctgaagtcagggagcccaccacgcctaataaggcagggataaaatcagtatttgttaagtgatgtacattcatagaatgtttctcttttttttttctcttgaaatggagtctcactctgttgcccaggctggagtgcagtggtgcaatctcagctcactgcaacctccgcctcccaggttcaagcgattctcctacctcagcctcctaagtagttgggactaaaggtgcgtgccaccatgcccggctaattttttgcatttttagtagagatggggtttcaccgtgttagccaggatggtctctatctcctgacctcatgatccacccgcctcggtctcccaaagtgctgggattacaggtgtgggccaccgcacccggctaatatttctctctttaagaaactatacttacacaatactgtaaggtaaattctgtactaggtaaagaacatatattaggagagtatcaaggagacaaatgcatctatttacctaagacaaatgccccagtaagagcctgtggctccaggaccgcatgtaacaattcttgcaaataatcaaagcccaggataagagaatcacctaggaacattcaaggaatcccattctctcctctctgctgacctatgctcatggaatcatcatagcagatgagccaatatttactggcatccaggtcacaagctgggtatagaatagaaacattttgcaaatccaagttctctaaaatagtggggtaggtgctatattctcaatttgattaggaagggcaggatgttgaaacaatggaagggattacctctttagtgtttcccatgtagaaatatttgctgtgtgtggcttcatccccaagtatttcctgagcctctgctatgggccaagttctctgtaacatgctttcattgcagttctcgattgactttttggataaatctttgagctaccaccctccagcacccacgatctaccagtcatcctgtctacagagatatcatgtagattctagagcttcattgtcccacaggcatataatgagagccacagaggcaagccacatgtgtaattttaaaatttctagcagccacgtataaacaagcaaaaatggctgggtgtagtggctcacacctgtaatcccaacactttgggaggacaaggcaggaggacggcttgagcccagaagttggagaccagcctgggcaacatcgggagaccttatctccacaagagacaataaaaatcattagctgggtgtgatggtggtttccacagtcccagctactcaggaggctgaggtgggaggacagtttgagcccaggtggctgaggctgcaatgagccataatcctgccactgcactccagcctgagtgacacagcgagatcctgtcttaaggaaaaaaaaaagaaaaagaaaaagaaaaaaataaaataaaaaagaagtagtgaaactggttttaaaaatacaattgggccaggtgcggtggctcatgtctgtaatcccagcactttgaaaggccgaggcgggcaaatcacgaggtcaggagtttgagaccagcctgaccaacatggtgaaaccccgcctctactaaaaatacaaaaattagccaggcgtggtggtgcacgcctgtaatcccagccacttgggaggctgagacaggagaatcacttgatcctgggaggcagaggttgcaatgaactgagattatgccactgcactccagcctgggcgacagagcaagactccatctgaaaaaaaaaaaaaaaaaaaaaaaaaaaaaaaaaaattggattttacttaatatatccaaaatgttttaatttcaacatgcaactaatataaaagatgaatgagatagttaaccttctttcttctttttttctactaagtctttggatgccagcatatattttatacatatggcctatcttgattggggctagctagccacgcttccagggctcaagagccacatctggctggtagctaccatagcagacagtgcaggactagaagcatttcaagatcctggcctggaagagtttctgtgtggtaagggaaactgacactttacatactgtcatcacttcccatgcttgaattgggattgcagagctatggagccaaggaacggtgctaggaaaggagtatcaggaagcacagagtttccttgaaatgttcctactgctttctctacatgtggcctgcagtgtgtataaatgaaagtgcaagcaatgaatccatacgtgtacatggggatatgtgtaaacacatatggacccacatatctataagttccacagctgatattcattctgtcacctgtcaagataacagtaaggaaggcttcaatcaaagggaaggagacagcacagcattctcctcccccaggaaaaaggataatttaacaacagtctcatttatgtgtctggagggggaaggggagaaggaagagaaggtggctccctgccaggaattgacgttatactaaaagactgagaaattaggagattctcagttacttaaggcgcacatttagtccgactctccaaaatataaggtaactacgaaaggctttacatcccataggcactcaaaatatatgaaattaataaatcaattaaacagtaagttaactaatttaagagaacaaaacactctcaggctacatatagattagcggggaccatgcagtggtgattcagtgaacaagggctttgcaggcagacaagcagggcttcaaagctcagcttggtcactttctacctgcataagcaagttattcaatccgagtgaatgtctgcttcctcattagtaagtagggacaaattacagttaccttgccaggcctctgtgaaaacagagtatgtaaagtgcctaggctgctacctggaacactactgccgttcaataaatgaatgtacaaagtataagcatgcctctaaaggggtgtgggggggtgtgtgtgtgtgtctacaaggaaagggaagattcaagtgcaacagccaggagtgaggactctggggttttcctgaaggaatacttgtcttggttccagacctaacagctgtctgacctgggacaatgtctgcatcacagttgccacatggaaaagattagaataacagcacctatcctgaaaagctattggtaagattctatgacattaagtatgacaagcgttcacaacagttctagaccacagctgtagctcagtaaccaagagtgactattatcgttacaggcattcataaataatcggggctgaggtggcttcccatctaggattgctcctgtccacctgcaagcacttacaagtggctcccccacacaagggagggacccgggaagaggaggttgaagaggtttacaatctcaacatcatcatgtatatttaatagctttacactttagagagcattttcttctgtattttctcatttgatttctttcttatttcctcaaaagtcttcaggaataagcaagtccatttcaatcaggaaatatttcttcaatacctacttatgtgcaaggcattagtgtaagtgctgagaattcagataaacattccttgccttcagagagcttatgctctctgttttcccaccttcctaaaagtaggaaatttcacagtgggaatatgtgattgcatttgagcttggtctgtactgagaaaatccagtctacatgctgggataaaaattaaaaatttccacactattatataaaatcatttctcctcttccctgtctccctcaattatattgaaaaccaaaaagctgcccaggcacggtggctcatgcctgtaatcccagcactttgggaggccgaggtaggcagatcacgaggtcaggagatcgagaaccagcctgactaagatggtgaaaccccgtctctactaaaaatacaaaaaatttgccaggtgtggtggcacgtgcccgtaatcccagctactcaggaggctaaggcaggagaattgcttaaacctgggaggcagaggttgcagtgagccgagatcacgccactgcattccagcctgggcaacagagcaagactccttctcaaaaacaaaaacaaacaaacaaacaaaaagaaaaccaaaaagctccacatttcaaaaaagtataatattggatatggaattatagccatagtacaagtatttctacaaggttttttacacacactttgaagcccatggtatttttgaaagcatgtaaaagcaggaaaaagaataacgctttttaagtgttacactttgctttaaaacagtctgacattgtgtcaagtgtgacagcctttgcttaactcaaacacaactgggagacattcacctcccctgagatttccaaagttggacgaaattccatattccagttgccactgctaccaggctgagtgagccctatgtacaatttgccatggcaataccaggaaatttctgcctgtcaaaatattagaaaaggcagcctcctatcagagaactgctgggggcagggttgacaatcaactaggaagaactttgggtcaggggatggagaactggggggcttcgaaaggaagtacaagactttcacagtcccaagaaatgagaatggaggcagccgatttctattttattttaatacttttttccatttgctaaggaagtagcctgcagcagagtcaaacagcttgaactatttttaggcctatgacccttttaaaaacacagtgctaaattcaatcctcagttacacccactcaactcccactggcttcggcgagagccatggggagaatccgttcacgatgtagaagagtttagtgatgctctttgcattctttggtttgaatggaagggcagtgtactggccaaaggccatgaaaaggcacatggctggtctcctggctcaagcagggtagcagcgatgggcctacaaatggaagagcatctatgtgcaaagcgtttccattcttacagaagtggatgaaatgggtggtttttggataatccaggcagaatggggggaaaaaagaagttccttttgaaaatgtcattcagtcatatctcagaattgtgtttttttatttttttttttagacggagtctcgctctgtcacccaggctggagtgtagtggcgcgatctcggcttactgcaacctccgcctccggggttcacgccattctcctgcctcaggtcccgagtagctgggattacaggcgcgtgccaccatgcccggctaattttgtttttgtatttttagtagagacagggtttcaccatgttagccaggatggtctcgatctcctgacctcatgatctgcccgccctggcctcccaaagtactgggattacaggcgtgagccacagcgcctggccagaattgtttaaaattataatctcatctatgaaggcccagatttgaagaatcttaacagtcaagctaaattaaacttttaccttcgctgggcgcggtttctcacgcctgtaatcccagcactttgggaggcttaggcgggcggatcacgaggtcaggagttcgagaccagcctggccaacatagtgaaaccccatctctactaaaaatacaaaaaattagccgggcatggtggcgggtgcctgtaatcccagctactcgggaggctgaggcaggagactagcttgaacccgggaggcggagcttgcagtgagtcgagatcccaccattgcactctagcccaggcgacagtgtgagattccatctcaaaaaaacaaaacaaaacaaaacaaaaaaacaaaaaaaaaacttttacctccaattaccataagggagcacaggaaattcactactgctgaaagcaacacaatttgtgaccataaactacagaacggtgggggaaaagccatcattttaaataataggtcccaagtctgacttaggggcgagtggagagcatttggcgtctcaaattactttaacagggggccctgtcatatcccatggaaaggacactccggtctcccctccaccctctaatccttctttcttaaaggaacactcagcaagataatgaatcctttaaatgttacatcttctgtcgtgcattattgtggtgccgaaactcttcacatcaaacagtcatcaggactattacaaagtgggcttataagagaggggctgaaaaggagctgtgtgaaaagaagtggaaaattaaagctgaagcagtcgaagaaagggcttaatttactggcatgtacagtatgcaaatgagattactctcagcttaactgcatcatttatgtccataataacggcatcatcattacagggctcaaattaaattacaccataattagcatatcaaagtgattggttaaagtttaaaacaaatacccaattttgttaatgaacagctgtaattgtcatgtacacttcagtgaaaactctctaaacaaatatatgttttagaagagaggaagatttttttttaagcagacaggtctgtagcagaggtaaattgcctaaaaaaagaatgacatggactattctattaatgttaatatatgctgatcattttcaggtaataaaacattctatcaaaacaaggcttcgcttatatttagacaccttccctgctcttgaaagtgacaaaccaccagaaacctgcttctacttgcagcaatgataacaatgcaggggtgacctgtctcgaacaagcaaaggacatgttcggtaacatgctattactaaccccccatattcatttaaaagacattcgtgttcaaatcgtgctgagtcaaagctgatttttttcctcattccagcccaaagagggaagagtgacagaaaacttgctgcacctatggcatagaccagaacgctcctaagctgatgccctgataacatattagacagcctccaactcaatttctcctcatcgaatcatagctacacagcagtttgaaacacacagctgcactagggaagtttgctcttccatcattaaaatacatcaggaggtacagctagctattgtcaattttggctggaatcagcatgcacacaaatttcgtatatgtgaaaccagacactaataataagcttgtttccaaacctttttgttataaccatttaatgtcagaagagtttctatacaaaaagatttgtcaataatctggaggctcacatgtgaaaaagctttccgcctaagattgtcccatttcttaacaacgtaccccatatgtcctctgagacaactgtgagggtacatcgctgtgatacacagcatggcaagccaaaatatattttgcccaaaaaggaaaaaaaaaaaaaaaagcactttcaaatatacttaacaagcaaattgaatgtcttattaaaatcgtattatctaaacagtgttcaaaaatttaaagaaagtagcttttcattttattcatcgaagaatccattaaagcttaggctctgaagtagtatgtaaattatgtgcctttcaaggtagagctagggcaaattcactccatcaactaatgatgaacctcattatgtgcagggaggattcataatgaggaaagagccacccgccattccatgttctaacataaatccctgtaaaatttgaatatctccccgtctaattaaaggctactaattccaatcaccccctccatggccccaaagtaaaaataaacctctctaaaagcacagactacagttatatttctaaagcagtactcgatcctgtttggactcagaaccttccactcagatgtgtttttcgacaagcataattagcagctttctaagatagaaacttaggggctgctcaagctcattttggttaaatacactgaatttctatttttcaaagagcttcaccttgacagggctacagtgcatgcacagagatgatccgcagccaagaaaccaacaggaatgtgcgagcacagtcataacgtaaaataaaattcttagcactcgagtcccgtgctgaagctgagatgttcagaaaaagccaagcactgtggcatgaacccgagattgcatttggacagggatgtattcaaatctgcttgggaatgacatacttgattctggaacaaactgctcacttttaacgtggtttgaactaatgaacaagtacgtcccagcatctataagccaaagaactattccctcttctaatcaccaactttgattttttttaactgaaaactgtagaaagaaaatacatcgttgccaaacatatttattatgattaatagcctgtaatatccctcaccaaggcttaatttgcacttgttttcaattatgaagctgcaccactctagtccagtccccttttcaggtggagatgaatttcttgtggtctttactctttctattgtattgccacccagcaaggcacaattagttaaaaacagtaaacctccaccttggctccaacagagcaccagattacacaaaattagagaagaaaataattgagaaataagtgaaggtgtccaaggaattaaagcaattagaccaaaggggaaaagaaaaagtacatagccagtcacccaaacacaccttcacattaaaatttaaaagaaaagaaaaaagtcctaaatctgttatttaattttgataaactcaatacagtccctcatcagggaatcttagctgctgccataaattcaagcatccccaaatgtctgaaaccccagtttggtaataaaatgtacacatcagtgttacaccagtgtggattatccaaacctaacgagtccattctactaaagatgctgccgctactttaagttgcataaaaataaactccactacataaaagctgccacagtgcgtgcgctctcatccctcggctccaagcatgatctctcccccctcttttaggtcagccactcatgcattaggaagacatccctcccaaaataacttggccctccccccgaagcacagagttgagcaacctacctttgttctggagttgcagataataacaggcaagcctcaagaccatgaggatttggaaaagatcaggagagttgaaaaagggaaaaaaaaaaaaatagaagaagaaaaagaaaaagaaatacgcccaagtagagaagaattggaagaaacagcaggaaaaggcttctaatgaaactgttgtggctgccacagatcgggggtgttttcagcagtgtttacaccacaccagtgagtacacacctctgctacatctcatccacaactggtggcattttttttttctgaatccatgcatgacaattaaaagcactgcacctctctgtttgggagggggaccacaaaagacctccgcaatatttctttacaatgtctatatcactgatgagcattagtttgagtgacaaaggtcccaggctaaatcaacattcttaccttaatgttcctagtaaaaggctccaggaaacataactcatgagatatgtatgcaaagatatgtctcaaggaattaatccagagccctcagatgaagtgaggggggaaaaaaaaaaaaggaaaaaagaaaaaaagaaaaggcagtggcttacatttccaaacaaacgcagctcagcctggggaagcgatggcataaaaacaggtttgcatatacagagctcagtggcagaagcgagagttccgtaggatttatttgacacttattttccgggaagccttttgtggagttgtaccgtttgtttcttattgtctgagaagcagttaggagctttctcccggagggggcctctcaacccctggcttggcctcctctgacggggaggtaaccatattaggatgtgtatggtaaagtaaacaataacatagttgcaatgaaatggaatttttttttctccagctaatggtgttggggtcagtcctgtcttttcagccattcctactaattttgtttcctagttcaaacaggccctcctcctccttttttttttcaagtgttagctgtttccaaatatctgactgtaaatttgctaagaatgtttgcaatgtaagaaaaggcttttaacatccaaataaagaccgtgccagtttaatcattaaaagggatgtgaattttcaatcccttgcagagatacaagccttctctacccacccaccccctccccatctttctctgaaggttaaaattacttggtcatttagaagtacctgctaaataaatcagatttttaaagaacaagaccgttaccttcataaaaattcctcattcacatactgtgtcactgagtgaagagtcttaaccattcatgcacctgaaaatttattacctgaaatttctaggatggttacttttacatgataaagctctttcccacctcctccaatcaccaccccccccacccacaaataaacaaaaagcataaaatactgttgtcaaatcatcctttagaaattagctaataaaataaaaaatattatgaagaatgagttcccaaaatgttacatttttaagaaaagttctgcaggtccaaagacaacaataaaaagtaaggctgctttcttgccatgatcacttagtacgaaaaccaccccccccccaccacaaagcagtgagtgaaacatcccactcaaaggtcagggctaggctgataaggagggtaacaatgctgatggggaccacagagaactaatctggaggcagctgagcagcagcgagccagctctggccccgacgctgagaaggcttccatatctttattccctaggtgagagccgtggctgctcttgaaagcagtttccccatgagatcagccaaaatgagggtgcttcggtagcggccagccctcggtgtgcaaggacgggaggacagggacagtgatgctgcctgcgagaacccgagaaaccttctgtgtaccaggcatcgaggcaaaacatgtgccatgagcaaaagggcacaggcagggggataaatgatacatgtaattaagaatgaagccaggctgatctagcaaataaaatgcatgtggccctggtgaaacttccaaagctcagaaagagttcctccctagcctggaacctctgggctgccctctaaactgccttggttcttatcagatccatatcgtacagaaacctaaaacccctgcaactcatgttttattaaaacatgtttagcattctttttaaagataggttttaaccccaaatacccatgaaattaaatctcctatgccacttatctgcactgctgggcaaaaactaaagttgagctaaacagagagatagcaaaatcaataaatcacacgaaacaagtagcagttcaaaagttcaaagatatgatggccagttcagcgcgtcttagcactcacccaataataactcgtctccgtcactcttcatcgtatagacaatttcatggcatcattttcattagcctgtctcagagaaaattgctagctatttatgtatacgctcaaataaattagccatttcatcgagcaatgtgattcttataaaatacattaacacaatactcgattttccagttgcagtaaataaataaatcaatacattcaatacagggtgattctttcactgtggcgctacagctctcagcataagtgtttttattgggtttatttgtttcaataaaaattgaaatgggccagtgatctcagtgctagcatcttaaaaaaaaaatccatccaatattggggaaagtattgtgcagaacattcaaacttataattttattcaagaatcattttcattatgtattattccacaacctggttctgttggaaaatttcacaaagggaaagggggaaatcctgccaggtgtttgactctggtggcgtttctgtgctgcagaccccagtctgagggtgatgcttctgagagacagcagcacttggctgagctgcgaccttctgcctggaatgtgcctcttccctgggcagggagaaacgacaatgggacaagtgccagatggcctcctctgtcacaccttacggaatgccattgattgtggctcagagaaggccatttattccaacctctgggggaaagaccggggtatcatgactgcagggaagaagagagaggtgtgctgctgctgtaaataaaatcaggccgagggcctgcgagcgactttggtggcgaaatcaagacacaccaggcaggagattttctccaagtcactagcacaatgaaaagggaaatatggtagtggatatctgttgtttttgtctgcccaacatccatgctcccctttctctgatgacactagcctgatttttcttttggggaaacgcccattctccactctcagtcctaatggttcacaggaggctgatgcatctctcagctccagagggtggagccataacccaagtctgaccaatcagtgagttctgctctgccagcaacactgattggctgatggatggacatgtcccaagaatgatactcaactactagcattccataggaactattgggagacagaaaggctgtccttctgctggcttgctaaacttttaaatgcatgaatcgggcttgcctccacaaaaagagagctggctgaacagaggccaggacacagcggcaagaaggtgagcacaatagcaagacagattcctaacaatgctcacagagaacaggcctcctcttggacttgtcaattacacaagccaattaaattcccttatttgcttagccagctggagttggctttgggtcatttgcaaccataaggtgccacacaggagcccaaaatagatagtgttctatatgtagctctcctactctacaatatatgttagcctttatgggaaagcaaaccaactaagcacacacaaatcaattaactctcataactaatattcaaaatctgtaggatctcgtgtttcctatgtaattaaccagttcatcagccatgctctcttcctgctaataatggagttggaaaaagaagtcaggacccacagtcagaaagaactcaagatgatctcaaagcaaactaaactggaggtctaaaaaaatccagcatggccaggcacggtggctcacgcctgtaatcccagcactttgggaggccgaggcaggtggatcacgagctcaggagttcaagaccagcctgaccaacatggtgaaaccctgtctctactaaaaatacaaaaattagccaggcatagtggcgcgcacatgtaatcccagctactcgggtggctgaggcaggagaatcgcttgaacctggcaggcggagcttgcagtgagccgagattgcaccactgcaccccagcttgggcaacagagcaagacgtcatctcaaaaaaaaaaaaaaaaaattcagcatgaagtcgaatacaaacttaagaagttcctctccaggctcctcatagttatggttcagtcagggatggaccaacctatgagattaggggaatggccagctggttcacacaataggcctcaggcctggtgtggagtccttagtcttgtggtcactgatcacaaaaaagccagtgggaagggtaggaaggagaaagagctgcattggtcattgaaacaaggccaacacaaacttcccagccccagcactttctgaatccttttgtgtagaatttctgcagatgctggaaacccaggaggaaccaaagtgaacatcctaatttagcattggaggaaagaaaataactgaatggagtttagagtcatgtggatgccagaggccataggcaagctagaaacaatatagtaagaatatttaagctgggatggagtgggcagggtcctggcgcctgcctggcatttagccctggctccagcccagccaacccagcaaacagggccttgacttcctcttcctgggtgggaatgaaccccagatcaattcagtcagcctttcttgggactagtaaccatagtaacataaacaataacaaaaacaacaatagaagctaccatttattcttaaatatgccggcagttatactagtcactttacatgcatttcctcacctaatctttacaattgccttgcaaaatgcaggctgttattatttccattttgaaaatgaggagactgaggctcagagaggttaaataatctgctcttggccacacaacagctaagcagtggagtccggatctgaacccagccctctggctgagacacctgatccttggacaccatattggcatccaactgctgctaagcaggaatgtcagtaccagcccctgttgctcacacaaatgccctgaataatgaagctggcctggagtacaagccaatccactataccccaagacatcatgacttagatggctggctccactcagttggaagggagagggaaagtgaggaggggagaagacagaagaataaagggaaacaacaccatggctgccctatttcttcagcctcagcagcatcagtgtcaaccagactccccatgcagcccagtggatcctcccttgcctctaactgggggccatgggactcagaacaagtcttttctgaacgtaatcacaggtttaaccctacttagcaccaatattatatccagaacacatgttgtctgacatctgtataaagagaattgctttaaaacttgaactgaggagctgggggccacagaagtccaccccaccagacagcaggattttttaacctcagtactaggaacattttgagccagaaaattaattattcattgtgtaagctaccctatgcattgcagaatgttgaacagcattcctagatgctagtagcacatgcccccaccgcattcgtgacctccaaaaacgtctccagacgttgccaaatgtcccctgctggggaaagtcattcctggttgagaaccactcatctagagcatcactgcccaacagaactttctgtgacaacggaaatgttctatgcctacaacatccaatagggtagccaatagccacatgaggctcctgagcacttgaaatatggctagtgtcactgaggaactgaatttttaattttatgtaagtttaattaatttaaatagccacacatgcctagtggctgccatatcttggactgtgcagttttagagggggtcatagaatttccatattcatgacaatcggatcttaagcagatggatacttggtttccagtacaaaattcttcatattcattaaaaattgtattttcttctcaacggaaattaataaactctaaaattgaaagtgttttttgcgttgggcgcagtggctcacgcctgtaatcctagcacttttgggaggctgaggtgggcagatcacctgaggtcaggagttcgagaccagcctggccagaatgatgaaaccccatctttactaaaatacaaaaaattagctaggcatggtggcgcacgcctgtaatcccagctactcaggaggctgaggcaggagaatcgcttgaacccaggaggcggaggttgcagtgagccgaaactgcgccactgcactccagcttgggtgacagagtgagactgtgtctcaaaaaaaagaaagaaagaaaaaaaaatgtttttggtaatgacttttttaaaaattccaatcttactttgaatcttttcatcaaatttaagtaaaaattattttttataaacacggttttgattagaattgtagatttatataattgagtaacttgaaagctttatgcctgtagattagaaccaagtgcactctttaagaagctagttgcaaaatgatttcttttttcactgttagaaaaatgtacttgctactctctttgggacacattgaatgtaaactgtgtcttcagagacatcagctatcctgcagaaagtgctctgctccagcaactcaaataactcataccatttggaaacgagagtaacactgtgaaaagtctcttaagcagtcacgtgcctccatcctgtccctcccctgaaaaacccaaaatgcacacaattcaggtgaagctttccactgtaactcaaggtgtgatggatttttcagcttagcgagaaagattagtattgatgtaacaaagtgactgtaaaaccagccatacaacgttataaatacatcatagctgtcaggatgtttctttcgcaatgggcaaatacagaaccaaagaccatttggaagcgggggtggtggtcatacacaacaccatgtgtggggtgggaaacatccagaactatggcgctgagcaggaagctgagccatctacaaaatatttcctgagtgatatatagagagcttaagatgggataaagcctgatgatgaacaaagtcaacaaagtgcgttggagttacccacactgtcttgataccaagaaattttagctttagcaatgatatgagaatccaaaagtacactgtcattctgaataattgtatatgtatctcctttgtaggctcaacgtagactttaggttaacctccactggtcaagtatgaagtgttatccatatggcacacactaccggatggcaacccaacagccaatcccaactcgttctttctcttctccctcccttttctcccacctcctactccccaagctgaaaaaatgagatgctcccccttcccagctttctctgcagttagggatggtgatctaatttagttctggccaaaagatataaggggaagatgactgaaaagatataaggggaaaatgactttttttcttcttgataagaggacactaagagatctctttctctctctctcaccgctctgtccttttccttactttgtgcctttaaatgcaaccatgtaggaaagtgatgcctggtgcttcagcagccatcttgtggcccagagggaaaagttgaaggaatcaaagagcttccctaaccccacactcagacattattaagatgccaaaccaatcctggcactgcctatcttcaaacttctgggcaagtaaataatgaatttcctcatgtttttagccactgtggagtagtgaggtgttccatgaacacatgctaattgatatatcccaaattccaagaaagacgaaagaaaagtcacttccttgagagagtggagctaataaaaagtgtaattaccaatctcccagtatctaaattggttctctgagaacttgtcactaagaaaacaattcttagtccttagagtatccctgaagaacaacaacaatgcctcaggccccctgagtgccaacttcatgcaaggcttttactgaagtggtttacttacgtcacccagtcttctgacacccttacttgacaggtactatgattttcccagtgtttgagataaagaaacagaagtggatggaagtgaaacaaaatgtcctaggccaacagctgttacagaaaacctggtcccacagtagggaaatggttacacatgtggcctcaactgcaaaacatggtcaatgccaaccgagtgataaacctttcttactctaacatgtaacagcagacacctgggctcagggcataggttacacacagtcattacagctgtgcctcagtttgcaacagaaaccaaaggaaggattcataggctagtcctgcaatggccccagatgctgcctgagacagaggtgacagcagcatccacaatgcagctgacaccatgagcaggcaagggtgtcgcttcatggctatctgtttccaggtactgggccaagtggggcatggcctgatgcatatagtgcctccatcccccaattttaacaccaaaagaaaaattaaaaggtcaaaaaaatccttcaagggaagttgctaaaagggggcccatgttaaacagaagtcacttagaaacattaaaaggcaggttggtgtgttggatagatgcagcaaatgcactggtgtggacagctgggcatgtatcttagggtagataaagaaccatccggcaacttggcttcataatttttggctgtgtgatcttgagtaattagcttaacctctctgaacctcaggttttccatctttaatatggaaataatagacgtgtttaactttagtgagttgtggtgagaattaaatgaaatgatacatgtccaagttctgatcttttacacagcaagtacacaatgatacttagctaccatcatcatcatcatcagtatttaatgataataaagtgcaatattactatgaagtatgtaacccagtactcagcatgtgctaggttctcagtaaatatttactccttttctcttctctctcccttccacaaataactcgaagatttaactctgataagatgtacctattgtaattttaaaaaatattaataagctcatcccactaaaatggtactggacttggtgttatggtagatacaaagacaaagaaagcttcaatggacatatgaccacataataaatacgccaaatgaaaaaagtatgtacccgttaaaaatgtaattaattaaatatatgtagcactaacatttaaaaaaatgttatacatgtaaggatagcccttccagttactaagtttctctgggtattaagaacagaggtagttacgattttaaaaatattttgccttatagttcaaattttctgctatgaacatgtacaccttacaaatttggaggaaaagacattactttgcaaaagataaaaaacagaagtttctaccttcctgaattggttttctaggggtgaacagttaataatctgtcaaccacataaatggtaacaaatctataagaaattttaaaatttctaaacatttaactaatccaacctccatgccttaataagttactctgggtattttcctcccccctaacttcctagtctcaccagaagtaaaattttccccttggtttcaacctgcttttgtcttccctgtaagaatattgggaggagaaaattcagagtacatcttcaaggcccccgcaaagtgtgactagaatgtacaggtaggtaggttgggcacacaaaaataaataacctattaagagtcatgactactgggctgacctcactcatggaggtattgtggaccggcatttgctaaaaagtttttccttattggttggctggcctcaaagagctctgcgaatgccaggacttatgataagctatgacacacttaactgttacatattaatgttcatgataatacaatctttcatttgggtgatttaaaagtccctctagtccgacttacagttagatatacactgaatgcttcatcaatcacaaccatttttattctcaatcttgtgcaaaaatactagagaaggtgaattccagttacacactgaagagggctttactgttagccctgaaaaatttcactcttttcacatgtacactggattccaacagtttctgcctaagcattctatttacctgtgtctttcactgtagctgatcttatctacagggtaaaagcaaatccacattcatatctctactatagggtcaaactccatatcttatatggagaaagcatttcagttatgagcttgacaaaatgcccagcattgcaacatttgaaatacttgggagcaagcagcatgagaaggtcacagcaacttgaacggagctttttaaaaggaggatttagaaccacctcacagcaataaccaatgggcccacttaacgccaagcagtgagtcggtgatcacacctaccctaataaatgcacttgaaagaaactacaccctttttccattcctgtaaaggcttgctgtagtttcatggccaaaatcttcccacaattaacctcggacctatagatcataaggcaactcaagacagaggcagcaatcagactagccaccatccaaaatggtcttgtcctaccttgactgcaattatcttctaaattagaaacacaggaattgtttaggtcagaatataatagcccgttagccttacactgtccccatgtgcaacatagaagtaaatgcaactatagagacagaaaaatctgtaccccgaaatgttttgcttggggtgggggagagttaagcctaaccctctaaaatgaagttttaaaaaaatacctaacatatatgtattcaatatttacattttgattttattatgtttcctcgctttcatactcttaagttctcccatcttaacaatcttcttttaggctaataaatttcttttgatgcctaggtcatttactggttgagctcttaaggcaaggaaacactaaattattggaattcagtggggagatgcttccagggtaaaggttctctgtttattagcaaaagaaatgcattcaactaatttgacttgtaagtctgataaaatctccctggaaaaattgattcgattatgatgagtaatccttggagatgaaaaatgacaaatacacatattatgttttattatatattaattttaaaagggtctgaaacgaaactcaagtaagccatcttttagacgttggaaaatggcaaacttccccacaaactacatgcaagaagtaattaaagtaaatgaacatgaaattaaacagcacccctataaagtaggatataaaagtaaagattattagggaaaaaaagactgtcttcctggtctatattaatctcatgaattgtgcatttactctatttctcttttattatttgatgatgagtttttagagcttgggttttattaggactagttggacgaaggtcttcagcagcaagctaagctacaggtcttggtatgtcattacatctttcccaatgacgtaaataccagatgaagacatccaaggtaaaggcaggctcatcaaacttgctgtgatgcaaagctggaaggtttcctcacatcgtcaaagacagagtcaatagcctgctcagaaaggaggttgaaagtcacaaaagatgggactccagagaggaaactgcgcctctctccaatcaactccactattcctgtagagctcagggacagcaggggtttgttgaatttggtggtgggggcggggcatccagaatccattctcacttcaattttctgttttcttttcttttttttgagacggagtctcactctgttgcccaggctggagtgcagtggtgccatcttggcttactgcaagctccacctctcgggttcacaccattctcctgccgcagcctcccgagtagctgggactacaggtgcccactatcacacccagctaatttttttatttttagtagagatggggattcaccatgttggccaggatggtctcaaccgcttaacctcatgattcacctgcctcggcctcccaaagtgctgggattacaggcgtgagccaccgcgcccggcctctcacttcaatgttcttttaaggaactactttcccccactgttgcatgtaggctgggactcttagtcaagatcccctgccctgtcatcgccatggggtagatatgggacttagactaggcctgtctgattcatctgagtagactgatgtgaggacagaaacatgtttgaggagtactgattttagcagtggctgcgacgagctggggaagatactggcacttcctatatactgggactgtcctgcttcctatcttagccatcttctgttcattctgagctaccagctattcatccaatatcttcttttaaggattacctttaagttggccaaagggaatctctgttagttgtgaccaaagaactcaagcagtatgatgggaaggcccatgcttgatgctgattcacgggaggaagctgagtttattgaactcttgctgaatataattcacaatattgtgatatagtgcttctttgttatgggtgctcctaaattataaaaatttggctaacagtcacttaaagaaagaccagtggctgaacctgcaagtcaggaatattcttactagttctttgcaacacagttttggcaatatttaaaaaacgcagaatgggaccaggcatggtggctcacgcctgtaatcccaacactttgggaggccgagatgggcagatcacctaaggtcagaagtttcgagaccagcctggccaacacggtgaaaccccatctctactaaaaataaaaaaaataaaaaatagccgagggtggtggcaggcccctgtaatcccagctacttgggaggttgaagtgggagaattgcttgaacccaggaggcggaggttgcagtgagttgagatcatgccattgcattccagcctgggcaacaagagtaaaactccatctcaaaaaaaaaaaaaaaaaatgcagaatgggtaaaaagaggaggtgactaaaaggaggaaatttccaggatgcagaaagaaaaagaaatggagccacgggagtatttcttaaaggactcaggactcttaatctggatttccaggggccacagcaaatcattataatgtatttctcaggcattgtggtgaaaacaacatggacttttagaagcatgcagacctgtgtgcaaatgtctgcacttccacttaccagctatgtgacccaaacaagacacatcatctttctggacctaagttttctcatctgtaaaatgggggtaacaatcacagctagaactcactcataagctacttggcaggagcaaacatgacagtgaacacaaaatacctcgcagtcctgatgcacagtaggccctcaacaaaatggtaattgttattactgcgcttaataacatccacggagcgcctacgaatatctacatagtatgctctgggcacacaaaaataaattaaataggttcttaccttcaggcaagaatttgtggctttcgaatctgaaaagaacccactaaaatacagagcagacttgaacaaaggttataatgaaatacaaacacacacttgtgggagcccagacaaaagagtgagtcacacaggctgggttcaattgaaaaggcttcatagaagtcatatttgagccaagccttgaaggatgagtaggatgttaataggtaggagaggaggaaaaaaaagacagaggattggcatccaacactgaaggaagcagtaacaggagctatagaagttcaagggtagggcaaacaaagggcagaataaggggtctggtataagctctgtgagcattcctgtgtcaatcctgaactcccagcagagggccagtcccttaggtgacacccagatattttgtggaaagctaggctggaggaacttctagaagacacagagactggggccaggggatgaagagctttgaaggcaatgctaaggagccaagtcttcattctacaggcaggaaggcaaggacaggaagggcagaaagcaggagagacttcagaggtcaaataaacagtgtgtggcaattggaaggatgtaggaggggaatggagaagagagagctttgcttaaggctttaagtgtgggaacctatctttttgaactgaagcaattctgtgtctaggactatcactgataatattaacaaagtcaatgttgaccgcagagaaacctttgacagtagccctaagaatgggatgggctgaggccgggtacagtggctcatgcctgtaatcccagcactgtgggagtcccagacagccggatcacgaggtcaggagatcgagactaccctggctaatacagtgaaaccccttctctactaaaaatacaaaaaattagctgggcatggtggcatgcgcctgtagtcccagtgactcaggaggcggaggcaggagaattgcttgaacctgggaggcagaggtgcagtgagctgagatcgtgccactgcactccaacctgggtgacagagctaagactgtgtctcagaaaaaaaaagaaaaaagaagtaaagaatgggatgggctgccccatgggcatgagtgggcacggcaaccaaaggcttctaacagaacccagaagagcccaagcttaaagcacagacaagctacagtgtgaccttgcagagctcacttcacctctctgtgtcttagttttatgacctagaaaatagtgtcagctgcagtatatctttgtaaggttatcatgaagatgaaaagagaagacatgcgtaaaggattcagaatggtttgctgaactggcacatacaaagtgtttggtaaatattacctcctatcattcctattatttttcttattgtccaccaaggatagtgaaaaatgagtaccaatgtcccaaatgactcacttcctaagtctatgatccctgtgttggaagaaaactaaaccctatgggcgtctggtaaagggagacgaccccaatcgactgatttttcatagacgaactagatggtttgtgatgagtaatgataagaagaaaaagaaggatgaacaactgtaactgaaatagggttgtgatgaaacaaaagtgcctacaaatcaattaactatccatattaagaggaggtgcctatcacttagaacagcatattaacaagcactggggaaatacttagtgatgtggatgccacctgctagttacgtataaagtcccttaagacaagtgagcccagattaagctccacaggtaagcccctttggtggatagagggtgggggtgctgctggaggctcagcgtggtacccagttaggcagggacatgaaggaagaggtgaggaagggcagcagggaactaaccagggacactttcttttcttttctatttgagacagagtctcgctctctcccccaggctggagtgcagcggcgcaatctcggctcactgcaagctccgcctcccgggttcacgctattctcctgcctcagcctccggagtagctgggactacaggcacctgccaccacgcccactaatttttttgtatttttagtacaggcggggtttcaccgtgttagccaggatggtcgcgatctcctgaccttgtgatccgcccgcctcagcctcccaaagtgctgggattacaggcgtgagccaccgcgcccggccaacactttctaatacgtagggaaggctcggggcgcggggggagaaatgcagagatgaaatgggcacatgatacttttacccttttggccatgttttgtcaaagaatttatgggatgattcatttttgccaactatttcacatggtagtgctttacactttacgatgaagtctgttaaacattcacatgttcctaaaatggcatgcaataagtaatttaattatttctgtatcatatttagagcaatttcctttaatttttttttttttttcctgagaaggatttttgtttttctctgtcgcccaggctggagtgcaacggggtgatctgggctcactgcaacctccgtctcccaggttcaagcaattctcctgccccagccttccaagtagctgagactacaggcgcacgtcaccatgcctggctaatttttgtatttttactagagacagggtttcactatgctgggccaggctggtctcgaactcctgaccttgtgatccgcccgcctcaccctaccaaagtgctgggattacaggcatgagcccccacgcccggcctacagttctagttattaaagaacagaggtctccgagaccaaaagttaggggcaaaagctggattttaaaaaaagtctaccaattcacagtcccatgagctttcgaccacacaccatctgcccttctcctaaatgcaaattgctaataaagtttagaatttgttaaaccattaactctgcatttcctccttttgggtgtcctattaagctaagcaggagtcccctgggcacattaaggtaaaacagaaagagcccccgataatatagttcaagataagaatgtagggtattacacaacctatcatttataccttttaaagtaatacaggcctctcgcaaagctgtcggatattctaagtaattatcttccagcacattaaggtttgggctatattctctatttaataaatcgatataaataatgccacttttagtaaattatcactaagttttcaacataatatcaaatacattaataaaaaaattagattttttttaactttagtttccagttctgcaatctggaactaaagccaattcttgtattattttcatatatttaaatttaaaaaaaaaacataaaattgagcaaactggtataacacagagaaaaacagacttttatttccgatagttagaccaaaatattataatagaaatctacatttgctaagatctgatgtaatgctgaaattaacaagatttttttttcttttgatttatcaacatctatctacccacaataaaagaacacagaatactgaggcaggttagcaagctctgtagactaaagctgtgttactgagaaataatctcgaacaattgtgaaaacattcgcacatttcaaaatgactgtctctcttggtggcctgatctcccagctaggaaagacacactgatgttactctcgaggggacggaggcagaaagatctttcattgtgaattaccttatttgaatcactgcagattcaaaacaaaatccaacttcatagcctatggaatagtcgacattttccaataagagggtacacaagttacttggaaatatacttttggaactgtcctccatacaagtcctgattattaagtatcatttattaattcatcatccatttgtttgctgaacaaatatttgtcaaatcccggccgagtgcggtggctcacgcctgtaatcctagcattttgggaggccgaggcggcgggatcacgaggtcaggagttcaagaccagcctggccaacatggtgaaaccctgtctccactaaaaatacaaaaattagctgggcatggtggcacgcacctgtaatcccagctactcgggaggctgaggcaggagaattgcttgaacccaggaggtggaggttgcagtgagccaagattgcgccactgcactccagcctggcaacaggacaagactctgtcacaaaaaaaaaaaaaaaaaaaaaaaaaaaaaaaaaaaaaattgtcaggtccctactacataccagacactcaatgctaagaatacaaaaaagatatgatcccagcctgcaccatgactatcaaagctaggacctctttggggcagaggagaggggctgagcagatttctaatacttccagaaataaataagcaatagaatttttatactcatggtttacttccaacatcaaatttatgtagaaaagaaagaggctgccctttaaaagaaaaaaaaaagtcagcagatcaaaagcatcattaatcactgtctcttttaaattaaaaggtttgcaaaaaggtgggcacagaaccaacgtgggaaacaaatcattcccctcattgagtgagggtcagagtctaaatggaagagtcctccgtatttacccagctcatctcctgtgtaatggatttggaggagagatttccactggggctctgctaatttgaggcttgactttttgctttttaaaaatgacacttgggtggttaccctagtattgtgactagttttagaaataaacctttcaagtgttctctctgggaggtcctcacttacatgatctgacccggtagatcttgagccgttgcaaaggtgctccactaagaagctgtgggactgagtcttcgggtggccttgggactccattggcaaaacggctagccctttgaaagcaaaagtaaaacatgcccaaagcacctgagatagggcttctcacgcagtgcctggaagagttcaggagaccctgaaagtgattcatttcaaatcaggagtagctcagcaaaactaaggtcagtgtttttccaacccctgcccttcagaacacctctatactcaccctgggctaggtcacagggtgcagggaaagaaaacatggccctttttgctgtgtatgcagcacaaaggggacacagccatggacagaatcagacttcccgtcctgtggaatacctactgagagcaattgaaacctgtttaaaaactaaaagtaaaacaacaaaaccgagcctgtgcaacaccacgaaagccaggaataccagtggctgctgaaagaatataaaaatcggatgtgggggaattgggtttttattgttctgttgttgcttatcttgaattttgctgtctactcaggctggggcctgaattaaatgcttgaccttccttctcagtcagtgttcaacaactatgtatatcatgtcctacaacaagccagatcttttgtgatgtgcgaggtgtgcaggagtgaactctgttcctgacccttgaggaaggtgcctatgcttcactacctatgtttctacataaggctgctccacctactcaagttccagccatacttaagctactcctttgtggagattcactcacttcaaagctctactgaaaaattacttaataataataatgatcaggttgaccatactcagagaaaatccatattcctttttttttttctcttctgaaatagggtctcactctgtcacccacgctggagtgcaatggagtgattcacggctcactacagcctcgacttcccaggctcaaatgatcctcttgactcagcctcctgaatagctgagactacaggcacatgccacgactcccagctaatttttttttttttttttaaattagagatgaggtctcactttcctgcccaggctggtctcgaactcttggcttcaagcaatccttctgcctgggccttccaaattgttgtaagtacaggagtgagccattgcacccagccaggaaacccagattcagaaaggatatctgtctagagaaaaatctcattcagtgaatttaatacttacatacaactatgacttgtaagtccagagttttagggtaagaagcatgtaaccattgtacccaatggagaatttaaagctcaatgtagtttggtggctccaagatcaagccatccatgtttatcaccttatcatagaaaccaaatatcctgaagacttgccctggaatgacttctagaaagaagagattattgtacccagactggaaagctaaacaaaagcgatgtttttcaaaacacatgaattcacaagacccaaggcttatttatggtaaaccgccagcaaatataaaatccataattccagagtgcactcaaatgaggatgagaaatgcaagactcataaaatcttgatatcaggaatggagagccatgaatggtgttttagagaaattagttcaattcttaagtccttagacttcagaaaacattgccacttggagggatctgattagatttcctaattgctttatcacctatcctatcctccctggctggtttgctgagcactatattagagggtcagggaggttcccagcatccttgtcatctgtcttctactctgagtttccaaacacaaaactctccattcaaccattatcaccctgtagttcagctggaggtaaagaattacgcgattgataacagtcttgtattgggtactcccatcaatatgaaaaataactgtaacatttattgagtgttcattatacactaggctctactgcttttatattcaataatggatttaattctcacagctactttttaaaaatgggtaccatttccccctatcatacagttgagaaaagagatagttacagaggtcaggcagcttgcacaagatcacatagcgagaaaggtgctgagctggaatgcagtctggctcatctgattctagagtgtgcacgtatacacactcagaggttccagctgtaagcttcagagcaagtccagctctgttctgtgaagtgctagctctaattccaggaatctataggtgactgggggaggaaatacagaaagagaaaacaacacattctaccttcttttctctctcaagaaatttctggactgttcaacaaccttggccaaaatcaactatatctgccaaacttactgagccccgtgttagcgttgttctaggcacctcccacaactgacttgaagagaaatcacccaggagacaaagcacaggatataagaaagaaaagagaagggatcattttgcccctgatatcaaagaagcctcaagaactgatgtaaagaatggctcctagttccagaaatcccttggtagtgaactctgaggcaaatcctcaaagagatgaggaacacccactgctaatattcactcatccattagctcacctccaggcctggaaagccaactggatggttctctaggaggaaacagccagatgtgagacaaagatacctaggcaactagctgacttgacaaatagcctatctctctgtcttgcacacacacagaggcagagaacagaaaacatgcaacacggcggaaaatgtgcagacttaggtttcccaggctagctcttgccctagtaatgtacacatgttcacggtgcagtgataatttacagcaacaggcatgggcacatgacgcgctggaccgactccaaaagaactgataagagtatgaaggaaactgagaaccaagtgacaatcacccaaagacaaacctcattggaatcacgtaggagggggcgcgaaaagtgaaggtcacatttcaggtatcaaaaggcaggagctcatttcacacctcaggaaacaaggatgccaaaagttgagagcaaacctccaaagtgcaagaggccatcccggtctaatgacttggtgtcgtcttgaccaaccaggcacacagtgcgggaatggtgcctggtcccgaaacccatcagatggtgggttcaagttttaccactaaggaagaatttgctagcgctgcaaagatggatgaagagttaacacagcaagcaagccaggaagagagaaagagagtacataggtgtctggaaatgtgacagccttgaggcaaggtgagaaagccacctagcccaggactcacatccacaaagggccataattttggacttttgtttatttttttaaatttgtttattttttttgagacagagtctcactctgttgcccaggctggatggagcacagtggcttgatctcagctcactgcaacctctgccccccaggtttaagcaattctcctgcctcagcctcctgagtagctgggactacaggtgcccgccaccatgcatgactaatttttgtatttttagtagagacagggtttcaccatatgttgcccaggctggtcttgaactcctgacctcaagtgatctgcccacctcagcttcccaaagtgctgagattacaggcatgagccactgcgcctggcccccaacttttgcttatttttatttttatatttttgttattttattttaaattcagggtatatgtacaggtttgttgcatagatttattgcataatgctgaagtttgggcttctagtgaacccactgcccaaatagggaccactgtatccactaagtaattttttaaccctcaccttccccctttttggggtctccagtgtctattacttccatctttatgttcgtgtgtacccaatgtttagctcccacttgtaagtgagaacatgtggtacttgattttctgtttctgagttatttcacttacgataatggccgccagctccatccatgttgcagtaagaaacatgatttcattctttttatggctgcagttttggactttcaatgctctctccaaatcagatttaacctcccatcacagatacacagtgacaggagtgaatttaatccttcatcaaagaacttgaacctgcagatccattattgggccacatcacctcaatacatcagaagtaatgttttgaataaatcctgtgagtcacattattatcacgctgcattttatgggagagagtgtgtgtgtgtgtgtgtgtgtgtgtgtgtgtaaacattaacttatttgagttaaacattgagaatataccataaattttgtaaatctgttttgcctttgcattaaagattagtattaggagctctgaagcaatggaagtggcccaggtgtctctccacttttgagtggtccttttttcttacaaagaggttcaatattagaaaaatttaaataagtatacagtagatccagatggaaagaaatctaaaagaaaggactcgatggctagatgttcttgaagcatccaagagaggtcatggaaagacaagagtcatgtccttgagggctgcaaggtgactgagcatagaactgcatctgcgagtagaaatggcaaacaggtggaaatcactttgctgatgttgaggaccaaaaacaaaagcgattgtataaggaaggacaaggtcatggagctaaaaatgcaagaatagagacacagtttgcaaaagacacaacaggtaagggtggcagatgtaattatgtaaaattatataagataaaagaggttgaaccaggcaaatattatcacttctggtagacagggttaacagattacttaaaaatgtctgtgttgggccaggcgcagtggctcatgcctgtaattccagcacttctggaggccgaggcaggcagatcacctgaggtcaggagttcgaggccagcctggccaatatggtgaaaccctgtctctactataaacacgaaaattagccagtcatggtagtgggtgcctgtaatcccagctattcgggaggctaaggcagaagaatcgcttgaacttgggagatggaggttgcagtgagctgagatcacagcactgtaccctagcctgggcgacaaagcgagactccgtctcaaaaaaaaaaaaaaaaagtctgtgctttaatgattttaaaattatttcagcttcttttttttcttttcttttcttttttttttttttttttgagacagagtctcgctctgtcgcccaggctggagtgcagtggcacgatctcggctcactgcaaactccgcctcccgggttcacgccattctcctgcctcagactcccgagtagctgggactataggcgcccgccacctcgcccggctaatttatttcagcttctaaattgccatcagctagatgaaggaggcggaaaataattctaaaaatcagatacagtcacatcacaaggataaagtattccaaaatgcttgagaactgacaaatgtatttccgagattccaaggggcaggaaaagccccagaagactgggaaagttgggggggtagtgggatataatgaagaagcttcaaaaactgatgagccaagtaattaaaaccgatcttcttctcttccacaccaggggcgatactgaggggaaataatctttttaccatcactttgagaaaaacaaccaacatggtttgcttggagacacatcatgccagcccctctgaccaagtgataagacaggtagataaaggggaaatgagagatgtaatcttacagacttctgttagtcccctgattctgtcccttgtgacattctcatcagtgggctgggaagatgcaagcaggcataccacacccaaagggcggttatcgctggtgtgctgtcaacctggggatgtctaacaagtgatgttccacaggtgtccacctgtccaccaggatgatttaatatctctatcactgagatattaagagagagcttcctgtgcccactgagccagcctggaatcaaattccagggtctccctatcaccagcctgtatcattacttcttttattacccaacatgtagcctcgtggttcatctgtgcagaaggaagacaaaaatctgggaaggtaaatgaacgtagacagatagaaacttcactctgcagtggcaccactacccatgcaggcccttcctggactcacagctactcagagtggggttttttttgttttttttttttttcatttaatggcacatgatgatgcacacaaaacttcaactctcagtctggaatcagcccacaggtctgcagctataaaaatcatctcgaaaacatgagatttcagagatccagttctcagtgttaccttgaagatgacaatttatgaagaaacaggtgattttaatccgaaattgccaggaaacaaattactcctcaaaagcccttggaaagtaataagatagctaggcagaaaaaaaaagattctgcaaaactaaacttaatgtgtattcatctagacctgaattaaaaataaaattccactataaaaagaatttttcaaaatgttaggcccaagaatatggccatattgttccatcttgaagaacccagttgattcagtttcattactggcctccccactcttctaagtaagtccctcactataaacatttacgaattccatctcagcattagtactaaacaatattcattaagaatcccgccaaagtgcaacatgtaagtaaatcaaagctttgatgctctattttgcaaatttcacgggccactagggataattaaaagggcaattatataaagttggtgcagttttgagaaacaaatgacattttctgctttaaagcacttgataatttgatattttgctattagggccttcatgtgtacttttatagacaggtagccaaataaacaataaatgttccttaacagcctctaatgattgtttttgcccactgatatcactcaccattccagtccataaatcatatgctaagagattaaggtaaagataatgaaaaagtattagaaaccaataagttagaggcaggggggaaaaggctgaaagtgttgatttcttctatactttttgccaaagcacctagcaaagtctgagtttccgagtgctggagtgggttcggtttgtcactgtgtttaaccaccgctctgaagccagcaaagtacattacagctcatgaaaaatacagcgaagaaactgctcgtggcagaagcatttaacttccttgttagcagcctccccgagtggcactttttcaccagcaagttgtttattatgttcggtgccaggcaaaactgattaaatggggctcttaagaatcaaagcgttataaattcatggaaacacagcaagcaataaattccatggaattaaaagcttactagtgctattagcatttcagggtgtttgaactgttaatactgatgtgcaaaaatgatgtgcctctacgacaaggcagaccacagcaacacaagtgactggctctaaaaacattttatcaaagtgtcactgggacctggcagttgttaaagatacaggaatggaggaggagagtaattatcttcaaaattctcatttgccctaaaaagtcaatcccacagaagagagaaggcgccaaataaaggtttacacacaggagaagaacaagcataaaaatattatgcaaaggatttatgctttaagtgaatgaaaatttcgtcttaacaaccaagagggatgagagttttatcctgtaacctggtcttagcagggatggggcccaccgtgttttaactgggttgatcttaatcttcttacaggacagataaccccagatcaggccctcaaaaagttaccaagtggagtggacaccttggccaataaatttttctggtttgtcatgtttcatcttcgactctttctgggggcgttataaagtcttattctaaagtgacaaggggggaaatcaattattatgccattaggcaagttatattctccctcccaaggtgcaagatatgaagtaaatgctactgcacccatctgtttaaagaatacttctagctgggtgtggtggctcacgcctgtaattccagcactttgggaggccaaggtgggcagatcacctcaggtcaggagttcaagaccagcttggccaatatggtgaaaccccgactctgctaaaaatacaaaattagccgggtgtactggcgcacacctgtaatctcagctacttggcaggctgaggcaggagaactgcttgaacctgggaggtggaggttgcactgagcccagataatgccactgcactccagtctgggtgacaagatcgagactctgtctcaaaaaaagagaatacttccttccaacagaaacatatctaaagatctgtggtaaacaaatacaaatgtagggagagagaaaagacaaaaaattaacaaagacttcttaaagaattagttttgttgataaaaagtgttaacgataattttacttttttggtaaaagaaagaattgctgcccaccaattcggtgtgatcacttgaaaacacaacttaagagaaaattcactgtaaatctggaattaccagatttcaggaaaaaagcaatctaaagctgtcaatctagacagacatccaaacacctattcatccactccagagctggccaaaaaagtactgtttattaacacatcaagagaacttaattcctttgataaaagaaccacacgggtaatagcatctactgacggatcactggtacatatgattatctctggggctatgttccacatgtgaatataacatttgtactcactgaagctgtctgttgcttccctacagagagacagaggctgctcacgtaccaaaaaatagaaaggagacaaagaggaaaaaccttacagggagaaactcataaccactaatgtgctttcactgggcttaagtccaaagccatggattgttacagaagcaacatgttacagggtgtctgaattgttaaaactgctgtccaaattggttctgcctctaggacaagacctactatgtgtaaaatattggcaggggcgatgaatacatataaggcattgttcttgtactcaaaaaagcttaagagtctcactggggacataatcaattataaagcacctattatacattctaaatcaggaatcaaaagagtcttaatagacaggttctctacccactgggattttagagtgacttgaagataaggcatacacccaaaaaacaaccaccgaacaaggcagtattatatctgtcaacattctatacacatggaataatggggttcttttgtgcaaaagaatcaccaattataggagaaggaagagtcaaagtttgataaatagattactagggaaattcagcaatgaaaacgagaaataatatgcacaattttctctcagcagtgtcctcggcatcccgggtgggtcaacttcgatgtcctcctgaggctccgtgtagaattatacccaacagtggtgagcaaaaccagtatggcccttaccatattgctcccatgggtcttgcaatatactaggggtgggggatttcaggaggacaagtaacagaagatggcctcagtaatagagaagacctagaagcttccatgcctgtgtcccacatttaccccccagccccccaccccgggtatctgatcccctggtcttctcacacaggtctctagtcccttgttttccttcaaaactagaaattcatttctcagtcctttattctcattgactagcaaccctttaatgtcactgggctgcagtcaagcgttacaccaaagaaaagacactcatattgtccactgttcctaactaactgggagaaagagctctgccccttattagggtcacctgactttggtcatttttttgactggaaagtctttccaggattgctgcagataccttttcaagggtgacatctcttcccgaactgctaggggaaagctcaggtctagcttatttctggacctggaggcaaccatctcaaggccatggtcttccatggtttggaaggtgcagcatctggagaagggaaattgctctctccctcccccagtagagcctcctaacttctcactatacatgaattaggactaaggggaggcctcacactcgtgtgtgcgcatccatctggctccctctctgctgttcaatcccctctcttgtacaacgagcagaggcagtaaggtgcacatccttcttccttctggtccttgtgcgtcccatggggtccacttaagagtgaccagattcaggtttgtgtgaggaatcagttctgtgtgaattcaagttcaatttccaagaaatactggcaatgaggcactgggaaggaacaagtctaactaacaatcaaatgataatttgcatccggccctgtcctccttcaaacatgtctggcttatgtgaagcagtgtcatctgatgcttacaccactgtaaccgaattggactcccacctccaatacatgctcaggccctcacccttcctccttgctaccacaaccctaactcaactgcttccttctctcctctaatccccttgccttggcaggttcaagactccagtgttgtgttttctagcacaaaagttggctggtattttcaaacatgcccatcccccttcagtcttccttgaatgcagtcctacgccgcctccattatttcagtatccgagaacaaagtttctgatgacaaagtctgtccttggaacacaaccctttgctaatggggggatgactgcttgataatagggcactaactgtgcagcccagacaatgagcaaaaaaagaaactggggggagggagagaaataaataacaatacaaagtaataaatgacttcatgccaaatgcatggtgaaggaatcaaatgctctactattctgagcactgagtgatttccttgaaaggtctggtcgtggatggtggctacaaaatgagaagagggcagtgcaaaggccattgtgaggctagataaatacaacttaatgataattcaaattgtctgctcatgctcttctcagactggaatggcttcacccaatcctctaacatgtctactgaagaagtcctactcctcccaggagccttcactgcagggtagcctccctcaggagtcttccactaattttcccaagtagaaatgaaggagccctcccttccaattccttgggtcgaatatttcacatcaaaaaggacttccatactagcaccagtgccttgtctaccatgctgtgagtttcctgagatctgcagacatgttttattcatcttagtgttcccaggcctataggagctcagggatttatccattttaactatgttgcaaacaggaaacagaagatacagataaatgaaaggcaaccctcaagattggccaccttaactaaggacattaagaagaaatatggtccttagaagcacatgacccaaggctacccctgaagagtcaggacaagaggctcagaccttctctgcaccccttggagcagcaaggtgacaaggatggagttgctggagctcgtcaccaccaggaaaggggtcctattagaaatggggtaaattcagaagagagcagaggggagaaatgcaaagatggggttgtctagccagggctacacctgacctattcagttatattatcaaataaagtctctttttgcttgagccagtgtgggctaagtcttatatggcatgcaactaaaaaagtattttcgataacacagtgatccacggaggtggagataataatttagcattacaggagacaagccatacggaatcgaaagtcaggagtcagaagctggaagtaaaggctgggtagatctgggcaaaatcaacagtttcttatcactgggtttctaaaatcaatcagcaatcttactgattttcactgttgttaaaagcaaggatttaaaagagagattatcaaaattcagtatctgatcaattgtagcagggcttgttgcccctttaggtagtaacactttgctctttgccattctagagctacgtttaaatgcatattatactcatatacacataattaaacagcaccaaagaggtaagcaagaataaattccacagcccctggcaactaccagtttcccttcccaaaggcatccattgttgccagtttcttgtctctctattccaaaaatattctgtacacaatacaatcacataagtattttgtatgtatatttctttttctcccacttcatccaaatactattctatttacccacttggtcacttaatatatattggagatatttctgtaccagtacctacaggtgtacgttcttttttaacagctctgtagtgatgtccctgggtgtccctcatcctggggatggaccataatttagcaattccctcctgacagacatttatggaatttatttgctattgcccccacagataatgttacaagttataaccatgaacacaggccttttatcacctgggtgggtataagtccctagaagtaacagtcgcttttccttactgcatttgtgatctaacagagtcaacaaccctaagagctggaagaattaatccccattcccacctcatgcaccctacacctgggcttcccttttacttttcttaatttgttttgttttggcagttttctgataggttcagacaagcaggtgtctttgatggacgctgagaacaaaacataccgaggcacaattctactgcagaatgcaaacaaccttgtaaaatattcccccaccaccttttttaaaggcctggaagaaaatcatttgaacctatacttagtggtgtatgtgaggcttctgggcatgcgccgtattattagagttacacaatgtagtaatcacatgcccgtgtccctggaggttacgggagtggttccccatcctctcatgcttatcccttcttcgtttttttgttttgttttgttttgttgtgtttccccgtcctttcctacctttaacatatcctgcagcattcttttagcctgttttcctccagtctaattattcttcaattttaaataatgtaataactttgacattttcatttatagttaagccacgctaatttgcacaaatgacgggtagacacagcacaaattaacaagcctgaaaaaaatcagcaaacacccaaaaagccaatgattaaaaagaaatcaggtttctgcattatgaaatgcacatttatttttccaagcaatttctgcagacttgtgagaaagtatggagtagtgacacttggctgctttctcatgttctcccttttctaagctatagggttactttctctgcatggtcttcagtaatgatgttttctggacgaagaatcaggacttagaagcctaagtcgttctgagtacaaggttcaaaaggtagtctgtgagctcagttttggtcctataatataggaatttctggcatttctggttacaagagagaaaaaaaatggaaacggttcttccctgaaaaatctaggatgtgtctaatccagtttcattatcttccaactccacattagggctctctcaacacgctactcactcagccaatatctccatcagacatggtcacatcagaaatctaggtggcatcattaaccattccctcactctcacatcccttactctatccatcagtgactgctgcctaattttaacccctaagtatatcctttttaaaattttattttttaattaacaaacaataactgtatatatgcatggtgatgcatagatacagtgtttcagtacacataatgcacagtgaccacgtaagagcgatgggcacatctgtcatctcaaaatgaatcatttcggggtgttaggaatgttcagtatcctccttctaggtgtttgagactaattatgtattgctgttaactatacagtcagcctacagtggtacagaacaacagaatttattcctcctacctagctataatgttgtatcctttaacaaatctctccgttccccctacacttcccaggctctagtatcctctgttctactttttaagtagatcaacttttttttttttttttttttagagacggagtctcactctgtcgcccaggctggagtgcagtggtgccatctcggctcactgcaagcttcccctcccggattcacgccattctcctgcctcagcctcccgagtagctaggaatacaggcgcccgccaccacgcccagctaattttttgtatttttagtagagatggggtttcaccatgttagccaggatcatctcgatctcctgacctcgtgatctgcccgactcagccttccaaagtgctgggattacaggcatgagccaccgcacctggctgaactttttttttttttttttttaacttccacatatgagtgagaacatgcggtgtttaactttctcttcctggcttatttcacttaacaatgtcctccagttccatctatgttgccacaaatgacaagatttcattcttttttagtgctgaatattattccattgcatatatacagcacaatttctttatccattcatgcatcgctggacagttttaaagacttcctgttccttgcctgtccactatcgacaccacagtccaaatgacagcatgctctacaatagcctcttgccacatgcatcagtctgatgactgcagcctctaactcctccctgcatattatattccagccatgcaggccttatttctttgcttcaagcatgccaagttcactcccacctggaggactggacattagttgctgcttcgacattgaattgatctttccctaatccttacatgtctgactccttttcatctcaactaaactgtttaccttcatagaggtattttccctagttaaaaaaaaaaatggtgttggagtatttatttaattaattaattaattaaatttttttagggttgaggtctcactctgttgcctaaagtggggtaaggtggcaggatcacagctctctgagggcccagttttgtcttcattggctcactaatataaactcagcaaagaatgctgtggctggcacgcaggaaaagcccaaatatgtgatcaaagcatgagaaaatgaagagtgtggtcacttggattgcctacttcaagtcctggccataacacacacaggaaggatgtgacctgggcatgctgggtgaatggctggccccctctctgtgcctgcgggaaacagtagcccctacgtaacccagagaaaccagatttttctgaagtttcaatgaagttatacataaaggcattaagcagggcctgacacacagcaaacgttcaataattagctactgtcatcaatagcttttgatattattcctgttttttacagtcagaaaagtcttagataaattaaaaaggagtaagagagttgtcttctctgatgttctccatctttccctcctttatgagcacagaagcactggacagtaggctacaaaaggtggtctatggtatctcactgccaagctggcttcccagaagaaaacccagcttgcctccatcctggtgcttaaaacggccggtctcaggaaagcagcaatttgattaaacaaatttctgaccgggcacggtggctcacacctgtaatcccagcactttgggatgctgaggcaggcagatcacaaggtcaggagttcaagaccagcctgacaaacatggtgaaaccccatctctactacaaacacaaacattagccaggtatggtggtatgcacctgtaatcacagctatgcaggaggctgaagcaggagaatccacttgaacatgggaggcggagcttgcagtaagcagagatcatgccactgtactccagcctgggcgacagagcgagactccatctcgaaaacaaacaaacaaacaattcctaacaagtaaaataccaattaaataatacccagccgcgccttcatgaatctcttagaggcctttaatgaggatctttgttactcttgatagaaacaggaattggggccgggcatggtggctcaggcctgtaatcccagcactttgggaggccgaggcgggtggatcacctgaggtcaggagttcgagaccagcctggccaacatggcgaaactgtgtcttctactaaaaatacaaaaattagctgggtgtggtggcaggcacctgtaatcccagctatttgggagatagagtcaggagaattgcttgaaactgggaggatcacgccgttgcactccagcctgggtgacaagagtgaaactccatctcaaaaaaaaaaaaaaaaaaaaagaaagaaataggaattgataccattgttccagaaaagagttggggaatacatacataaaatttcaatataaatcaatacatgtttatcaaatttaaatacacatagcttttcacccagcatgtcccaatctggtaatttgccctaaattagtgcttctcaactagggcaattttttcctccatgagacacttggcgatgtctacggatactttttccctgtcatgcatggggcaggggtggtgagtggggagcagagttataggcatctagcaggtacagaccagggacgctgcaaaatatcccacaaatcacagcacagtctcccacaagaaaaaactagtcagccccaaacaaaaataagctgatgctgagaaactgtccttaggaaatagacaggcttgcaactatgcatatacaagctttttgtatacaatctcgtgtatccaaccaagtagaaatggttagataaactgcgatatatttatacatagctataaagtaataataatgttgctatatatcaattgttacagagagatatgggtaacatttttaaatgtttaaaaagtaggaaaaatgtagcatactcctggcaagagaaaactgttatgtgtctataccaaactgcccaataaaaatagaatgcaggccaggcgcggtggctcatacctgtaatcccagcactttgcgaggccgaggcaggcggatcacgaggtcaggagatcgagactatcctggctaacacagtgaaaccctgtctctactaaaaatataaaaaattagccgggcgtggtgatgggcgcctgtagtcccagctactcgggaggctgaggcaggagaatggcgtgaacccggaagtcagaggttgcagcgagctgagactgcaccactgcactccagcctgcgcaacagagtgagactctgtctcaaacaaaaaaaaaaaaaaaaaaaaaaatagaatgcaagccacaaatgtaatttaaattgttctaatgggtactttttaataactaaaatgaagtgaatgaatcaattttaatagtatgttctaattcaatatatttaaaacattatcatcattttaacctataatcaacacccaaaattatccggtattttacaatatcttttttttttattttttgagacagagtcttgctttgtcccctaggctggagtgcagtggtgcgatctcagctcactgcaacctccgcctccctggttcaagcgattctcctgcctcagcttcttgaatagctgggattacaggtgcccaccaccatgctcggctaattttttttctatttttagtagagacagggtttcaccatgttggacaggctcgtctcaaactcctgacctcaagtgatccacctgcctcggcctcccaaagtgctgggattacaggtgtgagccaccatgcccagcctacaatatcttttttttttgttttcaaaataattcaggttacccacatttcatcttctcaagagctgcctatggtaactggctaccatattggacggcccaggtctattccataatcagtgagcagagacaaatgtttagaaggatggtctccaaaatggtccaagttgtgatcctgggggtgaatttatggtaatgtttgctttcgtatttatgttttccttactgtttgtttgttatgataagagttatcctgtataggtaaagaaaaattaaactgcatgcatttctgaaggaacaaagagagaaaacagcttgttaggtgtcatgaagatatacgaagcagccctttctaattccttgttaaaaaggacagatcctaccagcctgggcaacatggcaaagccccttctctacaaaaaaaaaaaaaaaaaaaaaagaagaagaagaagaaaaagtagccaggcgtcgtggtgcatgcctgtagtcctagctactcaggaggctgaggtgagaggatcacctgagcccagggagttcaaggctgcagtgagctatgatcatgtcactgtactccagcctggacaacagtcagaccccatctcaagataaaaattttaaaaaaaaaaagaaaaagaaaaggacagattctggagttttccgagaaagggtcgctatcaccaaccatgtgcgcgtgcacacactcactctctctttctccttcagataataatggggtcaaggtcattcctgccaactgtacccacaaacagccaaccctctgctatctcaaaacacatctgagtggtgagaaagcacccgcttcatgttcttccaaacagacagggattctggctccctgccctgtagaacacacacatcctcccatctagcctaggacatggtgaatacctgaccgacatggtttctgcccacattgctcaacgcaaagtgctctcaggcctgtcaagagcctaatgctcttttaatgcagtctctacttgtaagttctaaaataacatcatgttagagccaatgaacctcacaaacagccctggaaaacctgttcacagtacttcagtccatggtttaagttctgaaaagctcgtgagcccaggtctctccttctgaactcaggaacatctggatggcaatggcttggccttttacattatcatccctcaaatctaagctgaggctgggcacagtggcttatgcctgtaatctcaacactttgggaggccaaggcatgtcacttgagttcaggagttcaagaccggcctggccaacatggcaaacctctgtctctactaaaaatacaaaaaaaaaaaaaaaattaaccaagtgtggtggtgggcacctgtaatcccagctactcaagaggctgagaggggaagactcgcttgaacccaggaggcggagggtgcagtgagctgagattgtgccactgcactccagcctcggtgacagagtgaaaaaaaaaaatctaagctgtaacaaagctaagtgaagataagccgagaagatccctctaagtggtaccacaccttactctctggtggcacgtaagaaatgagcagaagagagagaatatttcaaatacagtgttatccataaaaattcaaaaatcatttctttttacttaggatcttaattttttctattttgggccaaaagacagtaccaggatgcctgtttcatttctattcctattaggctctccttaatatatatatatttattaaagatatttaaaaatactttccatatcttgaatttttaattaataataaagattattaacctccttgagaacttactacattccatgtactgtgccaatcataaaaattactggtgttgtggagccgacatttactgagcatttgctgtgtataaaacattgctctaagcactttttacctgaaaagaatttagttaatcctcaactacttcacaggggaggtactagtttagtatctatttttgcaggaaaaaaaaaggcttcaagaaatctggttacttcctcaagatcagaaagctaacaagtagcaagaccaggcccccaacccaagatggaaacctgaactcccaacctacgctattctttgtatcatcttcacagcattcctataaggcaggtcctttcattctacccgtttcacagatggggacaattaactgaaagtattcaggccatgcccaaaaactggcatccaaactcagccaaggcatactccaagtccattcccgcctggagacatgctagtaccaaacaacaagctataccttcatcatgtcggcacctgagatagtcaatttcccattacaaaattggtcctgttttgaaagggtggtagcaggaatcagacaagtgcacaacaacagtccagtttctaagtgcactctcaggaatgggaagaacagagaaaaagcagagcatggtccaggccatgggtacccatctgccttccactggtgctgagtgcagggaaatcccagaaagggctgagagagggagaggaagtgcactttcctttcaatttcccttcctttctaattccttcattcaggaatgaataagaatgagctgcttgggtttacggactcacagagcaaacacccagagaggggctgtaattcccagtgcccccagtgtactccggagccccacccccaacccccagcagcacccttctaaactgatacaaatggcaggtgctccctcaagtccataggcctgttccaagggtcttagagcttaaatggacactactgcaaagcttctggaaccatggggccagaggatgctggctcattgagtaaggagctgaaagagaaatggggagaagcttcttgggctggagaggacaggacctacatgacggtgtgtcctccatgtgacagggagactcctgaagggatctggatgacaacccttttttattttagctgctgaggataacagagcaatagcagaagttgtaagaatagcagcaactgcttactcttactgtgctaagtgcattgctcagtgatttgttgtttctcctccctatacaacactgagattgatccacccaatttgcaaaagagccttttggtttttttatgtttgtttgttcactgatgtatcctgggatgcctaaaattattgaatgcttacttgtccagaaccagtaagcactcaataattatctggtgaataaagaaatgaatttaaagcttcaaagtaccatattagtcctggtacaagggccactggtatagtggcctcccaatgacaagacccctttcctattttctcatcaccctggctttcccagtatccccactccttcaaaccctgcctgttccaatgaacaattaagaacagcctaaagaaacaaatacaacttctgggacttcatttgtaatgaaagaattaaataaaaatttttaaaaataagataaacctttttctcctatgattaaacaaaaaaatgttgaaactctttggcaaagttcagtgaaataaacattctcatccagtactgataggatgagaaaaagcaagatggcaagacacatggagaacttgtaagaattacataactgttcttctactgattttcccccctctagaatacatctaaagaaaagcaaattaatagacaaatatgccaggcacagtggttcacgcctgtaatcccagcactttgcgaggccaagacgggcagatcacttgagcccaagagttcgagaccagcctgggcaacatggcagaaacccgtctctacaaaaaatataaaaattagctggacatggtgtgtgcaactgaagtctaagctactcgggagctgatgtggaaggatcacttgagcctgagagatcaaggctgtagtgagctataatcatcactacaatccagcctgggtaatggaggagaccctgtttcaaaaaaagaaaagacaaatatttgtgcacaaatatgccaactgcaacgttattacaggaaaactggacatggtgtcaatacccaacattaagaatagttctttaaattttattgtatccgaaaggatgatgtggtatacaaccattccagatgtctttaagaacacttcatgacacaggaaaatgctcatcatgaaatactaaattaaaaaaaaaaatggatacacaaataccatatactgtatggctacaactttgtcaactatatgtacattccattaaaaaaagagtagaaggaaatatatgttatcatcagggtcaggagtctaaattacttttatttttgcatttgtctacttttctataattgcaaattccccataatgagatggttttatatttataatcagaaaaaattaacttcataagaactttctattctatgtatgtaacatacatagaatattataatgagaacttagttaatgaaattatatgacccttcctgatgacaattttacattggtaggtattttatcccacagaagggaaataaagaacattaaccccactccaaagccaggtagaacaagacctcagaaaacacgcagttcgaatcaattagcttatgcctcaaaaatagtaagaaacacacatcattatcctcttatataccccagcccttggcaaaacacgtcacataggaggcagtcatttgtatgaatcagtcgcataaggatagtgtagtcaactaaattctcatgctatacaaaactcaactattcaaaaaatgcacagtagttgtcaaccagcaggataattctaactttatacatatcttcatcaaacagccttgttttttaaaaaatcaggctttagagggaggagagacacagagggagagggaacgaggaagaaaaaggaagagagtaaagagaagaagggtgaaaagtgggcactttctgagataaacattttcagatgatgcttttcctatttaatattttgaaacacttgtaaattcccttaacatagcttagagaagagaatattagaaattaaatccgagaaagggtcatgtacataaaaataatacaccttggttttcagttggtccattttttcaacagtcaactttttaacagtcaaattttaatatttccacttatctttggtattatatcacaaaaggaaggaactgatgtagtggaagaggctgggagtcactaccaacacagaaatctacaattacacagtggcctggggtctgtcatttccttttctgtatcacagtttcatcttcagtaaatataaggaatgggctacagaagtctgacattccttggtcctctctgaatctataaacctaagaataaagtcatgtatcacttcacaatagggataggttctgagaaacgtgttgttaggcgattttgctactgtgccaacataagagtgtacttaaacccagatagtatgtatatttttacttatatattttcatatggaaaaccgtatgtcccagcactgttacctaatgtcagtcacttctcctactttatctgcaatgacaataccaagtgctatgtatcaggtatgctccattataattttatgggaccacagtcatatatgcaaaccatcgttgaccaaaacatccttgtgtggcacatgactgtacttcattgattggccatttggggattttagaattagatgggatatctaccaccatgtagagtgtcccccgccacccccgccccgcccgccagcacacagctcaattttaaacacagggagcctcatagaaactcagtaactacttattgcttaatcaattagtaactatatcactgaggtatagcaaagaagagaacttaaatttcatactctaaaagctgtaacttttttaattttacagagttaatctgaatgaaacccaaccaaagcaaaatttgcaactataaacaaatttatattaatggcatgtgctgggacaagagaatgactgatatttgggataaattaaacaatgaaagtataaatggctctcctttgaaagatacaaagttccttatctaacaagctgcaaatcaagttggggaagtgggaaaatatcgagggagaattcaaatcagaaacaaaacaaaacaaaacaaaaaactgcctaccaacttaatgtctagaaatgttgtcatcaaagttgatacaaactctacctcatgctatcacagaaaacacatgtacgcagagccaagcaatgattttatgtgcctggaattcatttgaatattatttaaaagtagagggagaaactaggtgattatctaaaatcacaacatcttttatgaaactcactcaagagactgagttatctcgagatgtccaacacagacgtagttacaatcacaaataactggaaggaatctaaagacccaccagttgcaggtatagaaaacacaacagtggtagtaatgaacgtagctttaaaaataagatgtagatatattaagtaataacttgggaaaacacttaagatcgtttaatgataaaagcaggaaacaaaaagagtacatacagtaaaagtatatatagacaaatgtttttaaatatgccatatataagaaatagccaggcaaggtgggattacaggtgtgaacttcggaactttgggaggccgaggtgggtggatcccctcatcccaggagtttaagaccagcctggggaaaatggcgaaaccctgtctctaaaaacatacaaagatcagccaggcgtggtggcatgtgcctgtggtaccagctactcattgaggctgaggggagaggatcacctgagcctgggaggcaagagaatgcagtcagccgagactgcaccactgcactccagcctgggcgaaagagcgagaccctgtctcaaaataataataataatagtaatagggccaagcgctgtggctcacgcctgtaatcccagctctttgggaggctgagaggggcagatcacttgagatcagcagtttgagaccagcctgacaaacatggcgaaaccctgtctctactaaaaatacgaaaattagctgggcttggtggcgggaatctgtaatcccagctactcaggaggttgaggcaggagaatcacttgaacctgggaggtggaggttgcagtgagctgaggtcgtgccactgcattccagcctgggtgacagaacgagacttcatcccaaaaaataaaaataaaataaaaacaataacattaggatttagttacaatgttgaactgtttaaataaggttaccaatgaaatttttctcactacttcttcttcatatatatatattttgagacagagttttgctcctgttgcccaggctggagtgcaatggcacgatcttggctcaccgcaacctctgcctcccgggttcaagcgattctcctgcctcagcctcctgagtagctgggattacaggcatgcgccaccacgcccggctaattttgtatttttagtagagacggggtttctccatgttggtcaggctggtctcgaactcctgagctcagatgatctgcccgtctcggcctcccaaagtgctgggattacaggtgtgagccaccacgcaaggccgcttcctttattttttgtttcgtaagtgcatttaaaattatccacaaagagaaactgtccttccttcatccaacaccatcttaacagtatttagcatccatatagagataatgtgtgtttttgtaattaacctaccatttcctggatgcttgaggatttgcgactggccaagaaatcttgaaaatgttcaactgtgtttcacaagttttgagaaagctagaatctgtgatgctcttaggtaatctgaaaggcagatgaacccatcaaagactacctatattagtaaaaggtaaaggtgatagacagacgtggctcaggctcaaactagtattttactaatctagagactatgttaaccacaccaatctgtgatatacttcagatgattacaatcgacatattctaagttagggctataaacacatcccactttcctctatgccttttatttaaactgcaaatctccaaaccatcagattagagaacgggtcaagagggacaaaatgcccaggattcctttttcactgctcacaggttgtactatgacccaaacttcacaaaaatgagtgcaaggggtgggggaaaatgtggtaactgtaacaaacaagaatgctgaacaattactattcctggaaaaataatacaaaccatgtaagttcagccagccagcagactgctagttatataaagccagtaaatatgataggagtgagattcaaacacaactaactcttactaaggtcatcaatgacttccatattgacaaatccaatggtcagttctttgtcatcatcttttttgaccacttggcagaatttgatatggctcacaactctcttcttatttatttatttatttatttatttattttttgagatggagtctctctctgtagcccacgctggagtgcagtggtgcgatcttggttcactgcaacctccgtctcccgggtcccagttcaagcaattctcctgcctcagcctcctgagtagctgagattacaggaatgagccaccatgccgagctagtttttgtatgtttagtagagacagggtttccccatgttggccaggctgatcttgaactcctgacctcatgatccgcctgccttggcctcccaaagtgctggtattacagtcatgagccactgtgcccagcctaattttgttttttatctagagacagagtcactatagtctgtcacccaggctggagtgaagtggttattcacaggcaggatcatagcacactatagcctcaaactcctggactgaagcaatcctcctgcctcagcctcctgagtagctggaactacaggtgtgagcccccatgctcagctttgtttcctactttaaacacttaccttgatgactttctggttcacaatctcagagttttcatcccatctctgatctttcctgttctcaatattctatgactaaaacttttaatggtgttggctttttatttttattttacttttttgagacagagtctcactctgtccctcaggctagagtattgtgatgcaactgtggctcactgtggccccaagctcctgggcttgaacaatcctcctgcctcagcctcccaagtgtagctgggactacaggcacacgccaccatgcccagctaatttttgttttttttaatgtagagataagagtctcactatgttgcccaggttgatctcaaactcctggtctcaagagatcctcccacctcagcctcccagagtcagaacccagatcctggaactcttcttttcttcttctataccactgcttccttggtgagttcagtcaagtttatgcctttaggtatcacttacatgcttataaatcctgaatttatagaccaagctaggacatttccaggactacatatccaaatgcccacttggcatcttagtctgggtgcatagctcaaacctcccatatctacaactacattcctggtctcccttgcttacctcccctacctccaaaactgccccacccactgtcttgctgtattttagtgatgggagcaccaccttctatcagttccttagaacagaaagcatttgtcttctgactcctctgtttctgcccataagcaatccatcagtgaatcctattgattatatcccgtcattcaagacaaaaatcttaagagtcttctgtgatgcaactttttcaaactccccatcaatttcactaggaaatcctttggctcaatgtttaaataaattccaaattcaacaacttctcagcacctcccctgccattgtgatcctggccatcatcatatctcactgggattattctagtggcctcctgacaggtctccctgcctatgacctcatccacccaaagtctattttcaaaacagctcccagagcgatccatttaaaaagcatgagtgagatcttgctctacctcaaagcccctcaatggctccccaataagaatataaaaagccctaatgccctactcagtctggccctgttacactgttatgttgtctcttactacaacttgagtagccttaatccaatattctgcaatcaaaagtgctccgaaatccaaaactttttgagcacagatacaacactcaaaggaaatgctcacaggagcatttcagatttgggattttggggttaaggatgcttagctggtaatgcatatattataaaatctgaaagatcccaaatcagaaatatttctggtcccaagcatgtcagataacagatactcaacctgtactcttcccttaaggacactgcttcggccatactggctgacttgctctctttagaataggctacatctctgctcaccttacatggacttaccctgaccacccaccaccctatttacacagcaacccttccctctgacaatgtgacctcccttatccttttatattttctctacagtatctatcaccacgcccttgtttatcacgcttcgctggttgtccactccctctaaaccaatgagcagagggcttggtggctgtgctgtccactgctatatccagcaacactgtctaatagaaatacaatggctgccacataagtaactgtgacgcttttcagaagtaacaagaaacagctgaaattaattttaatattttatttaacctaatgtatccaaaacgatcatttcaacatgtaatcgatgaagaaaaattatcaaatatttcatgttcttttttccatacaaaggctttgaaatactttgtagattttacactgcacatccaagtttgggctaatcacatttcaagtgttcagcagctccaggtagctagtggctcccacactggacaggggaggtcaagcacaatgcctggcatacagcaggcatttaataaagatgtgtgaataaacagatgagggaataaatccaacctgcagaaagaactactttacattgcaaagacagtactcatatgtttcagaagttttactgcatacacataaaatccttaccacatgtgacatattctgatttttttattttactgtattgtatgcttattctgtatttttttttttttttttttgagatggagtctcacaccaggctggagtgcagtggtgtgatcttggctcactgcaacctctgcctcccgggttcaagtgattttcctgccttagcctcccacgtagctgggactacaggtgtgcgccaccatgcccagctaatttttgtatttttagtagagatggggtttcaccatgttggccaggatgattttgatctcttgacctcgtgatctgcctgcctcggcctcccaaagtgctgggattacaggcctgagcgactgtgcctggccgctgattccattttttaaaagtcttgggtacaagccactacactaaaatccttaacccacaaactggttccaacggccactttgaaaatgactggtctaaataaactttaaagtatggaatttgtaatgaatgtattttaggatatttcctctggcctccagagaccactgaggaccttttgaaagggaaacagaccaacctccagaaaaaaaagactggaggaaagagtgagcatgtaagctaccatggcaagccatagactgcaataatcacagtccatccaacaatgggaggtttctcttaattaaaaagtaattttattttacttttgatttatttattttttgagatggagtctcccctctgttgcccaggatgtagagcagtggcatgatctcagatcactgtaacctctgcctcccaagttcaagcaattctctcacctcagcttcccaggtagctgggactacaggtgtgcaccaccatgcccagctaatttttgtatttttagcagataccaggtttcgccatgttgaccaggctggtctcaaactcccaacctcaagtgatccacctgccttggcctcccagagtgctgggattacaggtgtgagccaccatgcccggcctaaaaggtaattttaaataactggtcacactctcagataattaacaaaacatctaattacctttaattacataccacatatatgccaatatacaaaattcaggaaagatctgcatgattttcaccctttaaaaagagtgaatttgacaagggcagaaagacttcatgtttttcctttttcttcccgaccccatgcaaagccagatcagtggcagagaggaacaaactgaaacgattcatcttcatttcaaattcacaaagtcccattcaccaatagtgtttttaaaagataccacaaacttcaaatccaaactcagcactgcttagtaactgtcactacagcttcaacttttaaatgggctcataaaataaggattctgtcatcagtacactatttgtttctttgaggtccttggtgttactagatactgagggggtaggcccacaaggttaacacagatgtgctaccttttataatattttgtttttgtacagttaagcttcagatttctttcagaggcttttgaattgccaaggaaaggctctatttcctacatctgtggtacgtcgttaagttgccacctaacatgaggtttgtgttcctaaaatgctcaaggtgagcagttggaatatttgtgcctttggcagataggacagcaaaaacatcatttaaaaaatacatggatacagtagttcagtggtgtgagcctatagtccaagctattcaggaggctgaggcaggaagatccctcaagcccaggagttcggggctgcagtaagctctgatcacacctatgaacagccactgtaatcctgcctgggcaacacagccagaccccatttcttaaaaaaaaaaaaaagatagataaaaccatttgctatttggttttgtatttttgattgttcactgtgcaaaatatggttatttgataattgctgcaaatattgtctttactactaaatatgccttcatgtacatttcaacaagtgacttctgcttgaaaacgaactctattgagcatatttctctggaaatcaatatttaagaaattttttttctttgaaactaacattcaagagagacagctcttgtttacagagtaacttagtttagcattatggctaacaatgtttaaaaacagctaacttaaaatgcaaacatttaaattctgacgtttaactgttgagaggccatgtcagtctacggaaatacacacagcataaaaaacagtaatttttccccagttctgtcccttgtaagaatatttcaagcaaccattctcttagatttaaaaataagaactcatgaggttttaagacagttaaaaattttaaatgcctagatgaaccttgaaaacattttgctaagtgaaagaatccagtcacaaaaggatgtgggattccatttctatgaaacgtccagactaagtaaatctatacaaacagaatgtatatttgttgttatcaggggatggcgggagggcagaatgcagtgtaagtgctaatagttactagggttttttcttaagcgatgaaatattctaaaactgaactagatggttgcaactctgaacacattaagaactattgaaaagtcagtacaccttaaatgggtgaattgtattgtatgtgaattatatctcagtaattctgttaacaaaaaattaacatgcctgataacattcacaacagcatataaggaaatcaagttaatctcacataacttccatacgatgctaaaacacataattcccgacaccctggactccttgttttagaccacttctcaaatcaaccaacaattgcccttcctaacacccatcatcagcatcgtcattcatgtatgcctgcccctctagactatcaactctgtgaggacagagaccatgtccttcttacacggtgctataatctcagcacctagcacacacccaccaataaacatctgcagtaagaattaatatatgtatgtatgtacatacatctgtatgtatgaatgaatgaatgaaattactagattggagcaactgaatcaatgaagtacttgtattctacttgtccccttaaatctgtttgtcaattctccccaggctcctggccacctaggtagagacacttcccagcagccctcaaagtttgctgggccttatgaccacaatcttaccagttaagtgacaatgagtgggatgtatacaatgtttaactcttttgatcaaaagaaaattgcttgctttggacatctccatagtgcggcaacaacatagcttcaaccatatgataaagacaaagccccaagggaggagagcacagacggaaagatctgcccagacaagctacattggtctggttgtttcacgagagaagtagacttctattttatttaagccattttacgctggggtctctttgttacaccagcctagtctttaccctgacggttacaacccaggcatgagtgtactgtatgtgtgtacgggggatcagggagcatttcaatgcttaactgaattgactgatcacattccagccaatgcggtcatctggtaactcagtaacgactgcttccagtgtcttcataacaacttccttaattaatggtcacataattcaaatgctaaatactctaaaaaggtagttttgaatgggtttagctcagaattgctgtgtcattaggtaaatgttcaaatcactcacatatacacttttaaaggaacttatatttcaaataactgaatagcattttagctttatttttcaccaagaaataatttataataggtaagacacaatgaatgttatctacaaggatgcatttatagttccttcatctaacataaaacaccttaaattagggatggagtggggggaaaattgcaatgattcaacttccttttgattgttttttagttttctctcaaataacctgactttaaaaaaaaaactgaaccaatacacaaaatgtgaagcttggagatgcctaatgtttaaaactaaccattttaattgtaatctatatggccttgatgattatcttcaactctcaatgccattcagaattgaatataagatgatgaattttacaaattggatttgaattttaagcaaatgcatgtgggtaaattgtcaatggtgaggggaggcaggaaaaaatgccacagaaacctttattagatcaccaaaccaaggcaaccataatagaatgacatctgtataattgtgaccagtgcatccctctttagtttccatcttgacattctggatgaccttgggtaaactatttatcatcaacgggaccgtttttccagtctgtaaagtggggattatgagaattgccagctacctcttaggaatgccagcaaccagatccattttgtaaagcactcagatctagttggaagaaaattgttatatcactcccgagtatgatgactgttatttatgactcttcagaccatagaatccaaattttcaaaatggcttcatttggttttctgaatttgcctggcgacttttatgtatataatcagttattcccatagtacctttgtaggcatatttctgtgcatctatactgactcttaataattcccaggtttcaaatttgaggcgtggtatttactgagaagctcctggcatctgaagtctacatgcttcttgcagtgtgaaagatgatgctgatttttttgtccattgctggatggcaaggtcttctcctcatttaaggcttattcatcaggaagaaacgctaaccactatattcacttgaaacatctttttaaattgtatatttccaacaaaccttttatttctttctagataagagatcaagatatatacaaattagtctttgaaagatctttcaccttgttcaaaggtaaaaattacatttattacttaagtctatataccctaacttatttctccccaaaatttgaaattagcatcaaaacacagatggaatggatactgtaaaagaaaaaaaaaagtgttaagtaatgaaatgttcacttggaataggaatactgaagatgatgtatgatatactttggaaatgtgtcccctccaaatctccctcttgaaatctggtccccaatgtcagaggaggggccaatagaaggtgtttggatcatgggggctgatctctcacgaatggctagtgtcctccccagagtaatgactgagttcttgctctattagttcatgacaaatctggttgttaaaaagagcctggctccccttccctccaagcttcctttttctcttgtcatgtgacatgcctgttccaaacccccttttgccatgactggaagcttcctaaggtccttactagaagtaggtactggcacatgtttcttgtacagtctgcagaattatgagccaaataaaattcttttctttataaattacccagcctcaggtattcctttatagcaacaccaaacagacgaagacaatgtatatagaacaaaaacaaagacaacaaaaaaagctgaaagtagagaacaactatagagactgagcatataaaatacttttatgatcaagtaattttacaaggggggcattatttgcacgatattaaataatcccatagatcatgcacttgatagtgattatgaagaaagcattttttttgtaatatagactatttttctcaggcaatgccaatgacaaatttctagaaacatttctttccaatttttcccttgacctatgatatttttaactttcaacaatattacagaatttggggtggggtggggactgtatttccattttcaggtaacaggtgaaagaacggacattataaagatattgaatcagaagaaaaataattcatgcttacaggtgattacaaaaaaaaaaaaaaacaaaacaacaaatgaaaacccatcagtgaaggttatatttggagctgtatggataaggcaactctcaagctaaacttttcatcttttctaccactttttcagctttgtttaatttttttttttttttttcagacagagtctccttctgtctcccagcctgcagaacagtggtgcgatctcagttcactgcaacctctgcctcccgggtttaagtgattctcctgcctcagcctcctgagtagctgggatcacaggtgcccgccaccacacccagctaatttttgtatttttagtagagacggggtttcaccaggttggtctcgaactcctgacctcaggtgatccactcgcctcagcctcccaaagtgcagggattacagacatgagccaccatgcctggcctgtttaatcataatttttagctttgccagaaacctctgctaacagtaggagatgagttagacatgtggcaccactttgcatgaggagcatcttggattgagatcactctgtgagattatagagaccaggagacagcaaattaccaccttgctgagtagctgcaacagaggctgaatgcccccacaagtagaaaatatttactatgtggcccttgacagaaaaagtttgcagacccttgatatagattaatgtcttccttttaaagattagaaaactgaggccgggagcagtgcctcacgcctgtaatcccaacactttgggaggccgaggtgggcggatcacgaggtcaggagtttgagaccagcctgaccaacatggtgaaaccccgcctctcctaaaaacacaaaaattagctgggtatgatggcgactgcctgtaatcccagctactcaggagggtggggcaggagaatcacttgaacccgggaggcagaggttgcagtgagccgagatcccgccactgcactccagcctgggcaacagagcgaaactccgtctcaaaaagaaaaaaaaagaaaaaaagaaaaagaaaaagaaaattgagcctcagcaaagggaagtgtcttgctgtggcctgataatcccaattactggttgggaatcaattccttccatgccgaaacatctgaaacgtatgtttgtcctctctgaaatacaattaggtagatcctgcaaaggtttcatttaaacaatatagatggtgaaatgatgcaagtctgatttttctagaccaaattaaatgtgccagaatgcaactacaaaaacaaatccatatcctttatatatatgcattctagaacccccccaagccccaggtgagacttatcaaaaactgatcaaagattcttcacattatgaaaagttccacaaaaaactctgttcaactcaataataagtctatatctgacaaatacataaactttagtaaaatctgagcaaaggctttgttcaaccatgctggcaggtaacctgtttttagacagacacaaatctactaaatcaaatggaactattaaaggccaaaaattctaaatgaaacaaagatgctactgcttgagaaatatcagatgttaaaacgaccggcaggatcatcttctgtaagatgatcattgcctttatcagagaggtacttttgaaatcaagtaaatatgtagcatccataaccattttaaccggagtactttttcactccccctcccaaaagcgaatttgagaaaattaaatttggctttaattcattaagctactttagtctctctgaaaacttctaattttaaaatcaagtactcatttgattttcaagcaaggtcaagagaacaaggcagcctagcgctgacattacagggatatgccccacactgctcagcagttacatcaatgtggcgtgttgctatggtgcctgactgttaatttctgaaagaaggtgattataaagccgccagatgaacatcaattggatgacaccacttcagcacacaatactgacatgcgttactcttgtttgcagcaagttaattttatgaatcaccacttttgtgatgtgaatattcctttctaactttaaacctaccaagtcaacaagaaacaaataaatttaaaaaataaaaataagttcagcttcaacaaacagagaagagtttgataatatttgggggggaaatgtgaacctgtagaccatttcttaagggcaaccatttttcttaggacctccaaaaatacaccacatatgtccttacacgcaaataaatacatgtttatttgacaaatacagaccaaaaagcaactgaattaaaatgcctggaaggcaaaagacacagccctggatataacttcactaatcacatttgcatttaccttttttggcttctgtaaagcaatcttcagttatagtcacctcaaaaggtcacgtcttaccctgaaaacaaaagagaacatcaaaatctgaatgtcaagagaagtagcaaccacctctgccaaggacagacacaaggaaaacaacaaaagcactcaattctatttaatggcaaatgactttcagggttaataaaaacaagtcccaagaatctctacttatctggaccatatgcctttgagctcttcaagacaacaaaattgacttggtggggaaaagtcaaggtgaaacatttcaaatgttgtgtatcaactttttctcatcttgttgtctatcgatttattttcatggagaataatatgtgactcataggcctctgtttttggaaaccagactgccacttgaacgtgtctctgtttggttaatatccacaacatctcttatttcattaaagcaaagacttatttttttccccttttggaagagagttaggtcttgtagacaagatgctttctgccacttcggacctttcaaaatgaatgaaagcagcaccattttcactttggggaggggcagggagttaattgctggcgaaagctgttcacagaatgtttttctcttaccatgtatctaccggagctactaagttaaattaaaaagggttcatgtcacatgaaacaaacaattgaaatcaagcttcctaaaacacaaagaaaccatggaacacattttaccccacatcctactcctgcatctgcatactcccgtatgcaaaacagtgtttaatcctttaagaaacattacaagctgcctctttctgcccatgtaactgggatcaacatatggcacgagtgaaaagaaaaacatttgtttattaatttagatcaagttactaagagggtacaggattcattccatatccattgaccaaatgctcatataatttttaaggtggcgaaatcatatcatcattttaccaaaatgttaatatctttttgctcactcttcagaatagcatgtaatgaagtggtttaattttataggaatatatccctgctcatccctctgctgtcagccctgaatgtggaaaggcaaacatcattgagaagagtaaaatcttatttcacgagggctaaaaatttgaaagtggcactttggtgtgtactatctttgaggaattgatccgaggccaatttatgacatttccacaagcaagtgtatgcagattcttgccattaagattggaaaaagacgcaggctctgagtgaaatcataattttcatgtttactgtaagaggaaattggaggttttcaccataaattttcaccatttgggtgggggaaaaccctagctctgggacttaaaattactattttgcagcctgaccaaaacctttttgtttttacacaaaacaattcaaattgaaaatgaaaatcgtgtgctttactgctgatgtatgtccccaagattggtttctccagtagtgagaagtctatttcagggcaagcaacgataagaaagaaaaacagagcaaagatggtcaggtcctcaaggtagagctaagatctgcagagccccactctacacaaatcagagctcagtagatacaaagcgcacacagaaatttctacatctaccactcatcaaatcttaaatgtaaagcaagtgaactttggcagatcctactcaattcaaagcaagaacgccttttcctctctcctttttacttgagatgttctccaatacatgcactgtaaactaatttatatgtttatctattgagctgtgtctatttttgcatgtttggcagtcagacctatagtattagactttgcaatgcagatgagatttgccatcatataggcctggcaaacaactggacctcattaaaatttaatttttttaaaaaactgctgaaaatgcctccttcgaataaagttatctccagtgctgcatttgaacctgcggaacactttcaggtaaacactagacctgtttttctactcacctatccacacagtatagtgtgtaagtgaacacagaacaaaaatagaagctgattcagcctcagatttaaccagtatcatttttttcccctagggatactggggaaagaattacaacaaaattatacaactgaccatccaatttataaatactaaaacaatacgaaactgactacatttaattttcacttatacataaaaaatgggcagtgggatataatctctatctttctccattttgaagttccataaattttggtgcacatgcacgattggccactcattaatttatttctgttgattttcatttttagagaaggtataacattaacaaagtaatctaacagacatttttctagttttgctgagaaaaagattaatagttcaacagctgtttgccatcatgctaaagtaaatgaaatgtgtcaatataatagacaagaaaattagggctagtactggggcccgagtctgcctcattactagcttagaagaattggaaaccaacaactagcagaaaaataggcatttcattttttccaaagcatacaacttccctttccaatactatatttgctattttctttaaatcacttttacttatcaaatagatcaactatttacctgtatgcttactggcagcacaagcaccaaaactaaaattaaatgattatgcaaagcttttatgtaaaaaaaaaaaaaaaaaagataaagataaaagaaatacattcccctccagcccacttgtcttcttttaaaaaatgctgtctccatacgaattgcgtttttttttctttttctctttcttttttaagtttcctactggttttaggttttaaaagtgagccaaggatatggtaaacagaaattacttattttcctttatgtcattctctgtaacagttaagatcctgtgaacaccagaattgttccatggcctcttcactattgattgcaacagtatcatttacctgaagttacacagtgaccacaaaaaccatgtccaggacaccaaatttctactgcgaactctagggtgagacactaaatgtacattcctctttctctacctccccaaccacccctcctccctaattaggactgttattctaaagaaccctcagattattgcagtatttcaatatcatactttctatggatatattttgcccttaatttaatctgtgtgacatataatacacggtgtccactagtatgtcctacttggaactgagttgcaggtaaatgtggaggtgcaatctcatttcacaaaactgaaaatgaagagtatcagctctttttttccccatttatagtatttcccccttccctttcttgacagctaaaataaattatctgcattaagatttctgcattatatttcattttatataattgtgcaaaagcaactctgaagtatgcccaacatagttcatctcaatcttcagcctacccaatactggctgagaacctattgtgtaccagtcttaataaagatgcaaagatgagcaaagcaagcccctgggtggtgatggggggcagttcagtaggtctatggctagaggacactttcttactaggaaactgaggaaggaacatggttcaaacttcccatacccccaaatcctccaatcaaatggcctgtactcatttgcaaaaactggtccaaataggccaatttccaagagtttgctgcctctttaaatagggaatcttatcttctgtgggctttaatatcttgtttttcaatgacttcttagaaaatataaggacatcaacatatatttgactattgaaaaatataagacaagagtcactttattttctatagtgaagaaaatctactccaaaatcaatctcaaagtttgttctatgcccttaagacttcaaatactgagtaagatttcaaaaaagaaaagaaaaaaaagtggggaaggtggggaatgaagaaagaaaagaagaaaataaaaacggaaaaaggggagaaaggaaaaaatagagaaaaacagaggggaaaaagaaaggaaaagaataaagcaaggaaacaagaaagaaaaggaaggaagaagctgctgtgcagccggggtctctgagaccagaggcaaacttggacgctacccaggcttgcagcttcacaaacactacacttcttttacttgtctctatcaaagaaatgtgcgactttgaatccaccattcttcaaatctctctcctatccctgcaagtaacattttacttcctttctcctcatcctctggggccctcatcagatcatagtacctaactttggagtccattctagtagggcaaaaacctaaaatattatacattaagccacgtggtgcagtaaaccccagtcgatgcttgcccatgaaattacttcaggctggcagccccccactcactccacatcggcccatctcatttggaaaaatgactctctcctgccttacagaaaaggaaaaccctggccgtggtcatgtgaaaatattttatgggtatcctttaacagcctttaaatgttgaaacctaaaaacaatatttgctgttttcccttcgaagctctaacaaagcctttgttttagattcacctttagtgtgcaataagagttaataatcaaatccatcccaacccccacaaatgttaaacaaaaagataaaagaaatgcaaatagctattgtcatggaaagttaaagtacctgtctgtatttttaagtgaaaactattatctctatcaatcaaaatttaagaatacaatagcactaatcacagaaggtgctctgacggagttactttgcctcaaaaaaaagtatttttccccttaaaaaccaagtataaaagtcatatacttacaattagatagagtatttgtaattttgttattaaaaaccttcagcagcctcactgttaataaatgcttctaagtctctagactgatttgtacccaagaagacacaagtccctacatattttaataaggttgatgaaattttatttaaattctcacagtttccaaccggcgggggaacagcacactcttctgttgaaaagagttactcaaacagaggcaacagttaaccggtcatgaaaactccttcttttagagcctggacataattcccacaccctgaaatatcttcacacaggacatatcttccttggatggttcacccttgttaattgtggcaacttatttttgaaataacactctaccctcaaaaagaaagcagaatacccccatcataccccagaatgatctaagtgtacactacatgaatttctctgagtctgtttttaaaaattcactttaaaaaaagactggattagcccctgaatatggtgctttctaaagacagtacgggaacaaaaaatagcaagaccccagatagtaaaacaaacagctcaagattaaaattcctagagcaaacagttaagccaggatgccattatgcacactgagcctggatgatgtctcctccaccgtggggccaagaggctgtcattttccccccagcaagatcagatttccttccctcccgaccgcctctctgagcatcatggccaacatctctagtgtgctattaatatcaatgaagagacgattcgatttccacagaagaaaacctttcctattccggcacagaccttcggggaggaccctggcccgggtatagacaatacagcggcagagtttctgttttcttacagttcagtcttagacactgtttgaaggcttttagcaaacaatggcagcattatctgcaggatagttacaaaacaggatttgttaggacaaagaataataaagctgctctctctctctcttttctttttaattccccctagtcctcacgagcctttctctgcgagtccaaaattcagccacatttcctaagaggcacctgtacttgtctatttcaatgcagccagaagctgacaacggcccaggaaccaggactgctttcaggaggcgctcagaagggcagcaaagtaccctctcaacattagtaaaatgaaacaaaagtgtcagccttggcttcgcacacacttacccgttcatggtgaggaggcaaagctttggggcgggagaggcaattttcacacaacggaagaaagttgagagtttgtaagggagaaactacaggcgcttggaagcctgctggctctcagggctcccaggctggcggcagtgtgaggaaggactgaaggtatgtgggctaaacacaacaaaagccactgccttactctagattaaatatgcaggaagaggcccctttgcataaacacaaacactcagcaaatgaataactggctcaatcagacgcccgctgtgccttctacctgtcctcactctgacaggagacactgcctattccaggggacaccactaaacaggagtcagttaaatgttatgttgctataataacaattaaaatgaattgtattcattagtaattaagaactcactcgtggggcgggggggagtgctattgttgtatctccagctactccaaaaagaacttgtagtatacccatccctggagttctactatgggttgcatttcaatctttaacattcaacgaattttaaacaatcggtttgtttagtcacaattgtcagatatacgtctcgtttctctgctttgtcacattgtaagttgatacttgtgactctgtacctacaaagatctgtttgatatatgcatataaagtgtacatataaaaatatatacacacacatatatatatgtgcatatatactcacacataatacattcaagcatatctagttaaagagaataagccaaaaaaaaaaaaaaaaaaaaaaaaacgctacttaactatattctctagttcactaatcatttaaggaaaataattcgagttttccaaaaatatatcccaaatgcctgcctttcaaatgtcaccaatccatgaccactcatttaaaaacattacccccatattagaaaagatgcttttaactgagtggcctcaaccacttataatttcaattaaataacataattacagtcaacaattttctccatttcggcagaaaatatgccatacctcaacataatttgtccttacaacccaggaatttaagcaagaggaaaaacatgccagtgttaggaattcactactgacttttctcagcttatggaatcaactcacactgacctcttattctatgttccagctacatgttggtcttagtaacttaattattttttaataacttttgcagtattaaatgattttgattgaaacataaataagattatgttcgtctactacttactaatgccctacagaactctgtggccaaatccagcagggctgtgctataggatgtgtccatattattactgtatttggactaaaaaggataggtcacagatccttcacagccttcgagaatgctgtgattatcctagccaagggaaatagggcagctttctatttcaaaagcaattttaatttattaacacaaaactgttttctggccaaatcattctactgtaaaaggtgaagatcactgaaaagttttaaaatattttcacaaacaaaccaacaaacccaaaactcatttcaaacattattatggcataacatggagaaaaggcaaacaaaataaaaagatacccaaagacccagagaataaaacacaggttctctaagcggggtgcccacagaaactgaagacgctgattttgtccacccttttgccttgaaatgaccttccaaataaggtgttagataacccaggtccatagacaatagtgatctaaccttgctgcaaataaaccacaaaacaaaatttaatcagtatatcactgtgagaaagcttctgtccatccccatggagcttctaatgaatgttttggcagttttgagggtagttatgcttcccagctcatctatatctcatactggttgagcaagctaatggaagtgatgttagtggaatccaatattaatgctctgtatcatgcaaacctggatgcaactgaatatattatacaattataggtagtatctaattccataggtattagatactgtaccctaaattaatattttaatgaggacagtgaaataaagacgacaatccaggtaagggatccatgcattgcggcccagctaagctccttgctgaaagagcgccggattcgggagcgaatggcacagacacagggattgtgacaaaaatccgtatgcaagctttagatgctgagtgacacatactgatgcacagagtcaaagatgtcatcctcacacaagcgccactcgctgtaagcttgagagaaaatgcagggggaaagatgggggggcgtagttgcagtgagacctccagaaaataaacagggtgtacagtttcaaaggctgcagacacagacatttcattgttcaagccaattatcagtggaaaataataacaacagatggattcagagtcactgacttttcatatgcacttcatctcggcggaacagatgatgaaacgcgagagctatctcaaaaaggcaaaacatctttcagtaaaagaactctacagtccagatggggaccttctaaggctgctgattatcttcttataatgttgtaagatagacctactaaaacatttcaagaactgatcagatacgatgcgtacaatggcttcattattggaaggagtcgcctcagacttgtgactaaacccggcagagatttcaataaggttaggactgtaagtttcctgttttctcatcagggactgcaggttccaactaaaactggaaatctgtgcacaacaggagaataaactgtcgcccaaggatcctacatatttgctcttctctgatttgagcaaaggaaaaaaaaataaactggaactgtaaaaaggacattaaattattatgaagcattctaccacaatgtgtgtgtgtgtgtgtgtgtgtgtgtgtgtgtgtgtgtgtgtgtgtgtgtgtgtgtgggtgaggggggacagctccaaagcaactctttattaaaagcattcggtgataaaatatcaccccttacatgcattagaacatcttaaatatcccttgccactggtgactgcaaaatagaatttccttttagtagggaataaatataaatttcaatggtggtgtaacagcaattctaccaaatgtcaacgaaaactcaccaacctaccctaacccactctcactcaacttactaccaagttacgcttgctgataaaacacaagaggttaaccacaacctgagggcttgctgtaagtaatggaaaaagttaaatctctaatcagataggcctcatccttactggaataacaatgtatctgttccatgtgtctgtctcctcatctatccatctcgatccatccatccatcaccaattgcacattcataattttgcaaaaattctttccctgaattaatataaaatatggtcgaaatcactgcgctaagaaaaaagaaaagctgattctctcaactatttactaacatacttaacatttaaaaaatatttttatgaacacactgttgacttcacaagtttataacgtaattttttttttttttctgagcaaggcttttctttcaaagtactctgacaaaagtaaattcatagcagaacacacaggcacgaagaaaatatcgccaagggcaaaattctgcaactgctttaagaagcaaacaagaacacaaaagatgtgtaatacaaccatctggctctcctcttactatatcaatgcctcaaccttatccccaccccctgagccaacccacaccaatgccacaaaaccaaatggcttcacttatgtttcctgcacagcaaatttacacaatgcagttagaatgcaaaagttgattttgacacacaaactagcatcttttgaattttccccacttcaatgattttgttgtcgttatctgttcagagtgggacttctttgaaagaccaccaagaacctcaccatgataaaaatgttctcacatggacatatctgttcagcctcaagagaagtctccctgaaaaccttaatctctgccatcttgtgctttctgttatcatcagactttagatgtggacataaaaaaaaatcctaagcttattccaattagaacttttacttttggggggcactaaatggtgggttgtttccccaacttatgatttgaaatgactgcactaatttttaattaccattcttgcaagtcagcacattcactggaatttttccttattcagctcagtctacaaacatttactgagcaactactgtggtattagaaacatgctggacaatggatgatcagaatctattattttcccgtgtgctagcaggacttgcctggtacatgaaaccagcaactctacagtttataaaaaatcttccacatgcaggcaggctgaagcattttatttacttatatacttatttttgaaggcagatataacagacatttgaaagttatagcctgtttgtggggatctaattgcttccaaaaggtgggaatgaatacttttcatggaaatctcagtttgggtaaaaccaataaagcatcataaatgattctcaccaaagggcaacaatgtaaaaaataactgaaaaaaaatttcttcacaggcaaactctactctttgcttttctgcaggggcatgctggaggcagacgttctctatcaggcaagagttctcagtcagaattaaggtctgccaggcagagggccacgtctggtttacttctgttttctcactgttgctggtcttccccgattcctgcctccctctccatgttccgggatgagactttgactggtttctcaaggggctaacttttggttctcttctgggcgtttctgcccagagtcccctggtttggacagcagcgatcgtctgtaggacacacacagtgaatccagccaccggatgaggaattctgctaattgtttaagcctgcactagtgtctggccaccagttggcagacacaactcatggctgcctaccaggcctaggttaacacagctggagccagatgacaggctctcaaagatattcctctcatggccacatctggctcttggcggttcccactgcagctgaactgattctgtttggttgttctgggcaaaaagtttaggcaacagataagtcgtattaatttcagtttatgacaaaaatatcagaacatatactccatgaaggcagggattttatctgatttgcatccccctcccacttttttttgtttgtttgttttttgtttttgagacatggtctcactctgttgcccaagctggagtgcagtgcagtggcacgatcatgactcactgcagcctggaactaactactagactcaagcggttctcccacctcagcctcctgagtagctgggtctagaggcacgtgccaccatgcctcactagttttttcaattttttgtagggacaaggtctcactatgttgcccaggctggtgtcgaattcctgggttcaagtgatcatcctgcctttgcctcccaaagtgctgggattacaggcatgagccagtgtgcaggcctcttgcttgctgtatcccagtacagagcagtggctacgcagggtaggtgttcagtaaatacagaatgagtgaataacactaatcagtgtatgagtggaacaaaaacattcctgtatcttactccagctactctgttcctactgttgtacgtaaaatggctagcatgctcgtgcacacagagaagtccttgaatggctctacagctagattttattatggacacgctcatctcaagaatgaacccatgtacattgtcagtatagctggaaagacctccaacaatccttcccttcaaactacccagtctcccagaattacccacatcccaactttattagtccttaaactgagaaacttggcagctctgtgcccacagggcctgagagtgatctcaaagtagaaacttaccttttggccaccaccaaagtgggaaatgatgaggcaacttttcctggcacctttccatcccatttcctttcccatgcctctcttcctaaattccctgatatctgcagatcccagctcccttctacactcaactatgacccaaggcgaggcttccccaaagctcaccacctctctagctcccattagaaacacatttagaaaagcctacgtaatttaaaaccaggcggggccctccctcttggctccttcactagaaagaagcccaacttacaggctgttatgttaataataactataaagctcccctgagtccaccaagggcttgctaaaggtgaagggacacttaatggaagcctggcaagggtgtacgcatatgctgcttctttcccaaaaagaacgttaacactcctaaaacaagaacggctgaacaaggcagatgagttcaacaagctcagcatctggacttcagcgaaagaaaggtaatcaagtgtgctagaggaagctgttgctgaactcatctccttttctatcatataaggcagcagggtggaggtatagataatttttttaagctaagtataagtttctgaaaagagtactgtgttcactacgaagaattcaggcttcaagctccccttggaaggagctgcttacttcattaaaggtggaccagaaagatgaactcctaaaatgcctctccttccctgcttctgctatttgaaattactttaaaaatgagagaataagctaggctcagtggctcacacctgcaatgccagctattaaggagggtgaggcaggacgattgcttgagcccaggaattcaaggctgcagtgagctagcatggtgctgccgcacaatagcctgggcaataaagtgagacactgtttaataatgggggaataggccaggcacggtggctcatacctgtaaatccagcactctgggaggccaaggcaggtgatcacacttgaggtcaggagttcgaggccagcctggccaacacggtgaaaccttatctctaccaaaaaatacaaaaaaaaattagctgggcatggtggtgcttgcctgtagtcccaggtactcaggaggctgaggtggaagaattgtttgaaccaggcaggaagaggttgcagtgagctgagatcgtgccactgcactccagcctgggtgacagagtgaaaccctgtctcaaaaataataaaataaaataagggaatgtctttgtacaattgcacaatcacaatgaaactttaattcttttttttttttttttttttgagatggagtctcgctgtgccacccacactggagtgcagtggcgcaatctcggctcactgcaagctccgcctcccggattcatgccattctcctgcctcagcctcccgagtagctaggaatacaggcgcccgccaccacgcccagctaatttttggtatttttagtagagacggggtttcactgtgttagccaggatggtctcgatctcctgacctcatgatccgtccgcctctgcctcccaaagtgctgggattacaggcgtgagccactgcgcccggccaagctaattatttaaaaagcagtacaacaggctgcaagtgattgttatctacctattcattggctgaaaacaggctatcaaaaacaacaaaaacaaacaagttttgaaagttaggaaagaatttttataaaggcaaggctgaggttgtacagatcgagtatctgcatttctttttctttttttttttgagacagtctcgcactctcgcccaggctggagtgcagtggcgctatctctgctcactgcaagctccgcctcccgggttcccgccattctcctgcctcagcctcccgattagctgggactacaggcaccagccaccatgcccggctaattttttgtatttttagtagagacggggtttcaccgtgttagccaggatggtctcgatctcctgacctcgtgatccgcccacctcggcctcccaaagtgctgggattacaggcatgagccaccgtgcccggtcgagtatctgtatttcttaatgcatccttgggctgcctcacctaaaactaagtattacagaatatagtactatacagtatactttagactagaatagttcagaatttacaagcatggattcaagtgcccaagttcttattagctctggtgctgactgaccttgtgagcttaggcaaattgcctaagctctctgtccctcagtgttctcatccataaaatgggcttcattacagtgcattatttgcttttgtagaataaatgcattgacatgtcataagtacttagaatagtgtatggcacaaagtgaatgctcaaagaaatgatggctgccgttattacgatcagggatgatataacttaaataaatctaaaacatcctacacctcatttctaccatctctacaagttcttaaaaatagctggctggccaggcatggtggcacatgcctgtaatcccagaactttaggaggctgaggtgggcggatctcaaggtcaggagattgagaccatcctggccatcatggtgaaacccatctctactaaaagtacaaaaattagctgggtgtggtggcgggagcctgtaatcccagctactcgggaggctgagacaggagaatcacttgaacccgggaggtggagattgcagtgagccgagataatgacactgcactccagcctggtgacagagtaagactccgtctaaaaaatatatatatatatatatatatctggctgtctgccatgctacaggctggaaaaataaaagagaatgtatatcagattttaaacttcttaagaacatagtgctaaaataaaatcaaagtacttattttttcccctcaatagtagttggagaattgtaggtataagattggggtctcacctacctcagtggaggcaagtcattagttacaaaaaagctacaagccaaagttagccttggggctgcctgtcccaccaactaccaaaaaagactttggggagatgttcaaagaaggaaagaggagaatccagcctggaaccaaaaggcattgaaacacattttcttgtacttttcaagtctgtgcatatagattctgttactgatttaggatcttaaacagtttgtttattttttaaatgcctttcagctcacctttaataacatgtttctttgacttggctgaactgtgcctcagaagaattacaagcgggaataaggctgggataaggctgggtaaaaggttcagtgaactaatccacacctggtccatgtaaaaaaaaaaaaaaaaaaaaaaaaaaaagaaagaaagaaaaagaaaagaaaaagctcatattttccatatagaaacaagcccctttatatgaaccagccttttatttaattgctaaggcactttccacaccgtacaacctttcatgtccttcttcacttgggtggggaaaaggcacagaaccactttccagccacaccagggcgctttatcagcaacagaaattaatactcctattaataatgatagcaagcacaaacctgattcaaaatgggaagcggtaggttcatttaagcagaaattccctgaccaagttttgccaataaaaaaaaagacaaggatgtcccctgagaacagatttgggataaactgtgacaatctcttcatcaaaattcagactttttttctgcctcagttgcgtgacccagactactaagtggaaggaataaggcatggatggggaaaatcttgaatgagagagaacagcaaatatcttagagctaaaatgtgcctctgagaggtccaggcaagccactcctctgggaggggactctgtgtgaccaaggtcacacaggtggtggggacgaaagcaggaactcaagcctgtgactcccaattcatagagaaaagcaatggctacagaatatggcccctgggaacatcagtcatgttaagaggagatttaagaggaggatcctgtgaacagcaaagaggccagagaacagaaggagaagtcatgaatgtcccacagactgtgccagcccattgcatctgaagctggacttgaacaagctttactttctcctatgaagtccttcacttccaggccccaggtatcttctatttgcctcttagttttgttcataggaaaattcttttaaccaactctggtttgaagtaagtggaaaaggagacatttccacacttccgttaagaggcagcaaagtgaagtggagagatcatttcattaggaggcaagagagggcggctctgctcctggacccaccggtatctcatctaggatttgggaagccccttctcttctgcagatccaggctcgtcactggtacaaggtggggtactcagggatggtgtttaattgctacagacgggtcgcctgaacaaagtgctaaaatgctgaaatacttgtgtactcgctgggaaacagcccttgcccccaagcctcctgaacacacccttgaccagaaccttggactttcctgcctcctccacggcatggtgagggtttcccagagccctgctccagggctagagctagtggccatcgggatgaccacagctgtgctgtacctgtgaactattctaaccatcaccccagatgctctgataggtccctttccaaggctagatgcaaggaccaccagggccagctaatgccctagagaatgccactacccgggtcccacgtggggcccggcaagagacagaggggctggaacaagcacaacagtggatccaccacagagctgccttcctccccaaattacttccctcacttggggcacccggatgtaggcctgtacaaatgaggcaagtcaacagaatcttcttagggcatattcttttttttttttttttgagatggagtcttgctctgtcgccaggctggagcgcagtggtgcgatctcagctcacggcaaccttcgcctcccaggttcaagtgattctcctatcccagcctcctgagtagctgggactacaggcgcctgccaccatgcccagctaattttttgtattttagtagaaacggggttttaccatgttaaccaggatggtctctatttcctaacctcgtgatccgcccacctcagcctcccaaagtgctgggatttcaagcatgagccactgcgcctggccagggcaaattcttaaggctaaatttgcttctgaaaactggaaagaaatataccattgtgaaacaactctcaaagtaaaatcctcagctcagagggaacccaccccaacatatgtaatcaaattatatttatcatggaaattctaacagctcctactttctactccacttttactaccctctaggaaaaggaatattttactatcctgtgttccaaatttccaccagagagttgaagcattatacatgctaaaatatataggaaaggaaaaaaattcccattattatttccttcaaccccctctaccttctatgccaccattactcaaaagtcactcaaacattttgctggctgacatgacgccacgctgtcacttgatcaggtgtggagtaccacatggaatgaataaatacttatccacaaccgcatattaaatgggaattcgcacaggcgggctctggagacaaagacgtttctatacagaaatattaactaagaatttaagtaaatggccccactggaaaaaaaaaaggtctgaagtagcaatataaactatatttaatagcaacaaaaaatattttccttttgggaaagcaatttgggcttctaaaagttactgcctttcacgtgacttagtacagtatgcctgaattctttcatttcctaaaacacagatgctaggccccaaaattctactttgtgagagttaattttttttttaattaatcttcccccaaatacaatactcaaataagaaactattttggtacctgtcccccccacacaattgttattttcttaagtgtctgagtataacacgtcccaaagaacatatgttcctgaggaagaaaaaaaaccaggctctagaactaatacacaatgaaaaataaatttaaagcagccttctggtctgacataagaatataaaaatgatatgagcaagaacagcttagtttacatacttttcagtcacagctgctgctccaaaaccacaatacctttaaaatgacattttaaggaaacagatacggcgtggctttagccatagttagatgtagctaacactgaattaaaggggcttttctttttatacacacactttatataaccctgtacactggtacaattaagaagagtaagtcatttttaaaaaatgtagtgataaacaaaatgaattacaaataattctacccagcaaggtttttttttttttttttccttctttttcctttaaaatcgccagactcaggcatgaaaatagagtttcagggacagaaggaacaagtcccctcttcttggttaatatttaattgggtgctaaagatttcttggagaggacctctgtacctccagtgacaggcatacaagaggctcctatctctgcaagagatgcaggcacttccctgaataaacgaaaataacatacaattaaatcagactattcaattaataaattactttggtggaccttgcaggccaagtcctatttaattacataattttaaaaatatttgcacattgcaatcaccgaaattggctttgaggtttcataatacacacttaacacttgagttagagaacacatttatttaataaatgcaggcctaagtgctagaaggccgtaccactctaactgcaaaatcacttagcacatcttcagaaaaagcaaataaactttttcactatttagacgtgggctgctgttgaatgtcaggagaagctggctgatttttttgttttctctgtcatgtgttgcttgtaaatctgactattctgagaggtgattagaatagagctaatggacaaaatggttccagttaaagataacttaaagataaactaaggtggaagatgtcaaggtcctggtagtaaaaacctcttcagagtaaaacaaagagaagtcgtattaactccccatttttcacttcttggaataccaaaatacaccataaattaacatggttactgagcgtaaagatgtgttccattaggaaagcacacacaaattcaaggatgaggaggacattcataaacagaatagaattacagggtaccccaaagagggcagaaacatttcaaagtgactctgttccctatagttgtactggaagtcgtgattttgccattaactgaagttttctagaaaaccacttgaccgctttactgccacaacttttttttgatagaaatctttgtcaaacacacacattttcaaataaccattgcacaccttacacccacaatggcctcagagctttttgagctgtgtggggttgactctctttacaccaaaagcccccataccaccacaataagggttatttttgttgctgtttgggggtcttctccttaaagatttctgtcataaatatatgatcgagcctgctgtgtgctttcatttgcctgcttctagaaacttctatgctaaattcccaaagcctctaagttgctactaactactatgctaactatgaattcagaattcatagttctgaaatttaaaaaaagatttaaattaaactgaaaagaaagattctggtgtgactttataatctctgttcagtgatgaaacaaaaattcttttcacagtctcatagccccctactctctcctccctttcaaaaacttctgtaaagagctgctatactccctgtctccacttattcatcttctaaacatcctgcagcccacaccatgccactgaaacctctgttgccaaagtcattaagttttcagtcccttttgtttgatccataggctgcatttggcagagtgcaccctcccttcttctcaaacagttcccatttccaagcagtctgcctgtaacattggctctccatgatctacaaccttcttcagcaccctcttctccgccaatctggttcttcttccttgggccttccctcagtgaatgctaccaccacacgcctagccaatggggccaaacactctggaggcacatttgactcctccaccacatccaacaatgacatccactccattctctttccttcaccctgaccaacacttgccggcccacacaagggtgcctcccacgactctgcaattcccttgtgaaggctctttcctgcctttggttttgctctcctcaaacctacccacggggaagacaaactcatcttgcaaaatgtgaatgtacaacgttccatcaattcccagacagcttccccagtcacaccttaatatttttgacattaggacgcatctcaacattgacatggatgcttaacgttgcatgcttacccacgcacatcccatcccagctgaacaatttcttagctttctaaggcccggaaggccaaggggaagcatctagaggtattcaaaaggctgtgctggatgttagccgctgcttggtcctctgcttgcactttttttgcggctctggaaccaccattctaccacggacagacactcacatacacaccctgtacagtcttgtctctaagccgctgcacagatctagcctaccaccgtattgctctgccctctttcacctaagaaatcccacacatcccatataactcaggcacaaataccacttcctccaagaagtcctccctaacctccctttagatcaatgtccctgttatctattccctttgtacacagtacttgtcctaatacaggcatgactccattttattataatggtctatttaatcaatcatttctcttgctaagctctatcccagtctacaaaaggcacttaataaatcttgaatgaataaagtaaaagctgatgaatttcagtaaacaacgttaacggcaacaatttttccttctttggttccttcataaaatcagctcttctccatctttgttcctctccctactacaatggttcagcaacacgcggccaagcaaatcaagtctgcatagtatttgttcatacctctgaagatataagaaatgtgtcacagctgatatttatgtgaatgactgagatataatttgaacaaaaactcttccgttcccttgaagtaaaatcatcttattgtttatgatacagtgcaaaggaaatagaatgagcaaggaagctataagaatttaatcaagtcgacttcttataaataagaattgagattcactatgcacccctaattaccctcccgctactaacagtgtcctaatttagactgtaccaaaaaaaaaaaaaaaaaggaaaaaaaacgctttcagatagtaagacgattttgcattaaggtctcagatgagccttagtgccattccctctcttgggctgtggtctgcttaacttcagctttaatgatatcacgcttcccactttgacaaaatcaaacttcgcagttggccttcaaaacagtgtggaagaaagagttgtcatgggacaaaccagtgacctctaacccttggcagatttggtaatgaagacaagaaatctggtatgagccagccatagccccagactcaagaaatggtgtcatttaagtgaccatggaataaaagccaacttctggaaacgtgagatggccacatgggctatatataacacataagactatagacattttctctggggttcaggttttcagagacccacaactagaatatcaaaagaaatttcgtgctcacaatgtaattaaagtaactggcaggcataattcaatcttatttttctttcttttttcttttttttttttgagatggagactcactctgttgcccaggccggagtgcagtggtgcgatctcctctcactgcaacctctgcctcccaggttcaagtaactctcctgcctcagcctcccaagtagctgggactacaagtgtgcaccaccacacctggctaattttttttgtatttttagtagacaaggtttcatcatgttagccaggatggtcttgatctcctgacctgtgatccgcctgcctcggcctcccaaagtgctgggattacaggcgtgagccactgtgcccagcctcaatgttatttttcatgattataaagttgcctgcgtcacttaactttgctgatcttcactttcttcatcgggaaaatggggtaatgagatctgtgtgtcagatgtgagaatatgtgttatactcataagcaggatttttatttgtatatgtgtagagaggtgtataaactacaaaagatgaaaatttttgatacaactcttacatcattcattccgttgtttagcagactttagggaacaccattctgtactatatggaataaaaacatgaataaaactaggccgctgccctcaagaagctcatatcaacatctgggctatgaaaaacagtagtcattagccacatgtggcttttaagtttaaataaattaaaactaaatataactaaaaattcagttcctcaattgcaccagtcatatttccagtgtcaaaagccacatgtggcaatcagctatcatagtggatagtgtagatatagaacattttcatcactgcagaaagttctatgggacagctcaggtctagagaaaaaagtacagtgtgtaggtacattttaacctactgtgataggtgacaaactggcagcagaagaggttttctcatggagccagtacctttgaaggatggtaggcttcatttttataggacagaaaacaggagccaggtggagcgaggcacacatgcaaaggtgcactgtcatcaaggggcattcggagctccaggaggggtaaactattcttggtgaccggcatggaattatatgggggagcagtggccacagagaagtctggagaaattaggatccaactatgaaggtctcccaagccaaactagaagtctggacttactgtggaaaacagagatgcggatgcagtagagtgaccactggatgtgttttgtagaaaaccaactatgctgacaaagtacagcagtggcggttacctctggagatggacatgagaactctggaaagcttctaaaaatgctgatgccagagcccttgccccaaatgcattaaatccctttctgggcacagggcccaagctcggtacttttttttttttttttgagatggagtcttgctctgttaccctggctggagtgcagtggcgttatcttggctcattgcaacctccacctcccaagttcaagcaattctcttgcctcagcctcctgagtagctgggactacagacatgcaccaccacgtctggctaatttttgtatttttagtagagatggggtttcatcatgttggtcaggctggtctcgaactcctgacctcatgatccgcccgcctcggccttggtacattttaaactcccaaaatgaccaatatatagtcagggttgaaaaccagtggagatgacaaagaactgagactgaggttaagttagaatgaagtagtataaggaacagtctactgccatgaccctattaaaagacagggaggaccatcccaacacagaaactgggagggtggagaggaaaggctcattttggtagacgtttctaagacagaatcaatgagacctacaaaaccaagaatatgagcaataagagaagaaaaaaagaatataatatgataacttctgtcccagggcaataaggaccaagaccaagcacacgggaaagtgagcaggtttgggaggggaagagtgtgtaactagttcagttttagatgcattgcctgctgcattctacggagcacctcgtaaaaaggccccgcaggctggaagaaatattagactgattctaaaaagccaaggcctagagtgggacacagaatagttttcacgagtacttatgcaatcttgacaaagtaaatatttccgtaaaacttcaacctatgggaacaatagcaaagacatgcactttaaacattttgttctatttccatctattccacactgcacattaatgactctaactgccttgcttcaccagcaggacacagggatcctgtcccagcactaccagttatataaattgcatggcctggaacaaatcactggacttgctgggcttcaatttcctaattagtaaaaggacagggctgaattagaattagatactaccatgtggccctccactttgaagattctgaggagaaattctataatttataatcatatctatcatttaaatatacattaaatatataaaattatatatttataattcatactctatgttcctgagattatattattcagaaaatatagattcccaaaattagatacatatatttccttttgtcttaaatttagccattaaagacacacacatgttgtttagttctgaataccaatttggttctgtttttcctttgcagtattaaagtaaggggttgcccaaaggattataaatcatgctgctataaagacacatgcacacgtatgtttactgaggcactattcacaatagcaaagacttggaaccaacccaaatgcccatcaatgatagactggattaagaaaatgtggcacatacacatcatggaatactatgcagccataaaaaaggatgagttcatgtcccttgtagggacacggatgaaggtggaaatcatcattctgaacaaattatcgcaaggacagaaaaccaaatgctgcatgttctcactcataggtgggaaatgaacaatgagaacacttggacacagggtggggaacatcacacaccgaggcctgtcgtggggtggggggagtggggagggatagcattaggagatatacctaatgtaaatgacaagttaatgggtgcagcacaccaacatggcacatgtatacatatgtaacaaacctgcatgttgtacacatgtacactagaacttaaagtataataaaaacaaataaataaataaataaatacattagtgtaaattcaaaacaaattaaaaaaaataaaccaagcggttgcgaactctaaagtctgttggaacaaagggccatgctaatgagcaaaacagcccagaggagaaaggcaagccctaggccatgccccagctaagggggcaccccagccatgactcagctcccacccagctgccatttgggaatgtggacccagcgctgctctacatctatcgcaatggccagaaatccagagttgctgtaggtataatcccttgatttttttttttttttttgagatgttgtcttgctgtgtcatccaggctggagtgcaatggctccatctcagctcactgcaacctccacctcccgggttcaagagattctcccacctcagtctcccaagtagctgggattacaggcataaaccaccacacccggataatttttgtatttttagtagaaatggggtttcaccatgttggccaggcgggtctcgaactcctggcctcaggtgatttgcccgcctcagcctcccaaagtgctgggattacaggcgtgagccactgtgcccagccaatcccttgatatttaaatgctggcaacggatcaaattattttaatgtattttacagaccaaacacaacaggtctgagattgccagcttgtctcatgccctaaagtatgccatccttctatggtttatgaacctgaaaaccataaaacatggattaaaagtaagaaagaagtcctctgaagtccctaagatacttctaaccactgctttcagtctaagcaagtttgaccaacaataccagcatggcccttgaagcagccttcatattaagggcctataaagaaatctcctacaaatgtattattattattattattattattattattatcactattttagaggtgggtctcactatgttgtccaggctgaagtgcagtggctattcacaggcatgctcatagcacactgcagcactgaactgccaaagcaatcttcccacctcctccccacaagaagctaggactatagggcatgtgtcaccatatctggctcaaaatggcattattttgtatgaaacatctgtgggatttgaatggagaagagaacgcctgatgaatgtattctttgtataccaaatatacagtggactttaacacttagtgataaaaatgtaatgatttacattctgctgacagcatccatatagccctcagtgtattcaaaacagaaaaatactttatttggcgtgcatattactctctttcttgctttcaagtagaaaaaaaaagccaccaaatttctcttttcgttataccattttttacatgaaatattaaagaatctggcacgcattagcaggaagaggccaagcatatctggactatgccattaccctcttcttcaaagcactatgaaatgtaatctttggtcaccagatcaccttaagatcagtgctgcagtgcaaataaaggcattgctaataaaaaacagtctgcatttggaagagttgtcctgtacatacccaatggggactcaatgggcaagaaatcccaaagaaaatcataaaagaggctcggatgaaaaataacagtccaataatcatcgtaataaagctcccaatgatggccaaaacaacaacaacaataataacaacaacaaactcctggtgacaacttgaatttcatgcttattctgtgatggcagagctgatggcatcctggctctcagaacaaaatctgcaatagattcttcaagagatgtgttgtgaaaaaatagaaggaaggaagggagagtttggagctaggtactttggcacaggatttcagtttacataagcagaatgcaataaaatcttcctcgtctaaatgatctacttgagaacagctttctcatcatgcttactggttggatgtattaggtgggtaaatatttttttaaagcaaactcctaaatcccaccaggagttggggaaagggaagaaaagaaagggtgtcagagttgggagagatggactatgacagactttatggtacagaaaggtcaagatgaactccggatgaactggtttactgcagaatgagacaataatccaaactataagagaaatagttggaggaagtcattagaaagagaaatgtgtaccaggcacagcattatactcttcttatctccattgaacagatgaggaaactaaggcccagcaaggtaactagtcccaattcatatagctaatacatggcaaagcttaaagttgaactgcactgcccattctagaatccaaggtcttaaccaccatgttacacggtctccctaagattgagaccacagggccatactgaacaaaagcaagtaaagacagaaccagatgtgagaagagaaaagataccttcagaaatgcttgtgaagggaatcatttgaggctgactttgatggatcaatgagggaaatggctgggagggaggaggtgacagccttgttgttagtccaaagaggggaatgaggcagactcactgtactcaatgaagagattattgtgcctcagcctcctgagtagctgggattataggtgtgcatcaccaccatgtccagctaattttttttttttttttttttagacggagtctccctctgtcacccaggctggagtgcagtggtgcgatctcagctcactgcaagctccgcctcccgggttcacgccattctcctgccttagcctcccgagtagctgggactacaggcgcctgccaccacgcccagctaattttttgtatttttagtagagatggggtttcaccgtgttagccaggatggtcttgatctcctgacctcatgatctgcccgcctcagcctcccaaagtgctaggtttacaggtgtgagccactgtgcccagcccaatttctcaaagttataagcagagcaaatgacctgctgtaaagggtagttcaattctatcacatataagtgtgtatgtgcaaacctgtatgtttactgatacattatatctcaatctcaaagtatctctaatctaactcactctttttgcttattataacacattctttcaaaataaggcgcatataaatgtctgtaattttattacccagaagtggcaacatttttctaaatcagtaatgttctcccagggtattcccccaacctctctacacatgacagtaggccacacaagcacctcaaatattgtcatttaaaactacaccagaaagtttattcatcagcagtagagagatctgaaattgtttttcattggtgaaattagtagtgttcaagatacgtgataagctgaaaagactgggtgtaaacatgtttacattaaaggaggcagaagaatttggcaaacaggctgggcactcatgcctgtaatctcggcactttgggaggctgaggcgggcagatggccaagcccaggagttcaagaccagcttggccaacatggtaaaaccccgtttctaccaaagaaataaaaaataaaaatttaaaaattaaaaaaaagaagaatttggcaaatcaggaggctcccagctgaagaactgtgctccacacatagatcttatttggtacaatgagggaacctgtcatctttggactagaaagtgggttgatcctgccatcaaaatatcattgcttgctccttaccacacctttcatatgagatgcctgctggagtcagtgagggcagcaaagagggacttcatgcctcagaggaacacaatgtgtgacttttctgggcttccttcttgatacatttctgcccatttggcagaattttgcagagacttgctttcaatgcaaccagacacaagatagtgaagaaatgcataaccctttctacagctgaccagggtagctacggtattggctaaaagaatctgacagttggctgggcgcagtggctcatgcctgtaatcccagcactttaggaggctgaggcagttggatcaccggaggttgggagttcaagaccagcctgaccaacatggagaaaccccgtttctactaaaaatacaaaattagccgacgtggtggtgcatgcctgtaatcctagctacttgggaggctgaggcaggagaactgcttgaacccaggaggcgaaggttgtggtgagccgagatcgtgccattgcactccagcccgggcaacaagagcgaaactccatctcgctaaaaaaaaaaaaaaacaaaaaaaaaaaaactgacagtttcagaatggccaaattggctcagttggtcctcaatatcctccacctgtgactggcttggttgcccagccctgagctcacgcctggtgccctttgatccagctggactgtgacctgatcaagctgcttgggtgcaatggctgacataggtggaatgaatgatcccgtcacccactgagatagcctttcacaaagtctagacctctttttttttctttttcttttttttgagagggagtctccctctgtcgcacaggctggagtgcagtgtcgtgatctctgctcactgcaagctccgcctcctgggttcacaccattctcctgcctcagccttccgagtagctgggactacaggcacccgccaccaggctggctaatttttttgtatttttagtagagacggggtttcactgtgttagctaggatggtcttgatctcctacctcgtgatcacccgtctcagcctcccaaagtgctgggattacaggcataagccaccgcgcccggccacaaagtctagacctcttaaatctcacaacacagggttgtcccagggcatcagagagcaaaatgttgaaaaaaaaaaaaaaagacaggatcttcccctaaagcactgggagaaaacagccagcaataaacacatttgcaggtgggtgagatgagaagaacaactatcagaatttgatcatggtttgaggcctaatactttctatagtacagcactgagaagagttacagggaaatgtctaggtgtaattttgataacattaccgctggaagaattcgcagcatacatgttccaaaacagtatctacaatcaagaacaatgttaatatttgatatcagaataagatgatttttattaacatgcgagtgttcatttgacaagacacaatcctttcaaagaaaataacatgccagacatagtggcttgtgcctgtaatcccagctactcagaaggctgcagggtgggaagatctcttgagcctaggagtttgagactagcctaggcaacacagggagaacctgtttcaaaagaaaagcagaaagaaaagaaaagaaaaaacatgaacttatacatgtaataacatgtataactcttcctcctgctatgcttcaaagctgaagcacacaatatcacttctcaggctgacataaaaccagcataaaatgctgtgtgatatgtactttaacattctcctttgctttctactttttcttcattgggcaaaggttttcttaactctaaggcacaatgatcccacatttttaagagcatttctactttcttgtgattttaatcttatcaatataaacaattcattacatataaaatattgtaagtcacttctatgtttttataaaacttttcatataattaaagcgtcatgtcagaaaaaaacatcctttgagaagatgacagtccacacatttgagtttgaaatgcatcgatattgaccataggaatgaacaaaaataaagaagtggaagtcagcggttcagcaaacagccctatttttgctgtgcttactttaatccacaaaacctacagaagggagaaaaactggtaaagaatctgtggacaaatttataactaaaagaaatttgcattaagtgcaattaagacatgagtgcccaataatagtagattgccttaataaattatgttacattcatgcagtagtggaatattatgcagccattaaaaataaggttatgtggcaacatttagtgacatggaaaaatgtgcttgataaagcctcaggtagaacttatattacaaaagagagaggcagagtttgcagaagcacagtttttgaatcttgctgagtccccacataaaaacatacagagcaactagagagcaaaaccaaaaatccacaagcaaacaaacatataagaaaatcaggccaggcacagtggctcccacctgtaatcccagtgagaggtgacagcgtgctggcagccctcgcagccctcgcttgctctgggtgcctcctcggccttggtgcccactctggccgcgcttgaggggcccttcagcccgccgctgcactgtgggaggccctttctgggctagccaaggccggagacggctccctcagcttgtggggaggtgtggagagagaggtgtgggcgggaactggggctgcgcagggtgcttgtgggccagcgcgagttctggggtgagtgggctcggcggccccgcacttggagtggccagctggcccgcaagcctggggcagtgaggggcttagcacctgggccagcagctgctgtgctcaatttctccctgggccttagctgcctccccgcggggcagggcttaggacctgcagccttccatgcctgagcctcccccctccccaccccccgccatgggctcctgcgcagcccaagcctccccgacaagcgccgctccctgctccacggcacccagtcccatcgaccgcccaagggctgaggagtgcgggcgcacggcgcgggactggcacgcagctccacctgcggccccggtgcgggatccactgggtgaagccaactgggctcctgagtctagtggggacttggagaatcttcacgtctagctaagggattgtaaatacaccaatcagcactctgtatctagctcaaggtttgtaaatacaccaatcagcaccctgtgtctagctcagggtttgtgactggaccaatcggcactctgcatctagttaatctggtggagacttggagaacctttatgtctagctaagggattgtaaatacgccaatcagtactctgtgtctacctcaaggtttgtcaacacaccaatcagcaccctgtgtctagctcagggtttgtaaatacaccaatcaacactctgtatctagctaatctagtggggaggtggagaacttttgtgtctagttcagggattgtaaatgcaccaatcagcaccctgtcaacatggaccaatcagctctctgtaaaacagaccaactggctctttgtaaaatggaccaatcagcaggatgtgggtggggccacatagagaaataaaaagcaggctgcccgagccagcagtggcaacccgcttgggtccccttccatactgtggaagctttgttctttcgctgtttgcaataaatcttgctattgctcactctttgggtccacactgcctttatgagctgtaacactcaccgcagcttcactcctgaagccagcgagactacgaacccaccgggaggaatgaacaactccagacgcgccgccttaagagctgtaacgctcaccgcgaaggtctgcagcttcacgcctgagccagcgagaccacgaacccaccagaaggaagaaactccaaacacatccgaacatcagaaagaagaaactccggacatgccgccttgaagaactgtaacactcacagcgagggtccgcggcttcattcttgaagtcagtgagaccaagaacccaccaattccggacacaccagcactttaggaggctgaggtgggtggatcacttgaggtcaggagtttgagactagcctggccaaaatagtgaaactctgtcttgactaaaaatataaaaattggccaggcatggtggcacgtgcctgtaattaatcacagctactcgggaggctgaggcaggggaatcacttgaacctgggaggtggaggttgcagtgtgctgagatcatgccactgcactccagcctgggcaacagggcaagactctatctcaaaaaagtaaaaaataaaatcaagtgaccagtgtcactttgaacactgtaatacaacagatgtggaaaagctaagactagcctcaagtcctacagaatagtagcacctaggtgggaagaagcagagggcggcaatgcagcaacggaaagaactgagaaaaagaaccccagtattgccaataagtactaaatggacagtatggtgagccaagtttaaaatagcagctgaacttagggctgtggggtatttcccgttccaacaaagggtcagagcaaagggcccgtattaagaaaagtctgcagagctgggaggagtctagtgcttatgaactctcaaaactgggctgtgaggtctccattctagcataggactccacactgaggaaaaactcctggcaacagaatcaaaatcaaaaaggacagagaaaaccaagaggaaagataagagaaaggcctccccaaagtagagaagaatacagtaaagatattttagaaagcatgccagtagccaagtagtagaaagtaacccaaaagagagagagctctaaggaattagaagatctctcttaatacagccaccctgctaaaagttcagaaaaatcactttcacgtaaaaatgagcaatataaaaattttgaggtaaaattctatacaaagtgataaaaaaaaaggaacagaataacatcttacacaaaatgaaagcatttatcagacatgtcattacttgtctgtaacctattacttcaaaatgagctaaaagacattaagaataagatatacggcctgaaagaattacataaatcaagccacgtacagtggctcacacctgtaatcccagcactttgggaggccgaggtgggaggatcacttgcactcacgagtttgaagccagccagggcaagatggcgagacgctgtccccacaaaaaaatacaaagaaatagctgggtgtggtggtgcgtgcctgtgatcccagctatttaggaggctgaggtgggaggatcgcttgagcctgggggcacaggttgcagtgagctgaaatggcaccactgcacttcagcctgaatgacagagtgagaccctatcttaaaaaaacaaaacaaaagaaaataaacaaaaaagaattacataaataagaattcgactggctgagaaatgggggaagaaagaataaacttgaaaaaaagaaaaatcattctagaaataagaaaatacactagagggacagatagcaaatagatacaacaaataacgctttaaaaaaaactagaaggttaaaatgaaaaacaaaatcaaacagaaattaagagagagagaaggatttaagggaaagtatcgaatactgaagacaggtaaaggagatccaacatatagaaaataggaatccctgggtcaggtgtggtggctcacgcctgttatcccaccactttgtgaggccaaggtgggaggactgcttgagcccaggagttcaagaccagcctggtcaacatggcgaaattctgtctctactaaaaagacaaaaattagccaggcgtggtggcacatgcctgtagtcccagctactcaggaggctgaggcatgagaatcgtttgaacctgggaggcacaggttgcagcgagccaagatcatgctactgtactccagcctgggtgacaaagctcaaaactaaaagaagaaagaaaaaaaagtaggaatccctggagaggaaagcaaaggaagaaaattgtccaaatacctaaaactataattcaaagaaacattcctgaaattaaaaaaatattctgaaactacatattgcaaaaggaccctggacactgaagcatatttgctccaaatgaccgacactaagatataatctaataaaattactggacttaagacttattatgccagaagaaaaaggagtaacatatttaagatatgcaaagaaaaaatgtgaggcaacatttttaattcagtaaagattgtggtttaagtataaagaacacagcaaactgttacgaaaattcaagaattcagggaatacagtacccatgagccttttccaaaaaatctaacagaaatgaagtttagacaaaatgactacagacattgacataaggactgaagaactggtactgagcactgaacatacctgtattactaaaaagtacaatagggttagagttaaaagggggagagtatcatataaatggctaaatgtcctgaaaatgcaaatctaatacaactatcaaaaaataatgcaaagagtgagtggctcacacttgtaatcctagcactttgggcagccaaggtgggaggatcacttggggccaggagttcaagatcagcctgggaaacctagtgagaccccacctctacaaaaaaattaaattaaattaaattaaaaattaaaaatcattagccaggcatggtggcacatacctgtagtcccagctacaacagaggctgaggtgggaggatcacttgagcccaggagttcgaaattacagtgagctataatcgtgccacggcgctccagcctgggcaacacagcaatatcctgtcttcaaaaaaaaaaacataataatggagttagactagggatagcatatgtaataaaatgtttactcttcttgctaatcataactggtagtggaagtatttagtattgttattctaagactgttgtgtgtaaggtagagaaataagcagatgggcaattatgggatattctaatgctaccatcccctttgttctcgagaaccaaaactgtcagcatggaagaaaggagataaagatgtaataaataggaggttaaataaaagccctgtaatcctgattatgaaatggaaatatcaggatgaactcatgaggcctggacacactcacaacaaggagcactgttagcgctaagataattgtcttgaaacacaaattcccactaaaagaaatgggtttctagataaatggttgatttcaattctcaggtaagaaatgtacaaggtggccaggcgtggtggctcacgcttataatcttagcactttgggaggccgaggcaggtggatcacctgagttcaggagtttgagaccagcttggccaacgtggtgaaaccccgtctctacaaataatacaaaaattagctggacttgttggcgtgcacctgtaattccagctactcaggaggctaaggtaggagactcaggcgggggtggaggcggaggcggaggttgcagtggaccaagatcgtgccattgcactccagcctgggcaataacagcgaaactccatctcaaaaaaaaaaaaaaaaaaaaaaaaaaaaaaaaaggtacaaggtgagtctgaaacattctgtcatagcagggagcaaagaagctatgaaagaccgtagggtcatatcagaaggacagaggagcgaatgcaaagaagttacactcatgaaagacagacaatttgatcttcaataaaagtttaaaaaatgcaataaattgaaatctactaacatgtttaaatttatagtttataaaaacataaaaaatttttagtttattttatttttattttactgtaagttctgggatacatgtgcagaatgtgcaggttacacaggtatacgtgtgccatggtggtttgctgcacctatcaaccagacatctagattttaagccccacatgcattaggtatttgtcctaatgctctccctccccttgccctccaccccccgataggccccagtgtgtgaggttcccctccctgtgtccatgtgttcgataaaaacatgaaaatttaatggttactttcagaaaaggagagcgagtcaactcattattttgaaacttagtaaatagagggaaagaattcgacatttatcctgtattacctaaatgaacagtaccactgggtaactaaagagtagatgaagaataaaattacaaaagcatcccagctagtaagtagaattagaatatcaccgtgttgcatctcccagtgaattaatggatctaggcagtaaggattaatgaccgtcaatatcacaaaaaggaagacaataagatattatatccctcacaaatgaaagaacacaacaccacctagagttgtgctgaagggatcaaacatgagcctctggatccagcttgccaatgtgcaggagatagagaaggcagagggacatgttgaactgaggatgcaatcagcaacttccaggctctggggaaccctacagctcagggggccagggatctctgaaaggtggtaaagtacaaagaaaagaaaggcatagacaggaaatcttcagattaagaaacttaaaagacatatcaaacatttaaaaagtggacaatattaaactgtggtgtctaaggatgcacatgtaggtgatcaaataattaacaaatggaaatgattatgataaaagtaaaaacatgagttgtttttggaaagggctgtgagtggaacaggacacaggagaaacttcaaggtggctaagttcaatttcttgatttgggtggcaaggttccctgccttaaaacaatttttatgtaaatatatacaaatacatatatatgaatgcaacttaatacagtagccacatatggctattaaaacggaaatttaaaattaggtaaaatttagtccctcagttatactagccacatctgcagtgctcagtagacaatggctaccttttatacagtatggaaataggacatctggttcagaactgatctgtgcgcgagcatgtgtatagttgggagtgggtgggtagttttctataactgttctactttataaaaatattgaaagtgcaggcccccaaatacattacatagctatacatatattatctcaaatatagaaatattggctattctttgaagtaataacaaagggcatataccttccagaagattgatcaatgatatgaaaccattttatgccatgacacagcagggaccccaatcagtccaatggatctgacttccagttgctggtacatggtagcaaaaactttcatctcaaggataatgtagctgtgatcagaaaaggttaataagctcttctccattatggattgataactaatcatttcaattatcattaaacatttattagacattgggaacagagaaggctatggcagagtggagcagcagcatccatgccagacagacactccaaacaagggactcaagatatgtacctccgttatacacaaggaggacgaggaagcgctcgtttcacagggctggacatccttaggtcacagtcatcatacctctgtactgctgctgagctcatagtaagtattaaggaggaatttcctctgaagagattcgaaagaggtgtacgaaaggaaaaaatgaaagcatggcttatgctctcataaaatgtttctaagcaggataaatgacataagagaaatgggaggctatatgttcacacagatcaaagtgagatctgcaaaaacatgtgttacataaagagcagagggcctaaaaagaaattacttagaggtcaaaacaaagaatctcagagaacaaataggtacaaaggcaggggtgtccactaatcctcttcggttattagcaggacaagggtcagtgttatagaaagtggataattatgagggacggatttgaataacctaaagaaaaaggatggagaaacaaaacatcttaactacaaaatgcctttccaacccgagtctttaattatcccaggagagtataaattttttctttgagacggagtctcactctgtcacccaggcaatctcggctcactgcaagctccatctcccaggtccatgccattctcctgccccagcctcccaagtagctgggactacaggggcccgccaccatgcccagctaatttttttgtatttttcgtagaggcggggtttcaccctattaagccaggatggtctcgaactcctgaacccgcctcggcctcccaaagtgctgggattacaggcatgagacactatgcctggccaatatttttctttaaaataatataatggatataaaaacataatgagaaaaaaaataggactacagaacttgcgatccagtgcaataaagaagacactaacaaaggtgcattaatggttaaaaggtgtggaaaagcagtaactaaattatactttggtaattgtgcaaggtaccacacgctaagaaacacactagctttgagtcaagataaaagatgcctatctagcaaagaacactaggatggtttaaggggaaaaagaagaaaaagaaaaccactaacagggtctaatttctccccctattccatatctgagccttctgatctcagaaagtccatcatatgtttactagtgtctggatatgatccaaatattctcttcagctctcttttacattttattctatcgagaaagatttggcaaatgaaatctattatgatgtcaaaaggtagctgacaacataaaatgtatcctgctgagttgatgccgcacacggctaaatttacaacaacacaagtatcataaaaattataagaactgcaaattaaccactgatttctagttcactgacataaataatggtaaggacctggataacttccaaacatctttaccactgtttaatttgtcaaaatctatcaagagcatttcaaccacaaacctgtcctctaaggtacattatcattcccacactcagattagcattggtggcaacgaaggaagactgtataattactagggctcctggaggagtctcctctccttgttgtaactcttcagcgtatcagtgtctcactctttcttaaataccattcttactctcaattagttatttaagatcattaaaaaattgggctctaattttgtaagagatgtctctctgctttcaaaattagtccctcattacagcgttaaggttcctactgggctcaaattagcaagattttctgtttacttcatatttgtgaaccaggaatgctggtagcagtatggtacaagaatagttagctgacggctgttgggaaacccagcaggtagggaggtagcacattgaaacaaaatgacaaagacgataattcctctctgagagaaagttaagatacagaatcacatggcttcttccactagcaatccaatctatggaccattcacataaatgacaagaaaagaaaatggctttaacatacatgtaaaatctcttctgaaaaaccatgtttcattcatagtgaatatacagtcgtggctaaactattttattgctcataaacaccaaaagatgtttaacaataataaaaaggctgaagaattatttcatgtcaaagtaaatacccttttaaacatctttaagtgaggaagtatcttttgatgcatatgtgtatgtacctgtgtgtgtgcatgggtgcttgcgtagataaccccctgcccccctattttcccactgacatatgtctagaacaaatttacaatactgctgaaaaggaacaaattaagtgtttggccatagcactgttagcaaaaataatcaatcagtagcatcagtgtctaagtagaaactatatatgtatttgtgcagaaactagacagttataactctttgatttgtcctaatacattgagtgtatggagatgtttgacagatactaagtaaatctagcatacactacttgtgcccaaattggtttatttcacatttctgtattttggggggaaaagcaatttctgtatgacagatgcacctggagtttgccacgtggcctccacacagaaagggctgtagagtcagagatttagcaacaagaaaattgcattttattcttatttcttaaaaaaaataaaaagcatattttttcccatggaacatgtttgtattgagttagtccatgtctacacagagtaagtgaatagtggagacgaaacaatgatctgggtaaatcaaagctcccagtcatctgctactgaagttaatgttggtttggcctcaattggaccctaccagctgcccacaataaaaaaaattaatatattgattaaataaagccaccaatccctcatctctctttacctgtgtaaatatggcctaaatgtctccatcaatgtcagggagccactataaaactaaactttttcagagagtgttttaattcttaaacactaaagctgaatgaagttctgagagtgggtaacataagaagagttttcttttgcttgctttgagaaaatcttcacctaaaaacagaaccccaaaatatatgaagcaaaactgacagagctgacaggagaaatagacaactccagaataatagctggagacttcaatactccacctaccaatcctggacagaatgaggcagaagatcagcaaggaaatagaaggcatgaacaacactaggaaccaaccaggcctaggaaccaaccaaccagacatccatccatagcaacttccacctaatgacaacagaatatacactcttctcaaggacactctccaggatataccatattctgaaccataaaacatggctcagtaaatttaaaagtatgttatccaattacaaagaaatgaaattagaaatcagtaacaaaaaaatgtgggaaatccataaacaagtggagattaaactatacactcctatataaccaacgaattaaaggagattagaaaatactttgagatgaatgaaaatgaagacatactaaaacttatgaggtacagataaagcagtactcagagggaaatttatagctgtaaatacctatatttaaaaagaagaggcaaggcgtggtggctaatgcctgtaatcctagcactttgggaggcagaggcgggtggatcacctgaggtcaggagttcgaccagcctgtaatcccagctactcgggaggctgaagcaggagaatcacttgaacccagtaggcggaggttgctgtgagctaagattgtgccactgcactccagcctgggcaacagagtgagactccgtctcaaaagaaaaagaaaaacaaagaagaaagatttgaaataaaatattactaggatttaatcaactggttaacagatccaccaacatatcctagagcttgactctccagtcgtaagactgaacgacttctacagcaatcattttcactcagtaaagacaaaggtttgaagttgtattatctggaatgtttcaaagttatttatccatggaagcttgtggtagaacatgcatgagtcgcttctcaatgatttcctaagtgaggaaactgagatcacataacaagttagccaaaaatacagctttaaaacacaggcttctgaatttgaatcttatgtttttttctgctacataactagtcttatgaatttaacttttttgccgcttatcagatttacatgctgcaagctactaaatctttgggttactactgccattctcttttctagatgtccacatgaggttccatgtacacatcaggaattaattacaatctattttacaaatcatttcataaatcaaggatgaatctttattcctgaaatcacaagggacttataggaaaccatgtgatgtggtctgagagacctgaaaactcaaaccctataaagatagtggaacagagaccatattattcctagtcaaatgatctaagaaggcaaagcagtgaaaaatctggattataaaagcaaacaggccgcacatagtggctcacacctgtaatcccagcactttgagagatcgaggcaggtggatcacctgaggtcaggagttcgagaacagcctgatcaggagttcgagaccagcctgaccaacaaggtgaaaccccatctctactaaaaatacaaaaattagccggtcgtggtggcagactcctgtagttccagctacttaggaggctgagacaggagaactgcttaaaccggggaggtggaggctgcagtgagccgagatcacgccattgcactccagcctgggtgacagagactccgtctaaaaaaaaaaaagcaaacagaccttgatccaagtctaaaatctacctctttctttttttaaattttgaaataattacagaccacaagaagttgcaaaaatagtacaatacccatatacccttcatccagttttccccaacggtgacatcttgtacagctgtatacagtatcagaaccaggaaattagcattgacatattactgttaactaaatgacagattgtattcagtttgggttacttcttctgtaactctaggcaatttaataataggcaatctctctgagcctcactttattcacctgtaacatgaaggtggtaagaggagctacttcatagtacttacaagaactcagtaagatggtgctagtatattgcttataaaagtagctgtcacacagaacaaatggccagattataattattaaacaaaacttctgggatttccagtttgctctgacactttccctgaggtccttcctacttctcactaacatagagatggcatctgccaccatttatagtttcatcccaaaggacaaaaacactagaaaaacaacagaatgtagcctactctaaggactaaaaggaaatgtaattcaaaattcctcttcttatgtgcatacattgatttttttttctttaacttagtgtttccaacagtcaaatgactcaggtgctactgacgatgccctttgaggcctctaggagagaaaggactgaactaaataaaatagctggatcttacaccaatatctaagaataatcttacactttaaatggctttgtgtccttttttgttgggttacggggcggggaagataagttctttttttccccctactatgagtttttaaatctcaattagatttttttttttttttttttgagatgtagtctcactttgtcacccaggctggagtacagtggagtgatctcggctcactgcaacctcagcctcctgggttcaagcaattctcctgcctctgagactacaggtgtgtaccaccacacctgactaatttttgtagagatgcgatttcacaaagcctagactgctctcgaactcctgaccttaagtgatctgcccgccttggcctcccaatgtgctgggattacaggcattgagcccatcacgcctggcgttcaattagattttctgaatcaaacagattaaatgcaagcctggatctaccctgtcacagtttccaaacctactggtgtcaacactaaggaaagcaggactctttaagagccgggttttttcattggtcttaaatagatctctgtttggatatatttttttgtacatgcagcaaagaactacatatagaaacagttccaggcgcaaccaaggccttcccatctgggcactatcccacagtcctgttggcccttgccctcaaccagttgtgtgagtacatccgccatctctctggttgtggcattgcatacgcatatcagtactaagaatgttccaggaccttccctccttcacagctacgttttagggatacgagtatttaatttataatgaggaaagaagaactctgctagagtttcccctaaccctaaaatgttcatactttgagaatagttgaatggaaaaccttaaggaatttttttctatctttttttctattcttctgtcgttttgcaaattagctgcattttcaaaacttgccacccacaaacagtgtgaaacactagtgtctgctgtttctatcaacagacataatttggaatcagttaaaacgacaaataatatgtccactaatcagccaaacagctaaagtagacatctttggtccattttaatacccggatttctcttctccaaaaatcagaccaaataagaatcatatttgaagctgggtactgtggctcacgcctgtaatcccagcactttgggaggtcaagatgggcagatcacctgaggtcaggagtttgagaccagactgaccaacatggcgaaaccccctgtgcactaaaaatacaaaaaaattagccaggcatagtggcatgcacctgtagtccagctacttgggaggctgaggcacgagaatggcttgaacctggcagaggttgcagtgagctgagatgtgccattgcagtccagcctgggggaaagagcgagagtccgtctcaattaaaaaaaaaatcatatttggatcattttagctctgacttcagattagggcaggcatcttaaatgaaatgatttccaggaacattacttagtgctaagatcataggaaaataatttaacaaatacagaactagacacattctatactgcatatatcaactaactagtttataagccttggtgtcccaagattcatttgtaattgaatcaaagaaaatatttggggatacagggaagcaacttatttttcattttataaaatataccaaaaaaggctgggtgtggtggctcacgcctgtaatcccagcactttgggaggccaaggcaggcagatctcaaagtcaggagatcgagatcatactggccaacatggtgaaaccatgtctctactaaaaatacaaaaattcgctgggtgtggtggtgcacacctgtagtcccagctactcgggaggctgaggcaggaagattgcttgaacccagaaggcagaggttgcagtgagccaagactgtgccactgaactccagcctcagtgacagagagagaatctgtctcaaatatatatacacacacacacacacacacacacacacacacacacacacacacacatatatataccaaaaagatcaaaacctggtttcctaactgaattgaaaagatgcctttagctttgtgggccactatcccttgtccagttctaactgcctttttctcaacatgaacatatgtttcccttaaaattacttcttttttcctaccctggtgttatgcaagatccctgcttattttggcgatgaaaacaaaataagaagagccacccagagttctccattccaaagagaagagcttcccaagaaaagcaaagttttgctgttgtatttcctttcagcactgctgagagcaggcggcattcttcagtgcagaaattcagtgcagatgggggagctggtcctgaaatacctattagaaccatgaacagcaggtgcgggcagggactaccgataggctataggtttgaaatcaataaagtttttgtaaaaaaaaaaaaaaaaaaaaaaaaaaagaggagtgaggtggttaagtaggcccaatatgcaatgagacaaagtgcttttcaagcacaaaatataaggaaaggagaggcttggtatttcagagagagccgaagaaaaactaaactctcagactgagaaggcaaagtttgactttatttctatgatcaaaatcctcacaaaaatggccataggtctaggtgaaagctttaaaaatttgggaggggctagcatgcttatgtaagaaaaacaaagagcagcttgcatataggatattggtttcaatgagggaaggcgaatgccaagaacagtctaagaattaagcactcacataatagatcactgtgagcaaagctctcctgcagatgttggagttggtgatctaagcctcacacttggaaaggttgtgtgactggagccatgatatataaagtaagacccaagcgccaaagttttgatttagccaagcaaacgtggctgtttttgttgggtggaagaggcatttttttcactgagcaaagaattacggtaaacatctgctaaccatgaccacagaagaggtggttgttttcatccaaggttattttaaaggaataaatttaattaatacaaccacacagtaatagtatagtatccaaccttataataagtctgcttgcttctatccacagacctattcactaaggaagcacctaatcgagaaagtttcctaatgttgcctttatggcttcttgaggaccacggatgcggggtaagacttttccatctcaagggatgcttgaaaacccaagcagacttcagttcttatctcattccttaggcagttttttttccagagggttctcttgctctattagcaagactttatataatacacatattatttaggcaactaaagccccattaaaaaaaattaatgaggccgaggcgggtggatcatgaggtcaagagatagagactatcctggctaacatggtgaaacccgtctctactaaaattacaaaaattagctgggcgtggtggcacgcacctgcctcagggaggctgaggcaggagaatcacttgaacccgggacatggaggttgcagttagccaagatcgcaccaccattgcactccagcctggcaacagagcaagactccatctcaaaaaaattaatgttctaatgggttgaaagctttacctcacatataaatgtcccagaccgcatctttctctcaaactgctcctttgaaagtaactataagaattaatagaatccagaatggtttgggttttaaaaaattccttatttggttctttctttaagaaggaatggggtggtagggaagctagtaggaagctgaattattcaggctgactgtcattcagatccgtcaaattacagctcaaaacatcactttacctttgaacaaccagccatacctgctccaaaatgaaagtcacccataattattattaaatgttcctaattaagataaaataatcaaattcataaaaacctccacttccattctgacttaaacaaacttctgcctctaccatcaatatcagcagagccagagccttctagatttagaaaagctggttttgcataaactacatgctagcactgaataaaactgaagaactaaggtttactatttctggcctagggtcatgtcaatatcatcaatcaacaagatactgagtttgctgaatgtaaagaacagagtcggctgggggaggtggttcatgcctgtaatcccagcactttgggaagccgaggtgggtggatcacctgaggtcgggggttcgagaccagcctgaccaacatagagaaaccccgtctctactaaaaatacaaaattagccaggcgtggtgacccatgcctgtaattccagctactcggagggctgaggcaagagaatcgcttgaacatgggaggcggaggttgcagtgagcagagatcgtgccaccgaactccggctcagcaacaagagcaaaactctgtctcacaaaaaaaaaaaacagagttgtccctcattatacacagggatacagtccaagagccccggtggatgcccaaaaccatgattagtactgaaccctatacatatgatgtgtattcctatacatgtacacctatgaaaaagtttaatttataaattaggcacagtaagagattaatgataacaaataacataggacaattttaacaatactgtaatagaagttatgtgaatgtggtctctctctctctaactattttcttgtactgtactcacttattttcagaccatcattgactgctggtaactgaaatcacagaaagtgaaaccatggataaggggaaactactgtattttctctctttgatttatctatttcccgtagaactagaacacagcaattcataaaggccagacttcagtaagcttattgaaagaataaatactaaattcatgaactccatttattccaacagttgtaatatcaaacagggtcccagatgttggaccaggctaagagcagcttagaagcttggagtgggaggctgttggtgtttcatcttttccacccactagtcttcaacaaatacctattaaacacctcccaggtgccagttgctgtgttcagtgtgtgtgtgtgtgcgtgtgtgtgtgtgtgtgtgtgtgtgtgcgtgcgcgcgcgcacgcatatgcatgtgtgtataagtcacacatgcaggtgtgtatgtgtgtgcacacgcatatgcatgtgtgtataagtcacacatgcaggtgtgtgtgtcgagcagaggagggagtaaagggggaggtgctatcatttgaatgttattgatactagacagaatcttgaggggtaattaacacaggttttaggattcaccaagtctggaaaattactctgtgtttgtctgttcaccttccacaatgctaactgttatgtgtgctaagaaagtaaagaaggtaggcagagatgaacatggaagaagcaagcaagtttttgataccccaacttcccttaagtgatgatgaaccattagacaagagaccggactacagaggccgcagtctatttaataaccatcaatgccttcagctataaaacaaagccagcctaatgtagcccactaattctgccccaacacagtcaagtttcacttctataagtaactccaacatcagaggccactgtggtcagaattggaatataaccatgtgccactacactaaattatgcttaaataaaaatgcaatgcatccatcatatttgtataatcaaggtattaaatcagctataatttccaagccttaaaagaaaattccaagattttatgtatattcctagtgaaagataatgtgatgaatgccacaataaaaaaataacttagcaggaggaaataatttttatcctttttaaattttccttatgaaatgcatcattttaacataacgcacttcaacagttacccataaatgtaaatttgttttgataaaatgaagagccttttaatccaaattgcacagtgatgcttctacactgatctgttataacttagtaatcagagttaacagactgcctaattaaccaagtcatcatttgccaagatccaaatatgggatgaattgtgggccaaggagaaaatatgatggacatgaaaattattaattcagggaagcattaaaagcatgtgaaattaaagttttttgctaaatctcaccatctttaatatctttaatttttaaggtgtaagtaacatgcaaaaataaaaaaaaaaattccatccagggcacatggaaaaacatttatatcaagtagctaaatggacataactaaatgttaagcttttgacaaccaatgaggtataaaaatcatagataccctttgataacaagtaatattgacagagggcttaccaggtgatagaaccatatttggtgtttcacatgctccagatgtttattctctatatccctaacccttcaggaggtactatttttatcctcaggtaccagatgagaaaactgaggttcaaaatattcctttgcccctaagaatgtatgaataaacaaataatatccgatcctttcaaaattattaggaaagtggttgttaaaattctgtaatttaactcactgaagtttttcccaagaaggtttcatccattcacttattacgtatttattaagaaacaggagatgggggtgacttggaagatgtcagatggctcacctgtacaaaaatgtttcatcatcaggatattattcccaccacttacattctttatgtgacctaaaagacatatgcattttgactgggctaagctactttataagccaattttcctgggtcattcaaaagcaagtctgaatgttaatatagggtttaatcctactaagtccaccaaaaagaccgtctttcccttggctacttggcaactcctgttgatcctctgaggcatcattcctgctatgaggccctccaatctcccttctccaatcccctccccaatcaaaacgcacaatacaccagtattcttgtagcttctctatcaccatattataactgacttttctgtctaccttgcacatgtaagtatgttaaaagcaagcatcttgccttaggacgacaaactgtggcagatggtaggtggatggttgaagagaagaatgaatagaaggaaggcaggaaatgaatgaactctagactcctcgaggacagaggcatggtagcatttctgaggcacagcccactctcaaggtaggaaatgtcattgaagatgtcaagcattaggcagacaactttctgggaaaactcccatagatgacattcagttgtgggttagctgaaccatatgatatttaaaggttccttccaccctgtaattctatgtatttgctgtgtatcaagtatagtacccgacgtggtacataaacatagttcactttcccagagttctgtctccttctgaaaccagcactcttttcacctacttcccattgttttgtgtaggtcaaaggccatccatgcctttagagatggacacatgacccatcctaggccaagcaggacctcccaccacccccaactcactcctgctccagctccagtaagtgtttcaccgaaaggcatgtggcacacaccagaccaatcacagaagcaggaagatccagattccatgacagctgctagaactcttaagaaaagatcttttctgctggagttgctacaaaaacagactcatgaaaggttatcctgccacaaacagggaatcgcctccgtgaatgaatccaacagggagcacagcacagccagaagactgccaccaagacttaatggcatgatcggaacctcctgctccagatttccctggagctagttccacaatctgacttttcaacattatgagccaattaattcccctttatgactaagctggtcactcagaaccaacaagacctaaaatatggtgagctcagtattttaaggcaccgacactttagaagtgggctgtctgctctttgtgttaacaaggcaatatgaacacttcaaaccttttaagtcaaaattgcttatttgtggtctcttgaaactggcatttatacatttcttcaagcctaatattttactaatatttgaaggtcaaagtccttggcatacagcttataaacctataattctactgactaagtaaccaaaggtcttctactctgttagccaatgttacctttcagtaccccagattcaccctggtaaataaaaagccttccaggtgaatgtttccaagaactaaaagaacattctgaacttgcttgctgggaaaatgcccaggtacgggaccaaagctttgggagggagaccctctcacttttcacacaggtgattgagcagaacaaatcaattattaggtggtcagaggctaatatgaagtaaaatgagggctagagagatgaggttaattagaaaaatgtcccagagaaaaatgactcaaagatctagagaaaatgtcttaacaggcacatccaactggagatagaagaatggcaattaagtggttgtccttgttcctaatcaaattgcgacacacttttatttcccatagctcttgtgttagcaaaaagaaagcatttgaagaagtctagtaagatcaagcagggcctattagatagcattgaagtataacagctccacatgcagtcctagagtgaaaagtttatgtgaaaacaaaataatgcctgcaagtcgataaccccaagaatatgtgtgcgtgaggaagactgcatggcatagtgattaagaaccagggtacggctgggtgtggtcactcatgcctgtaatctcagcactttgggaggctgaagggggtggatcacctgaggtcaggagttcgagaccagcctggccaacatggcaaaatcctgtctctaccaaaaatacaaaaattagccaggcatggtggcatgcatcttagtcccagctacttgggaggctgaggcaggagaatcgctggaaccagggaggtggaggttgcagtgagccgagactgcaccactgcactccaacttcagcctgggcaacagagcgagactccatctcaaaaaaaaaaaaaaaaaaaaaaacacaacaggctacgaggggaaggaatttctaggtccagatcctactttgctccatataagcagagggctctgggtgagtcatttaactcactattcttcagcttcctcacctgtaaaatgaatttttagaatgatgattacttcacagagttactatgagttaataaatatcaaaggcttagaatcatgtctggcatacagacagtaaaggtagctattatagggtagacctttcaaaagctagaatgtttctcttaaaaaactgctgtttattgagattttttagggttagatttttcatgagtttagaaaattctacttccacctctccctactttttaagcatgcagaatattggtgacagcacgaaatgcaagttcttctaggtacatacatacagataaacctaagaaggtctaagcaccaattattctaggagtagaatcccaaagaaactgccaggtttaggaagtgagtcaggagtgggagactattttgtgtcaccattaatgactggggacagatgtggacaaagacaggacacaggctctcctggttggaatacccagggcaaaacctttactgatcccctgggaaagctggcattaaaaaattcagccctagagcatcttagccagagtcacctggcactgagagactgctgaaccaaattggactcagacgatgcagcaaaatttcaaagcattaaagtaaaaaccctcagaaagctcctaatcttccccgctgctcctcaggcaccagggtattgagaagagggcagcacaagggctgatctaggccctcaagcatcccgcgtaaactgcctgatcaagtctcatattacacggatctgtttcccctttcacgaattattattttagtttctgaagtgatatttggagacaggggtgttatatatttttagagatgcaaaaaatctgggtgttagccactctgagggttatcatgagtctaaccaatgtttttttttctgatttattcacttactttgactgaaacttactggatttcatcttttcctttcctaaaaggatattagtaaccacgtttgatgccttaaactatattttaatcatgtccttttattgttaagttgcaagagtacaagttatgaattaataaaagaaatggctattttaatttcctagataaccctagttactccataagtcgtgtaaataagagtatatgatttcatagatttcattcttgtccgctagaaagtcatgtgatacagagtgagacaggtccctctctctgcttcagcttttacataaaaaattcacaatgaacaacaaatgtcaaccactgacatggtggaacaatatagcaaaaataatagatcatcttcttcaagcaggtggaagaaattggtgttaataatgaaagacatttatatctaactcctttcagactatacagactttggttttctatcaaaagagaagtgatgtgaattttcaggaccgacacatcaagtatatttttttaaaaaaagagaagagaattgggctgggcgcggtggttcacgcctgtaatcccagcactttgggaggctgagatgagcggatcacaagatcaggagttcaaaaccagcctagccagcaaggtgaaaccccgtctgtattaaaaatacaaaaaaaaaaaaaaaatactagggaggctgaggcaggagaatcgcttgaacccaggagcggaggttatggtgagctgagattgcgccactgcgctccagcctgggtgacagagcgagactccgtctccagaaaaaaaaaaagagagagagaagagaatttaaggaaatttaagatgccctctattgcaaggcaggagatcaaaccagctctgattaacttaaaggcaaaacatatccccagcaagaaggcgtacagacactgcagcaccccaaactctcaatttccatggttttctggatgtgggtcaggctccagacactgagccattgcagcgcttgaggtttctagcatgtgctacctgagacaggtcatgagcatccaacagtcaacgtgtcaacaacaaatataaaacagactatctcactgcttgcttattttgtactttttgaagttaattcagcacatgaaacatgagcaaatataatcgggaatcaaggttctttgccatctttgccacctctaaaatgaacatcagaagaaagcagaagatgagttttatcagtggaggtccccaaagcctttgctgatacccttaaatcaacagcactgttattctgttccagacgttgtgcaaagtgctttatacgtaccatctaatttaatcctcgcaatagctcagtggctaggtaatgctattacccctgccccaggcaagtaaactgagtcttagagagagaaaataatttgtccaaaaaaagagccactgaatgagagtgttggggtttgagcttggatcccaatgtccttaatcaatttgtaccacccacaatatccttcaggctcaagtggcaaatgattctgtcttcatggggaagataatgtataaccccttccggatgggacacgcagagtatgcagtacatagtgggaactttccagagaaaacccaagggcagtattttattcctacaataaaggtgatgtgtgtagctttgttccttctctttctccctcaaccagatacagtcctcttaggtgccataaaaatacagaaattcacagggaaatccccagactctgactgattcaacaaataccgactgcatgcatacctaccatatgttaggcactgctagccatggagaagccacactgaatacgacctacttcttgcttattacctgataaacaggtgaattcatgaagggacagggctgtaacatatggaacaaacaagaggtttggatcaagaaaaataataaaggggctgtcccctttcacgtaggtggtcagcaaaggcatgtttaaggggttgatttttgaactgaacactaagggatgagaaggagtgagtcctgggaggcatggaaggtatcccgtaattcagaggcaagggagattttatgacatctgagaagagtaatggggtttaaataaaatattggaaaccacgcggcaaaagctcgaagtttccaagagtcttttgaacacgccagatcttcaagccactatctccacacagtgaacatgatggaagcaaagcctatgtcaggcagacccctgataagtactactataggctggggtctgttgccccaaaaccatcagttctgtgatatggtgtcaatgttaatgaattatcactgcaggtttgttattataggtggtgtgactcttacccgtctcacctaacagggctcaaaaactcaagagacagccagggtcacgtggttggcactgtttttcaatctgggtacaagtcaccaactgggtcatccatgagtactgctgacattctttgccacggacctgtggcagcttctgtgtgcagatgacacagtcctttgagggccattcccaagaggatctgtgggggactaggacctgctttgccgagtcagcacagaggcagggatggaggatgaggtggcagaagatcgacatcatgtaacatcagcctgcacgagcgaaaccctacagtttcagattatcatcagcaataccaacttgaaagcagttagtgaattctgcttgcgaggcaggaccattgtctgactaagtcaaaaaaaaaaaaaaaaaaaaaggaataaaaaaagaactgtatgcttctcaggggaaatcctcaaaacaggatccagagacctaagctctgctaacagggctacagcagctgtatacatagctgcacgtgtccttgcagatgtgcagcaggacaagctcccaaggctgtacttgcatttacaagggaataccaggtgaggagcaatggactgcgaaacatgcgtcatctatcagtaaaacaacgaccagtgaaccagcaacaggatggtacaagcttgtcagagacagagatttccactgtatcacctggggtgcctagtacaatgctggcatttatgatgtaccaggatccgtgctaagctctttacaagcatcacctctctaactcttcagagtgagctggcttctatttttatccccttttccagataaggaggccgtggcacagaaaggttaagtaacttgcctagggttgttcagccaggaagtggaaaaggtggaatctgagtctaagccaatctaacttcaaagcagacactcttaaccatgctgctatcctgtatccacaggaggcatccaaggagtttctgcgaatgcatccattaccctaagttttatgactactcgtcacaggccagtataggcagagaatatattattaatacaaagcatagggaagtctcattctattcattttatgggataaaaagtggctcacaagaatcatgtacaggccaatttgggacagaaaatttggacaggagtggcttacttgtcccgtgcaccccactcccacggtaagctttcagcagagatacagggagcaacaaatcacagaaaggtaggatggagagttctgtcccgtccttgagtctacataagaacagagggacaatgcaaagctgtcagcaatgtcccctgcccatatagggggaacagaattgggtgtgagtgcgtgccactaagacctcatgctagtactcaagccttaatgaaatcttacatccacaggaaggaaaacccactagactagcatattcgagagtttaaattttgctttatagctctcttaataaagaaatgtatttctcagatttgccatggcactttcagtaagaatattgtggtcttaaaatatttactgagctgtatctctgctgagaattaaacaggctaaaattctaacatgtaaaattcaaacaaggcacagtcaacagaaggcattcattgaaaataaataaaaattaaacatgtaagcaaaattgacagcatgatttcgtaaaagtaaccataatggttgctcagtaagcattcaccttttcttagtactagaacccagaatttacctgggacatcaaattgttcaagtctaaggatgcatttcccagacacccttacagttaggggtggctaataggatgtaagcaggcatcattggataaggctacagggaaagtgctttaaaaaggcctgcctcagccaggaaaactactttttgtcttggatgtagaggcaatggcctgagagccagcagccaccatgtgaccttgaagatgaaggaacgcacttgaataagcagagtagaaagatagaagacacaaactgctcttcccagatgtttttacgacagaatacttaaataattttttatacttatatctctcttactagaaaacaattcttaactaatataatgacatgaaaacatatctaaagatgacactacaattttctctgagggaaaaaaaaaactagaagattcatgaattgggattctgattaaccctctattcccaaagctgtttgtttaagtatgacttgccttcttaattagtattgctagcccagggaagcatatttgctgagcctgtctctctgttttgacatgcaagacttgtgaaatttaaacatacttgtaggcatccaaagcattattatttattaaggcctatattaaaggtgagatcttacagcactctcagattctgatgattaaaggaaatttaatcgttcttcattggcatttgatctttagcctaccataatctacccgcatatcccttcatccatatttgatactaaaaagaaagacatttcaacagctagtccatcaactgtaaaatagaaggaacgtacagacaaaccacattactcagaaaataagagagctttcccccacactcatttcgctcatgaaagcccaatgtgattaaaaaggtgaagaagtcacactccacaaggtgaaccagaatgactgtagagccgatcatcacattcgtaaggagtttcgaaattttcaaagtgctttcacatgcattatatcttgtttcatccttacaacaccatctttcaaggtagtaagggcaggtatatattttttattcctgtttctcgcagataaatggtttgctcaaggtcagacggagtggtacccagcgaggtgtcaggtttacaggtcaaatgtccgtttttgatgcatccaatcaagggacagcctactatagtcttcaggccaaatatggcttactgtctgtttttgtaaataaagtctcactggagcacagtgacacccctttgcttgtatattatctatggctgcttttgtgctctaaaggcagagttgactagttgcaaaaaagactgtatggctcatgaggatgacaatatttcctatctggccccttacaaattttaccaacccctgcattaggtcaccttcccacaaatatgatccccgttatgaaccctattcttgaaaaccataaagctatcatggggggtagcagcattcaaatgcctgctagcttcagaatcagggcctgataattagaaaggccattatcttctgcaggattactatatcgaccactgggtcccccgcaaaggtagatggcaatttttaggtggtatacagcatcagtggtgtctgtcacttaccctgaaattttaacgtgtctcacagccataaaaagcctggggtcactgggagggggcatgcataatgccacaggactgcaacacacagagggaagctgaaagcaaaaagaaaagaagaggttaagtgaaggggcaaatggtgatgcttcaaaagcaacacagacacacgagcctttggtatccctcatttacataccacatttaccttcagtatataatcatgtatctaagcatctattttatcctttgccttctagaatcagcatttgacctagctcacaacctgaattacaggaggaggatgcaaaatgttatgtaggtgagtaaaactgtcactcttgaaggcactgacatccacttaggaagttaagttcctttatcttccgtaccataatttctatttcttttcttttttctgagacagggtctcgctctgccactcaggctggagtgcagggcacattcagggctcactgcagcctcaacttcccagtctcaagcgctcccaagtaccttgaactataggtgtgcgccaccatgcccaaataattttggaattgtagtagacaagctaaattttagtaggccggctggtctcaaactcctgagctcaagtgatactcctgcctcagcctacaaagtgctgcaattatttttccagacacagtcttcttctatctccaaggctagaggagtgcagtggcatgatctcggctcactgcaacctccacctcccagtttcaagcgattatcctgccgcagcctcccgagtagctgggattacaggtgtccgccaccgtgtctggctaatttttgtatttttagtagagacaaggtttcaccatgttggccaggctggtctcaaattcctgacctcaaatgatccacccgcctcggcctctcaaagtgctgggattacaggcatgagccaccatgctcggcttataatttcttatttctcaagataaattctcataattacagtgctaatacatcctgagaaataagaaaaagaagatccataggtccaaatgataattttgccatgagttttgatcttttagcctatctcaatgcactcagtagaagagacaggaggaagtaagtacatacatggacacaggcgccctactagcgaaacatacaagctctctcctgacagccaaacagaaaatcttacttgccacagttagcaactctttttttttcagttgcatttcaaatgcaaaaggagactgtgacacaccttctcatggaaacagtcactctgttcatgtgctgagactgcaaagctttcatcgcttggttaggttattagtagaatatttaccaaatccaattccaagtaagttgaagttgctgacagataagtcaactcatcctcaagcactttcagaaagtttttgcgaatagctgtcagtagcaaggtttcacatgccgggtcttttctgcatagatccttgagataataatgccatctatatggtcctcaagattaaataaaggactctcactaatacagaaaaaaaaaaatggaactatagaatgggtagaaagcctgagctttcaaggcacgtacatgtacgtctgtgtgcagtgttctctttcaatagtaaattcaggcaatactttgtgaatttacatgtttttaacctactcagatggagaagttgaaactaaaaaggagatgcacgaagttttatgatttgaatagtcacctgtctccggaaactatgtgggctgtctgcctaccagaactcagaagagagttaagagatggtgttcccagtgggtgtctcttctagatatgagataaactcaggccagatttgtccacactatgttttctaggtatctggtgtctagtgtgcataaactctttgcacatgacttctgaatcttcattcttatatgagtttaatgtgctgtgtgggcattttccctcttgagcaagggagcttaagagtatgataagaatgcatcaaaaatgtttttaagataatttcagttggtaaaggctgtaatcgttcaaacttaattggtgaactcattaatgagcaactgccactaaaagaaagatgaccattgtcatcgacttatcagagcaacgagataatgaagttaattatattgttttcagtggatttacactggctgccttttagattctacatttccaaacatttgttctgacaccccatgagtttggactcttaacaaaaaactatgagctgtggactcctcaaggaacagtcggcagatcacagccccacgtcagggcaatgcaattggaaaacttttctcccctttattatctacttgtaaaatgttataagcctgtaaactagttaatttatgagccgtgttaataatttgctcacactcgattgcaggtttggcaaacacagtttccaagggatgtgggaggataatttgtaggtccggcttctctcctaaggggacactaactaatttgacacagtaacatgacattgatggcggggcacactaatgaccattctccaagacagggctgtcagcctgtcgttccagtgagacgccggtctgctttcaccgctgctcaggactggatgctcaactaattattcagacagcgacattaatgagagccctcatgtttattttcaacagactaaccagcgcttagcttccatttgtctgatatggtcactgattaaaatgtgtttcatgaatagtaaatttgaactctaatataacaaagaagcaccggagaaaaataaggaacagctgactggaaaaccaacctcgtccaagcaatttgttttctgccccatatatcgtcaaggacaaagtgacaggtagtgggaaatgtcatggagtaccaagaaaagtgagtggagtatttttaattacacatgtctgtggacaagtctgacttttgactaaggcccctggatcacaatatggccaagagcagcttccatctcaaacaaacttcactaactgtatgatactgaatgaaaatttgtgttttattatttattcatttatttatttttgagatggagtctcgctctgtcaccaggctggagtgcaatggtatgatctcggctcactgcaacctccacctcctgggttcaagcaattcttctgcctcagcctcccgagcacctgggactacaggtgcccactgtaatgcccagctaattttttgtatttttagtagaggcggggttttgccgtgttagccaggatggtctggatctcctgaccttgtgatccacctgcctcagcctcccaaagtgccaggattataggcgtgagccaccgcgcccagccctattatttacttttttgagaaagggtctcactctgttgctcaggctgcagtgcagtggcatgatctctgctctttgcagcctcaatctcccaggctcaagccatcctcccacctcagcctcccaagtagctgagactacaggcaggtgtcactatgtctggctaatttttgtattttttgtagagacagtgtctcactgtgctgcccaggctggtctgaaactcctggcctcaagcaatctgcctgcctttgtctcccaaagtgctgggactacaggcataagccatcatgcccagcctgaatgaagatatttaaagttagtattttccaggaaatgaccaaaatttgcttatgtgtgttttttgaaccttacaaactttgatctttgattagtctataatatgatcttcacaaacattaataaatgctgttgtattttttccaaatctactgtaaaactatactgctgagggtgtcttaaaaagtgttttttaatgtcttcttttatgtcttgtttctagtctactaaaccttgtaatcaagttctttgtactttaaattaaatttctattttggtgtgataaattttgtccttcattttagggtgattataatcctaaaatattcatataatcatgatgtaaatgaataactttaaaaaaaaaaggtgtgtttagatctattaaaggtgttaaaaaattgaaaattttttcaattttttattgatataattctgatataattcattgtaaaatgtgcaattcaaaataagtaacagtggtagtatttcaacagatgttctatctgccatcacggataaagaattctactcaatattgtgtacaacttcttattttataaaatagcaaaataaatttgagtacacgtagatcactttgggaaggaaaatgtcactgcatgcaacatttcttaagtatgtattcctaaacttactcactctgagatagatctgtcattttagaacgccaaaatgcctaaatggcacacaacatgtgggaagtagattcagactgcaggctaattttttaaatatatttaaacaagtaggcagataaattgttccaaaccagcacgactgtctttaaatgctgcccttcccaggggacttgttggagacaggttctcagattatcagcacctctgggcagtttatgtatggtaaacatttgtcctccataataatacaagaaaatgcggtcagtctgtggcaaagaccagctaaacgttcatcaaatccatttctttttcctgaacacacagctggaatgcatttcccagcatcccttgtagttaggtggggcctggtgactgagttctaaccaaatagatggaagtgggtatacactactttcattcagatcctgaagcctctggcaccctgcctaatgactgctttcttccctggatcgtgggcgcagagatccagtagagaatgcctagttcctggagatagtggagtcactggatggaattcgcctgggtccctgaaagactacatggagcagagccaccaccgctccagtccccctcaaccagcactaacagtgggaggtgctcacccattaaactgcactgagttaagctcccgagcagctgggactacaggcgcgtgccatcacacccggctaatttcaaaaatttcaaattctggaatgttggttacagctgctagtatctcttacccaaatacatggacctttccaatttctccctggcttttacttgggtctccaggtaaccataagtaagcagaagctctgtcaatttggaacattttctgaaaatatttcatagttaccattatttgctcctctaactaagctaagggtagtaaaaggaaagggaaccaacagctaatgtatgcccaaaatgtgtcagacatagttttacttacttaaccttcacgtagcccagtaaggaagtttgattcccactttacaggtaagaatactgagcttctaagaagtgaaataaaaccaaatgccacagaatattgatccagttgacagtttcctagttgaatgccttttgttgttgctgttgaattggcttttaatatccaaactttacagaaaatacatgttttatttatttctaaataaaacagttttgtctgctgctattataaaagaaaaaatcctatcacatccttcaaatttaatgtaacatttttaacgaaatgggtgaaggttaagtgtcacattgcagtacaactggtagaacatcagatacctccctagaggttttgaaaacccagccacaaaagtgatgcgtttcagatgttcttcatgattaaaaaagaagtcacatttcaaacaaaataaatgttgagatcatattaactgttaactaattaatgttttaaacatttttacatccttaacgtgatagctgtgtatatataagatattttactatcttttagtcatattttagaaaagagttggtaaactttttctgtaaaggaacacttagtgaatattttagactctggtgccacagctctctattgcaactacttgggtactacagtagaaaagtaatcacatgtaaacaagtgggtgttgttgtgttctaataaaacgttatttacacaaactggcagtgggctggatttgccaacttctgcttcagaacattgattgagggttttgcacattgacacataacacattaaaatttgtcctatgtaaaataatgtgaaatagactctggtcagcactttcactcaggatatctgactgccagggatggattactgatggtaagggtagttgccttaatttgccaaagggttaagagatgagtgctggcaggctcagcttccactcactcaccccatgcctggttctttcccctaagtcatgccacctttccaagggcccatgcgcccacatagacagcttactagaatcccatgccattccgaacaaaaatccaaggaatacttgcaacaaccaaaaaaaaaaaaaaaaagctgaagctttttctcatcaatacagtcaagcccctgtgttaagatagtgtaggtaacagtcaccttaaagtgactttatgttggaccttttttaaaaaagcaaaataaacagtagattttagatgtcactggaagagtgagacagaaatgacatccactaaaagtttcaaaatcaggcatgaagattccctaaattagaagcaaactgctttcttggatttaaaggatgttccggctgggtgcggtggctcacgcctataatcccagcactttgggaggccaagcccggcagatcacgaggtcaagagatggagaccagcctggccaacacggtgaaaccccatctctactaaaaatacaaaaattagctgagcgtggtggcgtgtgcctctagtcccagctactagggaggctgaggcaggagaattgcttgaaactgggaggcagaggttgcagtgagcccactgcactccagcctggcgacagggcaagactccattttaaaaacaaaacaaaacaaaacaaaaaacaagatgttccttcttaaccaatttcagggtaggagctacatgtccagtgatagaatatgccagaaacaatgagtcaaatgtattattcccccactattctctcaaggatgtacaattattgtaatgacgacttggtccactttttttttcgttgtggatggcaaagctcagagacatacatacagagagatatctttttttaaatctcagttccccattaatgttttattataacagttaagtgtaaaagatgatttgagacataaaatgggtaaattttatgaatctgtcttatcttaaatgtctatcaaaacagaacaaaagcaagtaaatgataatccagtctgacaaaggcatattttataggttgtagtcattaaaaatggggaaatgtgtgcaaatgcttgttaatgtgatataaaataagcaagataggaaaattgtatctacagtaattctcagctgtataaaaatatgtgtcaatgaagaacagaaaaaaataaaattaacagtatttgccctagagaaatgggattacggtcaggatttttctttagaattttttgtattctctagattttccaaaaccaagtaatatccaaaatacctgttatacaatttgaaacaatggttttgactttaaaaaaagaagaaacattttgcacatttctactcatttattaatggcttttgactgtcttgtttccagactagaagtgtcttgagagcagagattcatgttatttctcatgccccaaacacaatgtttatggtatcttacgcactcaattaacattccttaaagcaactgaatagaccaccttactttttaaaagtcctcttaatgagattccctaaataaattaaattttcatactttaagcctttacaagaaattaaataattttgtttaaagaggttgattgcttgcggattatggctgtaaataaattgcttgatgtaaaattatactttctcctcttccctttttccatgatggcacacaataatttgtcttttaataacctcaaacagttctgagtcatttgctcattaaaaacaaaatacatcttgatcacaaagtttggcatttcataaatatttaccccaaatgcactgcctgctttgaagctgggatggtaagctcctgattgacaagcaacttctgtgcagaaggagggaggagacctctcctgtcagctaggagaaggccaccacactgcctttgcgcctcctctctcctgcagaggctccttccccacagccaaaaaacccacaataaatgtgatcagcattcatcagtgtctctctcacatacacatacacactccctctctctcacgttgcattcactccctgtttgcattctctcaatggcttcccagtagtgtcagaacaggggccaaaagcattcccgtggtttacaaggtcctgtatgacctgacccctgttgacctctctggcctcccgcttaactacgtatctccactacaagcttctcactgagtcttcatactgggctggaaggacggcagggagggatatcgaagattagatgaagatttcagctcctatcctgagaaccgtgatgctgagtgggtaaaacaacatatctttacctaaaaaaatccaaaaacaacaacaaaaaacagtgtactataaacactctgtgttttcctccaccgaatatatcatggatcatttttcatatcattttctggatgaaaataagtgagattagtgaacagaaaattcaaatcttaaaagcaacttcaattttctccttaagaaataagaatttgaccaccagtcctttccaagaccataatgatggctagtggtaatggactagttagtcctctgcaataccaccaaactttttcccagagttgtcaactccaggagcagaagaaaaaaataatgccaaccacagaacacaagcagatattgtcctgtgagagccaatctgtttggattcaaacgtgttcaccacttagggttgaatatttcatttgatgacataaggactgcatgctacagctggaccctcgacaaattaccctggtgaatcctacagaggaagacaggctcttagttgggatttatttatttaatttttattttatttatttatttatttttttagatggagtttcactcggttgcccaggctggagtacaatggtgtgatctcggctcactacaaactctgcctctcaggttcaaaggattctcctgcctcagcctcctgagtagctgggataaacaggcgtgtgccacgacacctggctaatttttgtatttttaggagagatggggtttcagcatgttggccaggctggtctcgaacttcctgacctcaagtgatccgcctgctttggcctcccaaagtgctgggattacaggcatgagccaccatgcctggccttagttgggatttaaatgaaagacatcctcttcatgacatgcaaaagttaagaaccactgtgggtcatcactctcattagtctctgagaaaaaaagggtattgatatatgcacaggctacaaaaataggaagtatgctttattttgatcaaacctcagtagctaaaaccaaagtaatcaattgttgggactgtcacatgataactaatttcactgcaatgtcttcatcctgggtacacagggaaatgacatttccaattccaatcccaatttcactggcatttatacaagtcaggcccatgtgactgatttctgctcaatgggatgtcagcagtagcaaggggcagcacttctaagcccatgatggaaggtcaactgcactccctgttcctcttccccaccaactgctgagaccccataacaagaataagatgaggaggttcaacagacatgaagggaagaaaacatataccttattatgtaaagctaccaaaatctctgtgttagtcacagcagctaacacattgtgagtgtataccgcattaggatctacctcaaagaaatacttatttctgccctcattaagatctacctcaaataaatacttatttctggctttgtctatacttctcccatcttgaccccatgggaccatgtctttttttttttgaaatggagtctcagctgggcacggtggctcacgcctgtaatcccagcattttgggaggctgaggcaggtgaatcagaaggtcaggcgttcgagaccagcctagccaacatggtgaaaccccgtctctactaaaaatagaaacaaattagctgggcgtagtggcgggtaaggggcatagccttgcctctgcaggctgaggcaagagaatagcttgaatctgggatgcggaggctgcagtgagccgagatcactccactgcactccagcctgggcaacagaacgagactccgtctcaaaaaaacaaaaaaacaaaaacagaaacggagtctcgctctgtcacccaggctggagtacaatggcgcaatctcagctcactgcaacctctgcctcctgggttcaagcgattctcctgcctcagcctcctaagtagctgggattataggcatgcaccaccatgcccagctaattttggtatttttagtagagacggggtttcaccatgttggtcaggctggtcttgaactcctaacctcgtgatccgcccgcctcagtctcccaaagtgctaggattacaagcgtgagccactgtgcacagcagggaccatgtcttaatatccggtgtaacccccttttaggaagaacccgccactatgtcttccaagatcgaccatagagtgtagttaatcaactcagagggaaagcatccaagaaacagctactttctcagtaccaccacatgccagacactatgtttgaagcacaatatagcttgaacttgagacaaatgaggtttaagacctcctggagcccacatactaccaggaaacactaacaaaagcacatgggaatgattaacacacagatgtaacctaagcacaaggggtcagaaaagatttcgtggaagaaatgacctgcaagccattaaattagaagtcggtgggtgttagccaggtagagagcactgggtggagggtgagggaaatgatcctaggattttctgacagcgctgttggacaaagcagataggagcaagcacaaataccaggcctgaaaataatcaatcttctgccttcttccatgacactaaaaacataacttgggagtgccaggacttccaaaaccaaaacagggccaaatagattgagtaatacagaaataaaagaatgctattacactctgctaagtgtctcaatggtgtaacttaagacaaaaacacttgtttttctatcagtgacagggagaaaggagtgagttattcacactgacactgcttttctaaattatctgagaaaatagtaccatgagaaacgaggtcacctgagttcacacaccatagcacttgtccttaaacatccacccaactcctcctttagaaatataattatccttaaaaatacaaggttagttttgtttattctttcactccataaacacttgaggaaagggcactagaacagagtcacaagacgcaggttccgatcggcaccggggcaccactttgctatagccctttattgtgtctgtcttatcttcccatgagactagtgcattagtgcatttgtagtaagtcccaagtcttttctgccactatctgccacaaacaccctataacgggcttctcaaacttgcatgctcatcaaaatcacctggaggtcttgttacaagcacattgctaggtcccaaccctagagttttttttgttgttttttttttttttttttactgagaaggagtcttgctctgtggcccaggatggaatgcagtggcatgatctcagctcactgcaacctccacctcccgggttcaagcaattctcctgtctcagcctctcaagtaactgggactacaggcacacgccacgacgcccagctaatttttttagtagacgctaggctggtctcgaactcctgacctcaggcaatccacccacttcagcctccctgtaatcccctgccaggattacaggcgtgaaccactgcgcctggcccccaaccccagagtttctgattcactatggctacagtgaggccagaaaatttcaatttctaacaagttctcaggtgctgcttccgccactgctgctggttcaggcgccacacttggaggactgtgctctgaagcactgtgcttccacccttgtattggtgcgtagctgcatctcaccgccagttagaaaagggttttctcatttcaccagggccagctgagtctgtctcaggtgtggcatcttccaggattccatgctcaacctcagggaaccagaatctcagcctctcccccaaagaagcctactctcaagaacacacctgacaccgcaatccattccccagtccacgtggtttgttctcacacctgaatcagaagtcactgcctccaactgcttcgcatccatttcagaataaaatccaggctgggtgcagtgactcatgcctgtgatgccaatattttgtgagcctgaggcaggaagatcgcttgaagccaggagcttgtgaccagcctgggcaacacggcaagattccattacaataaaaaatttaaaaaattacgcaggcatggtggcacacccacctgtggtcctagctgcttgggaggctgaggtgggaggatcatctgagcccaggaatttgaggctgcggggagctacaattgcatcactgcactccagcctagatggcagagaacaaaacccagtccttcgccccggtatacagggtcctgctgaccccctaacctctcccacaccatcctcactccctacctccttctctaataaccacatggagccacactggtctttctgaccccacaccacactcggcttattccttactctgaggcttagccctcttcattctctgcaggaaaggttcttcccctggctctttgtacatgaggatcattctttcgtcttttctttctttctttttttttttttgagatggagtcttgctctgtcacccaggctggagtgcagtggcacgatctcagctcactgcaacctcggcctccagggttcaagcgattcttctgcctcagcctcccaattagctgggattacaagcatgcaccaccattcctggctaattttttttttttttgtacttttagtagagacagggttttgccttgttagtcaaggtggtctcgaactcctgacttgaggtgatccgcccgtctcagcctgccaacgtgctgagattacaggcgtgagccactgtgcctggccgaggatcattctttaagtcttaaatagaaagtcaccttttccaagaggccttccctggctagacaggctttcccaaggtctgtgctttccactgtatcctgtgtgaactcccattccacgcagatatcttgttccttcgtttcacttgcactctctgcttctttatactagaggacaaactccaggagaacagagttctcctggtggagctgtcatagagtttgccctctagtagaaagaagccgagagggcaaaggtctgtttcctgccttgctatgcactcctcctcctgccatctacagcacaatgactgtcacacagcaggcactcagcagatatgcgttgaatggatgaattactaaatctaaatataccatgctatccttccattgaataaaaagctaagaaaaaagaaaacctcactcgaagctataatgtaacaagttataaatgccagagtgatttgcaaatgcacacgacaagatcagttacagaaatgatgaatctaggcttggaattcaggcatcagaaattgacttgggttgaggactggaagagattctcccttctatgtcgtaaatgacccttgagaggcccaccttgccccctacaaaatatctcaaacaatgtctgaaaggtaggatccttaactcttgacttcttgaacttctttttaatgtcactcactcccagtgccaggtgcaagaagaaaagtaggtactaaaattgtctgcacgctgagctcctctaccctggacgactccgaaaaaccacttgtaagtattctatgttaaccacagttcgtaattttgtcacaggtgtttgactaaaaaggggacaaagccttttaagatagtacacccatattatgtcattgtgtatattccggaccacacctaaaagctgacaaaatcttttctttctatgccatggcaaccaggagagttaatgctgcatgattttgctaagagcatcctatatgctccaaaatgttcgcctttacaaaaaaaaaacatgttaaagtagaattttaacacaacttgtcataaaagctgacactagtacactggagaggaaaccaaatgacatgagttgtacctggcagttcaacagaatataggatcaatactctttgtaaggcagccaaagcattggttagaagttcaagtgaggaggatgaagtgaatgaatattcaaagtatactataccaaatgatttttctatagttataaaaaaatcattaaaatgcactaagcttcacaaaaagcagcatagtgaggtgacactggtgccagtcctggtttggacattaatttacttcttgtgtggctttggaaaagtcatgcaccctctctgaaacacattatcaggagaaggtttaatgaactcgatcatctcaaagtttcttgctagtccacatgcttgttgagcctatgaatgtttctggacacgcatcttaggtggaaagacacaaagaaaagggtgaactcacctctaccctgctaatgataaaacaaatgctctgacagctgtcttcttgtagcaaagacaaaggtgtggagtggctatacactggggtttgctgaatcttttcaaataaagttctgtttctatatactgcaggagggtgagttgatgtagtaattacctgttactcttgacaagtaaggtaattaatgtagcaaaataccactgcaatgtgtgtaaatttagaccaccataattaaagcacccgtctgttccacaaactgttcaattaagaaaaaatattgacggtgtacgttttttgaaattaaaaaacgtatggaatgaatgaatctcccttggttgacatccgtttctagaacgtgttctcagcatccataaaggctatataatggagtaacttccactgaaacacagaagtatttctgtacatctactattaagataagagtctcttgtggaagtattttattcagaatttgcattctataaaacctacatctgggccatgcgtggtggctcatgcctgtaatcccagcactttaggaggccgaggcaggcagatcacttgaggtcaggagtttgaggccagcctggccaacaaggtgaaaccagtttgtactaaaaatacaaaaattagctgggtatggtggcacacacctgtaatcccagctacttgggaggctgaggcagaagaattgcttgaacctgggagaaagaggttgtagtgagccaagagtgcgccactaaactccagtctaggtaacacagcaagagactctgtctcaaaaaaaaaaataaaaataaaaatatctgtcagaaaatgaattctaggagtatatgaaccccaaagctattggaggtagcaaaaaggtgagaaataattattgtgcaagtatccaagtaactatgcctgtcccagtgtatcataacctgaaagtagcattgtctacttgccaattttaaagagctggagacactgaacacatgatgtgctagtaaaatagctgcaaagcacctggtactctctgaacagataggcaatggtgtgaaagttggcttcactactcttttattctcattccttcctctatctactagccatttccagacccaaatgttaacatcttgaacaagaagactacctggcctttcactctatagcaaagtgtatctccctgctactctagatgtttagattttctaggtttattctagattttctactctaggaaatctagacaatctctagccacgtcaagagttaaatgcccaaataaattaaaccagaactgctgtaagactaaggagagaaaaaaatctgttaccagttcagtagaaaagtggttacctctaaatgcattcatagtgggtagggggttgggaggaaaaaacagaaaagagcttctgatatctatatggtaaagtagagaactggacaagggttctcacagctcatgctgagaagaaaacccaagggattcctctcttaattcttccactcagataaactcagagaagacacaacaaattggcctgaataaagaaacagctggaattctgacagactaaacagtgtgatatgagcaagaaatggtatatgattttggtgttatttaatgatgtatatacacgttttgtttctttttcatttttcatatttttgtatagcataccttaccttaggaaacgtaaactctagaggggtaactaaaaggtaacttcaagtgaattctcagcttaacatcctgaaattaagtcctaaatgttccatatctgagaacttggatgtatccccaagtaaagaataaagagtacaaggagacattctagactgaaacacgttgaggaaatgaaatggtttctccaagtcaaatactccaatttcacatttggaaataataacaatgtcattaaaagacaaggatggagaaatcactgttctagttgttgatataaacaaagctagacatcatgacttttacaaaatcagacgattccttagaaggaaacggacttggtaaaagtcgctttacagctttcattatatggtgtcactggagtgttaacctttaaaatgagtatttttcaaaaattgtatggcttcaaaagaggctaactctatagtatggtagggatggagacataaaggaacatgatttggggttctgatgtaagattcgtggactgcaaactaaaatttctgactttcaaatgctgaagaaccatccaaagaaccaaggaaggtcaatactgtttttgctcacggagcaaatttaagagagatgaaatccccacaagcatctatttcaaagattacatcaaatgtcattgatgggccataataatgtaacaaaacattactgaattatttcacctccattccatcatgtgatcctcacaaaccactggagtaagattaatcccatcttatagacaagcaaagtaaggcccagaagcagctacatgatgtggctgagttcccaaaaagttgctgtactgaaacaatttattcttcatggaatgggataaatacttgtctccactgagtccatttacggagaatatgtcaatgatgtgtttgccttagtacttacagttcagacttgtgtcttaaaaaatctatcttaaaattaccagtgatattggctagtacattcaaaagcaatggtagtatacattgttaaggaatcaccgaagatgagaacaaagatctggtttcaaattctggcttattcatttagtagaaataccaaattggaacttgtggccatctgaactcaaaatagcgtaagaagccaattaagcctagaatttgctttgccccaaaagggggctcacgggaaacaacaccatcagcttcaattttccactttacataaatcagttctttgtttaacttcctcttagccttttcctcttaacccctcgatggcatcacaccatggtcccctttcatctgacagacagaatctgagaaccatggagttggaggatgatttttacacatcatgtacattctccagaatgtagaaactgatgcgagaaattgaaaaaaggtgagggtatacaaagaagcaaagataaagaattatcacaattatacctatcatatgtattctttttttttaacctacagaaactcaaaagtgagcaaaatgcaaaattgagtcttcatcttcttttattctcaaaattaataaaaactggagaaaaaaactaaatggtgactaggtgagcaagtgcaactgaactgatgttaaggtgttaaaacgtgagtcaatgtttccttggtttaagcaaatttaagagagttcagcgggccacagactcactgatgcgaaggtacccaaattctgtcatacatgtgaacttcatgcattatggcctctttacataagggaaaattattttaaactgaatattaaaaataccaaaaggtaaaatggatgtttaaagcgctgtttactcccagaattaaatgtcctctaatatttaactccagcttaggcattcagcaaaacaatacttggaaatattttttatttaatcaggtatataaatatcatgtaaaggaaatattactttgatgtgccatgtgctacactaagaactatttttacataatcacattcaaccaatggcatttgataaactataatattttcagttcctataatgaggtaagtactttttcatccccatcatcagatgagaaaactgaggcttaaaatactaaataacccccccaaggtcaccgagttcctaagtagctaaaccagaatttgaaactagatctttttcccaacttgggtaattatttaacaactatactatcacacttcagaacatatcagctaatatgcctggtgtaaggtttcttggttcatgttgatactggaaggcaatgcaacttgaaaaaacaactttgttttaagaagctgttttgaaattaagaacatcttttgagctggtaacacgaagacattatttttcacgttacattaataattgttaccctatgaatgctatgcacaaatgcttccttgatactgaagatcacattttcctcagaatttccacagtttttgtctatcagaatataaagcaaaatattagaatattgtgaacatctaaattcttttatcccccagacatctaaacttatgagatgaagccacactggtcctgttttttgttttttgttttaaacagaattttgtcaagaaataactcaaagattcctttccaaatcatatgcgaaaagggaatcaatacaggccaagaaacaaaaaaaaaaaaaaaagcctgtgtttgagatttaacatcagatggactaacacaaaggaaggcaaaaagtgggtggataaagagactcttttctgggtcgctagcttctcttccttttgccaggggaggggaaatactagtatcagtaactaacagaacaatacataaataccaaagaaggtaccgctggggagatggattagtaatatacagtatcatatactatgatacagtagggtctgctgttatccacgggttgtgctttccagggtctcagtcacccccagtcaaccagggtctgaaaatattaaatggaaaattccataaattttcaattgcccaccatgctgagcagcgtgaggacatttctccctgtcccactctgtcctacccacatgagtcattgctttgtccagggtctccatgctgtctacactgactgtccactggtcacttagtagccatattggttgtcagatcaactataatcatatcccagagcttgtgttcaaggtatccttattttacctaataatggcctcaaagtcgaagagtagtgatgctggcatattggtataattgttttattttaaataaattaaatatatataattgttttattgtttataaatataactgttatattgtttaattttattattagttattattaatttgtttctgtacctaagttataaattaaatcttatcatatgtatgtatgtataggaaaaaacatagcccctatagggtttagtactatctgtagttttaggcattcactgggggtcttggaatgtatcccccatgaataatggggaactatttactatatgataccatcagaaaaaggaaagagggtcatggataaattggcaaaatatttacgttttggctaacttctggtctcagaacttcttcttttccttcttcagatatttactcctttgtaaaaatcagccattctttcagtccttcttccctctgccctcattactgatcttggtggtttttagttaatgttgaaaactcttcctttcgctgcctctcatttcactcatctctatttgtatctatattttcatgttatctgtgtgatggttgggagaacaactgggtagaacaagcagacaatggcaatatttcctaaggctccagacttgaacctctaagatgattttaggtggtacaggcatagcaacaaattacactggaccgcatactcaggaagttgttctcttttcaattccacttgaacccttcaaattatgtcaaggacaaagtctcatttgggtgctggtctaatgcctaacacatgttaaagtccatttttaacaaagcgagaacctctccagctcagttatcttaggtagaagtaggcaactataggcagcaagaatttcataccaggggtcagcaaattacagtccacgggccaaacccaacctgctgatgatttctatacagcccacgagctaagaatgaattgtatgtttttaaatggttaggggaaaaaaaaaaatctaaagaagaggcaatatttcatgaaataaaaaaattatatgaaaatcaaattgctgtgtccataaatggagttttgttgggacaccaccattcccattcatctatgtattgcttcttgctgatctggggcaatgtggtggaactgagtggttgcaacaaagaccagatggcctgtgaagccaaaaatatttactacctggcctttacaaaaacagttttcccactcctgtttataccattgttctggcttcatagtatttactttaggtaatcatctagctgtggcaactgatactatttcttttaaggaacaatgtaaagccttcctctagatagactaatttatattctaacaagtgaggggattgcaggggatatagaagcaaatacagtataggtggtatttagatcaacatcgtggaaaatacaaggaaaatctccaagaatgcctgagcatggcaaagtctaaagaataataaaccaaaaagatgggggcgggcaggcagggaggagttgggatataaaaccaaagactatgtaaataagacttccagatgtagcaatctgtcttttaaggtcagagtggagtcagaaatgtggacccctagtggacagaggtcagggagactacccaagaacatcaggttggccagtctcaccatggtgagccgcaggttctaattttacatccacaataccctgacacactggccaagaattcctagtctggcaactgggaaggcagtagatccaaaacaaccaacgttgtgtaagtcaggtaaaacaacagcaaaggccaagaggctcagcatgagcctaggccaaaggcttcccagaaaatattgcttggcagggttattgtagccagtatagtttaagaaggctccctttgctttcttttcactctgatggaaatgttgtttctaaaatgcattgagcacgaaacattttcggcaacttagaataagttcacattaccatcgacaacactttacactcttcaatgtttgatatgcacaatgtttattttttaacaatgaagtttcctccacagtttgactatactctttttagacatttttttttttttttttttttgcaaaacaatcttatggtattgtgtttgcctctcattactcttactgaatatgcatctcttctgtggcctttcaaccaaacaattttcccccaagacagaatggttttttgctggttctgctaacaacaatttctgttgttgagtcatagacgctatcgtagtagtgttaaaatgtatcatctttttctttccatatgattaatgtttttaaaacatgctagtaaaacgtaaaacttaccatatctggaaaaaaagggacttgaaacattgaatttaaaattttggaaataagagtagcacaaatgaatgtccttttttcttttatccacatctgcacaacatttgacctggtcgtcccttcttaccttcttaggtaaattacaattagttttatctgctattgactcagaaacctgagacatgaggttctctctttttttttttttttgagatggagtcttgctctgtcgcccaggctggagttcagtgatgtgatctcggctcactgcaagctccgcctcccgggttcacgccattctcctgcctcagcctccccagtagctggaactacaggcgcctgccaccgcgcccggctaattttttgcatttttagtagagacggggttttatcgtggtctcgatctcctgacctcgtgatccgccctcctcggcctcccaaagtgctaggattacaggcgtgagccactgcgcctggcctttttttttttttttttttttttgagacagggtcttgctatgtcacccaggctggagtgcagtggcacgatcacagctcactgcggcctcaacctcctcgggttcaagtgagccgcctacctcagcctcccaaatatctgggactacagggatacaacaccgctctcagctaatttttctattttttgtagagacggagtctctctgtgttgcccaggctggtctcaaactcctgggctcaagcaatccacccacctcagtctcccaaagtgcgggacttataagcatgggccatcatgcccagccctctattgtttttaaccacaaagaactccttttagtaaattctaagcactcctaccaacatagatgctaagtttcagattctaccaacacttatttgttacgtattaattcatagggaacatctaccaaattgccaatcagagctcacagattaaaatgtttatgaccaaaagccaaggaaattgacatttgattaacgtcaaagtcttatgcaaatgactgaattaacattagcctttaaaaatatgaaaacaggcccagctcacgcctgtaaatgcaatacttcagaaggcctaggcaggcgagtttcttgagtccaaggcttcaagaccagcctgagcaacatggcgagaccctgtctctacaaaaaatccaaaatattttggctgggcatggtggtgcacgcctatagtcccagctacttgggaagcggaggtgggagaattgcttgagcccaggaggtagaggcagcactgagccatgatggcacccctgcactccaacatgggcgacagggacctgtctccaaaacaagaaaaaaggtggggaggaaaaaaaaacaggtcaatgaaataaccatttaaggctgtgtccccagcatcttgtcctctaaactacttccaaacgggaccaactgacatatgggaagtcatgggattttgcagaagttgattgcaccccagctccagtggcggaaaacacatggcctaaaacatgccaactaatatattccatctccctggccacagggagggtggtatgtggcagaaacaagtccaactagagtttcaagaatttttctgaaaatcctaagaaaatattcccttttccactctcctgcttcacatgtgcaaggaaatctacagcttgacagttgctaggaatcatcttaagactgcaaatagggccactctgaagataagccaacaccatgaaaagcagagcagagagctggatcaagtctctcctgcagcctacctactaaggacttgccagtgacactctttaagcctgcctttactggactttctgttgagtacaatcaaactcatcctaatttaaatactgaaaaacaccaggataacatcttctaatcctttgacggcatcttctaatccttggatggcatcttctaatcctttgacggcatctcctggggtttggggatcccaggccttgggagccactgttctgatgagaaatacatcttacatatttaggtgtgggtatgagaacttgaaaaataaccaataagggtgcacttcaagcttggtagatgtttttcagagtttttgtaacaccaagtcaggaacatcactgtgaaaactatgaaagataacaccatcaggaaactgcctgatgttcctcatctaattatgagatacccatgctggctgacattattatggtaaactgacatgagaagatgggccagctccaggtggctctctaacagcaaatgctttccgctagctctgcatcaaacagcaccactttaccctttctttggcatccttaatttctaggggaaggggaagaattcattatcagagaagactcgattaaagaatgacatataaagtgtcaaactttacaaggaagactgcataaccaatggcaacaataaaatgctgtgaggctgagattttggttttgggccctaggatttagggcagacattgttggtctagtatcagaaaataagtatcaatgagaaaatgttggtatttagggcatgcactttgaatcaacctatttgattaaagggaaatacatgaaaagaatagagggtggcaggtccagtcaaaataggtaaaaccttaatatgtctttttctatgcaaagtagcttcagtttttgctacatttatgggagagagagtggagggagaaaaagcaggggtgtctgtgcacatgtacttaactaaaaagatcattttactagtcagctcatccttgacacatcgcttgaaacatggaagaccaggcccccttgaacctggtttggaaggaaatggtgagacagaaagagaaaactaaattgccgtttttaagaaacatgagttggtaacagaaaccagaagaatgagaggtgagaagatagataaaagagggtaagtcaggcaatttggaggtcatgatgtatagagaaagctcttcagagacaactatgtatgtgcaaacatacaaggctggcgggcgcggtggctcacgcctgtaatcccagcactttgggaggctgaggtgggcggatcacctgaggcaggagtcccagaccagcctggccaacgtggtgtaaccctgcctctactaaaaatacaaaaaaattagccaggcatggtggtgtaagcctgtagtcccagttatgtgggaggctgaggcaggagaatcgcttgaacccccagaggtggaggttgcagtgagctgagatcgcccgttgcaatctgggcaacagagtgggactccgtctcagcaaaacaaacaaacaaacaaacaaacaaaccaacaaacaaacaggctgttaaacatccttccaaatttctctgatgcaaacttcctccaactccctaaacttccacggtctgtgtgagctgtgtggaaggaaattgtggaaagaagctaatttctaactctgagagaagagagaaaagcaacggaaacaaggaatatcaagagttctctaacaaaaatccaccacgaaaacaaagcctccagaaatgctcattggaattcccacagggtataagataaaagttcaagccaattttattagaatctcaaaagtcaaagtgacctcagctgataaatgacttaaagcattatgacaaagctctcagtaatgtggccaattggagactctcagaagaaatgtgaacgacattctgagttgacactggtatgaggacctgcagcatcttatcacatatattttcctaaaacaattgtcaccaactgtaaagggttcaggtgaatttcatatcactggcagtctgagtggtggagtgggtggcaatgaaagctttttaattttaaggtgttccaaataactctaaccatttaggaaatggccatgtaaggaattaagaagtagaagcttaaggctactagcatgggaaggcaatttttgtcagggtgacacattttctagaaccctgaaaggaaatcacttagtggtatcttgaaagaaaaagaaacgggcactctctcagcccttcaatcaacaacacaaaacagacttgagcaataatacagcatttctttggctacaggaaaaacaaaaacagaacacaacacaacatcagtgaccctgaagtgtgtgctgttaaccttcttagtaattaagaaggggcacgggaaaaggaagtaaaaaaaaaaaaaaatcctaactgcaatccttcattggcaaaagcaatgcttctcatatgcatttcggcagatgaatggatttgcaaaggagagacataccaacccaaatgaaaagttaacacatttactgaccacactgtcagcccttatttcacaatagaatggtaatcttgctgaattctttaaaactgtattataaatcacctaacatttactagagcatttaaagttgccaggcttctgtggaggaatgcattttgaggggtataaaattctgcgtgttggcctgaaccacacgtacacaaagtaaaccccattttccctctactgctctcaaactgcagcagcagggagcagaacctgccccaatcagctgctctggggagagactgacgcctaccccactcttcctctccccacttgctgaggtgggaaaggctcccaagaatacatatgtgagcataagagaacagcgcatgctcatgaataagatacatatacaaacacacacagtaatacatatgaatgtatataggaatacatatataaatatgtacatgaatatgtatacaaacatgaatatgtataggtatgtgtctgaagcatggcctacaaatctgtcatctccaatgtgcagaaagatttttctttatctcctaagactgatttatatcgtggtctccttctccagccactttcttttccccgcacctctctaaatgtaccagtctcactctttctactggcttctgtggcttcagatccacatctccagccctgactatcttcgtaacctctagttcaatgtgtatttcatcaccttccaaaagactctgcctgaaattaacgtctgcacctcaagccacatccaaacctcagctcatcccttcccagcctgccctctctcctcttccattagcaagggataagaataccaactccattctcccaatcatctgtctttcacaccaagtaccgcccaaaacgttaaggattttgggacctctccatcactgcctttccaatctcatcaaacactcaactgcagactgtagttgccgctcttcagaacatcacaatttcctcctatctgggctcctcactacattgctttgaaatatgacagatgaattatcccagagcacagttctgaccagagactcctctgctcaaaaatccctggttgtgcccactggcaatagagtcagtcctcaaaaggctgattcttaagccacagagtctaatttgaaatcttggctccatctgaccattgcgtgcccagggtaagatcacatgacttttccaagactcagtcttctcatctctgttaactacgcataataatagaatcacgccctgtgcggtggctcatgcctgtaatcccattactttgggaggccaaggtgggcagatcacgacctcaaaagatcaagaccatcctggccattatggtgaaaccccgtctctactaaaaatacaaaaaaattagctgggcgtggtagcgcatgcctgtagtcccagctactcgggaggctgaggcaagagaatcacctgaacccgggaggcagaggttacagtgagccaagatggtgccactgcactctagcctgttgacaaagcaagattccgtctcaaaaaaaaaaaaaaaaaaaagaatcaccttccttggaagcttattaccagtaaaataatacaatgaattgtcaaccactaagcttgatgccttgcccatagcaaatgttatctgccattagtatttaatattaatattaattaatgttactgaattctttactccttaactctgaatttgaggttctccatcttacatcagctacctttccaacctactaatattttctcttttctcctctatgagctctgtgtaccaaccaaaggaattgttcattgctctgagcaccaagatttttagactttgttgcttattcacccagctgccatgagccagaaatcccctaacccaaatatctaatgtttatattttcagcaagctctagctgaaatgcttcatgacggtaacaaaatatcttatttctttcgacactttattcctaaggacagaatttgaatatgaacttttgctttttcaaagttgcctacataaacatcagaatagggcaggaggtactggaatcaaatgctggtctcgtgcacacaatggggcatagtgcatctctcagaacaccaaagtctaaaactgggttaataacttcatcaccttgaagtcttccaccattagttagtaaatatatccctttttcttgattaactcaatattgtattgctacaattggaataattaaggattttatagctaagacatctaaaattgtatttctttctctttctcattataagtaaggatttcagatgttttaatgagccatcataacaagttttagcatcagtgaaaccacttcacacctgaatgacttaatattgtctgtaatctgtctctttgaattcacattggtttttttccataaaaatgtatcaacttcttgctgtgcgtatgaacgaatgcataacaattcttaaaagcgatatatgcatgtgtgatgattacacattataaactcaataaccacacccatgtgtcatcttcaaatggtatttattaaggacccatgtgttcatgcggcatgacacaaacaaagtcgttgttcaatccagcttctatttatttcaacgtctaatgctcttaagagaatgggtggttctctgttattgaaaaaaagtttgtaactgtcaaaacaagaaactgacttggttatagtcagaggcttacgatgccaataccaaaccaatgccagaacatataataaaaagaaaagttctgtcaatttttcccgaaagtctgtttctatgcattacccatatatccagccaattcaaaagggatgaaaagtaaaaattctctgctgtaatatagccaatgcagccagtggatttccttttctaactttattttttttaatgtcctgtagactcatcgtaaatcatttccaatctaattctctggcttcccaattttaactgtcggccttatttaaagaatggcctctatatttaacagattccatatccattctgagagctagtaagctaaaaaagatgttctaaatgcatcattcaactgcgtgactttttaagcagcttaaatgttaaacggcccaattgtcttacctagcagtgatttgaaaactatatagatggctttctactaatgaagaaaattatagtttagtgcacgttccgcagctcgcccttctaggtttcaggtgaaatgtttttatagccgtgtattctctaaatctacccgaacatgcattacttcatcaacatcagaaaacataagaattcaaaattaacgttaagtacaaattttccttttatctgaagatacacattgtaacaccggttattatttttttaacctgttgactattagggcttttattaaaatgaaaaattaaatgaagtttcctaaagcacaaggtaacacttagttgctttcaagggtgctcaagggagaaaaagggaagaagaaaaaaacatagtggcagttacaacaaattaacaacatataataaaaatgccataaacatgcggcatacataataaatctaatcaagtctacaaggcggacagataaaaatgattaactgccactatccttgaaaagaaaagaaaaattttgtccctagctattcatcacagctaatgttctgaccctaaatctaacgtgtagagcgaatggtctttatagtaacacactgtaccaagtagaatggccttttcacttcctattttattttctgagaaatcgagataacaaaaatgtcagagctactttttaactaaaggtgtggctttgggaggatgttaataaaggttctcagaatctttatctctatcattagaaatttttaaataaccaaaaaaaatttagtatttgtgtactgataggacaaaaatattacatatcttgaggcaacattccatcactttttattggctgactgcattcatttcctgattccgatatggtgcaaattcagtgaggcctccaatcaattaggactccatatgctatatctgtaagcggcggggggggggggggccggggggggcgggttataaatttcacctaaaggaaatgtaggaaaactgaggctttcctacaagggagggtctgtggctcacaaaggcctgcatcactttcatgagcgacacctgcgttcctcttggcacaggatcatctcgataggtagcaggtttatgactgctttgcttttataagtgctgttgcagtaagggttacctgaagtgaggatgaacacaacgacgtgtacaaaacaaatataataaaataaattaaataaggtggaaaaaaactgaagtggttcaaatgaacaaactcctacttgctcctcaaagaaaacacgaagagctttcagaaacatctcctctgagagatgcaagagaatatgagtaaattacaacaattaaaaaccattaaagatagaataattgagaatacctgtttaggtaacaatgactttcttgaatgcctcataacagaggttctatttttaatcactttttttgcaaaaacttgcataatttaataataattgtggatttttaatttttatacatccacaagaacataaagtgaaaaccataaattatactgactccagctgttaaatgttggcattctgtctttaaaaaaaaaaaaaaaagttcaaaaatctgtttcctcaaaccaaggaaatgtgggaaaaggccatcctgccagtggaaaccttcagcagcagaaagctcaggctgcggtttcttgccgaggcagcaaactccactgaaagagaagtcgctgccaactcaaatactatttgctttcacacccaagaacaaactgtgtgcatggcgaaggcatcgaagggctcggagcagctggagaggactgcagaaaggtaacagtagtgtcagagctactgtaaactggttctcacttttctatcagcaagttagcatccaggaaaacaacgcaatgccttcaccttgcatcccagcagccctaagtcaggacctgctgtaactcaaaacctcctctttctaagtcaacaagccaagggacttttcagaaaaagaaaaaatcacccagacaaaagaaacacatacttcagcagtgggattctaagggccaagaggttcaggcttgaaatggagtcatgaggaatttccatatctcagtgcgacatgcaacccaccttctctgtaagcaggaaatgcaaaggaagtgttcactgcaactttgtaaaccaaaggcagaaagctctgccaaagcaaatatccttactgcaaggcttctgcttaaaaggtcctgcaagttacagttgtgcctcatggatgggcgtcagtaaggatgtgtgtgtgtgtggtggggaggggggttggggggggcagtcaagaattctataggaagagaaaaacaatccaagtctccaaaaagcgaaaggtttattccatgatgacattctgttccagtttcaagtaaacaaaggccaacttcttgcagacatggcaacttcttgcagacgtggcccaagttaaaaacggttaaataagaaagattttaaaagttcctttgtgcatgctgctttgaaataaacagttcaaattcttgtgcagtgccgtgtagtcaggaagagatgagccccccatctgagacaagcctcacgttatcaaactctgccctccccaggcctggcctgttgcaaatccagaattaaacactgttaattatttgcaggcaaaatccttttcaaagtaaaaaatcaaattgtttgttcaaaaactcctgctccatctaagttccccctcccgctgaacatcattacttcaaagagctcacaaaaatgtcatggcctccaaacatgtatatgaaggaaatgatgaatctgtatgaatggaagatctaagtattctccacttgtaataataacactcacctaaaacaaaaatatcacatatttccaattctagattggactttgtcaggtttcaatattaagagtcaattttattgacttcctccagtttaaatttagaaatctttttcttactgtcttaaccacccatgcctacttgcccccactacaaaaagtttcatggtttagacataggttgaaaaatctgcctaactaaataaacaaagactgcctttctttccaaataaaaatgagtttaagaatttgcctactgttcccccaagacacaatcatatagcaaattctcccacctccaaaatgattgatgtgatgtctttcctttctttcatcattccctaccttgtctggtcgctggtgaaaaccaggaagccacagacacacacttcggtctttcgcttgtgcgggcctcaattctccaatgccaggttgctgccaatgtccttgcagccaatggtaaacaggccacaaggttcaagttaactgcggagcgttactacactgaacatctggtcatgaatgaacggattgcccactaactctcagcattgggcagctgatgaaaaattcaacattttccttgttggcacagttgttttggagaattctctagagcttcctgaattatattaagaaaatttcactgcagcaatctatatctgtgagaacagctggtgttgaaagggatctgctgctctctctctgtgctgggggacctcatgttggatcaggacacttttactacatttgtccttgaaaacttagccttcgttcaggggtacagggtaaagcaggaaagacagctcacggatgctggattccacacagacgaacatcttaattcagagtgaaaaatctattactcagtgaagaaggcattaagatcaaaacagttcattagaaatagacctgtctctgaattttctttagaaaacatatctaatcaaaattatcgttgggttatgatatcagattggtcctatcagcatggcacatttcctaaagattttcagtagaaaataatagtcctttataaaactcaactagatgcaatgtgtccaaacattactttttcaccacataactgattttaaactcagcaaagtgttttattaaacctaagggtgaaacaattagagcaaatctgatgtaatatgttacattatactcagcactggaagaggtcacagtgacagaggtgtctgaggcttaagaaaagaaattctctaaaaatataacagtcgcgtttaaagaaattaacttgttaatggatatatgtgatatattactattctttttgtttaaaaaaaaggaagtggtaaacttaagtcaagctaaatttaggctattatctatgcagcataaatttcacttctgtgtataaatgctaacttgcatatttctccatggtaactaaactatgattaaaacaacagtgaaaccagcctttaaagccacctgtttaactaggaacaacctaatttacaaaaatacttaaactttggaaatttcatgggcatctatatcgtgctcttcccagtagaaagctcacttttccatgaacatataattgcaatgcacttggcctaggtcgcaatcattctttttttaactagtgtaatttttttcatgtattgttcacgctaacctaagtggtatttaagattgtaaagaataagactgtaataactctttccaagaagaaagttattttaccgtttggaagggattaatttacctagaaagtatcttcacattttacaaaaagaacaaatgaaaaaagtgagaaaattccaaactgaaatgactctttgagatggcaagccacattcaaactaatttttttattgagatagcctgataatttactaatgaagaaatgggctattttattggtgaaattaaagaaataattataatatgcccaagaataataaaaatgtaggtataagcaatattttcttatttaattataaaacataaaagtaggtttgaatgtgaatcattttgaaaccttagaattgggtttagaatttaaatactgaaaaccccatgaagttgaagcataatcataataggtcaggtttggtgtgaaaatcatgactcatattcatgacacatattcagaaatgcctcatactaaaactttattataatcaaaaattgatcctcagtttttttttgtctcctggtctttacatgatgtaatgtctaagaccacatttcacactgttaagtaatgatgactatagaagactcataataaaaaaaaaactcataaaatgtcacaatttataattttatgtatacttgcctctctaatatcatgtacatttacgcagtggatgctaattagataacaacggtattactataatgtctataaaacctgcctttaaaaccaaattccgttaaaaatagtcttttcaagctgacatagcccatttccagggtcatatttaaaataattagcaccattgctagtaaatgttctaataaaacttgaaaatgatttctaagcaaaatgcaaaattctctaaacttaacaagaaagtcttccagtaatctgagataatcttttgaaagggtgtctgtgaaatcaaagcagttttaacattttaaagttcagaatctctagggccacttacatggctcctgaaaactactcttggagaacctgacctatggactctctcatcccatctgattctttttcattttttaaattttttgtagagatgggatctcactgtgttgcccaggctggtgttgaactcctgggctcaagtgatcctccagcctcggcctcccaaagtgttggggttacaggcatgagccactgcactcagccccatatacttctttgacacatacaaatgtctgcggagcagagcaagagtttctgagaagcacatggaaacaaaagccaactatgcctgcatcaacaatgtccactaaaagagccccaatttccagaagagtcaccagctcccaaagagcagaatgtaaattgttcatatgcaccagcccaactccaaggcaatcagcagttatttttagaagtcccggatttttgttttctcagaacaatgatgagtcctctttagagatacgtttttaaaaccaacagtcaactctcctttttaagcctcccctatttcaaatccaattcagctattggacaaaaaatctagaagaaagaattccataggcagtggtcatttgttcttaaatacatcccagaccttagaagaaaaggtcaaacaggttatctgtgagtgtgaagcaatgcctaggaaccaatgagggaaaaaggtaactatacccaccatgaatttgtctgctaggtttctcccggtaagatataaagtctcttcaatggatcaaagatgcatttttatagttttaaaaatagacattttaatagataagatgatcaaattgaagggtcatcaataatagcaactttgtattttgtatatgactttgcatttgtcaggtagctgccatttcatcattataccgacccttgtgtcaaaggtagtgtcagtcttacagatggatgactctggaaaaactaaatggctcgtcccaaaactgctgggatttgtttggggactccaattccagtgctcctttcactattatggctcttaacgaaagaattgaactggaggctgggcgcggtggctaacgcctgtaatcccagcactttgggaggccgagacgggcagatcacctgaggtcgggagttcgagaccagcctgaccaacatggagaaacctcgtctctactaaaaatacaaaattaaccggatgtggtggagcatgcctgtaatcccagctacttgggaggctgaggcaggagaattgcttgaacccaggaggcagaggttgcggtgagccaagatcgcgccactgcactccagcctgggcaacaagagtgaaaccccgtcacaaaaaaaaaaaaaaaaaaaaaaaaattgaactggataatccagacaaaaccatctacttccccctagttaatatctggagactgtttcactgattctattatttggctcatgactgaacagattcctagttcccttttagcattaaagtaataggtagaagaataaagctcggcgtcttgcgaccctggtttccaaagtctgtaagatcaggccccaactagttctgctgccttgagtgtttctgctctccatcttgtatgccttttttctgttcctcagacccacccagttcatgataccccagggtctgaacactggttgttccctaagtctggaatgcttctcttccaagctgctcctggctgcctccttcttgccattcagacctcagctcaaaagtcacctcctctgagaagccttacctgggtacctcatctaaactggcccaggggcactccttatttcatcattctgttttatttctctgcacagcactttcctctgatactgttctttgttgtttgtttagtatctgtaccctactagaataccagcaacacaacagcaaggttcttggcagtcttgttaacagttatattcccagtacgtacaacactgcctggcacacacaaagtcttcaataaataattgctaaatgaatgaatgaatcatatcccacatcatatcggtctccaataatgtattctcctctttataatgtagagtcctttgatatggtcaatgttgcgcaaatttcctgtaattaatgggggggttggttatgaatgacttggctatattaaaatatattataaatgctctgcagaaaaaaagactggtttctttaatgatatatcgaataagaggcatctttgcacccaccaggaaacagagatgggttacaaaaatgcaaagtttagttacacaattcctttccatattaattaatcatctaacataaaagagaaggcttaaagaagagcagctagagcctcattcaggaggagggatagggcagagctgagtcaagtcttagagttcagtctaacttgaactctgctaccggactacacagaaccttgagtgctggaacagtagagcatcaaagcagggcaagaatcctgaaacttttggagctgccacagagagcaggaagctcagtaagtgtcaggtgtaaccaggaatgtggtgcccgatgattgcaaccatacctagcagaaatgcagtgctcagccctaagacgtgcacctgggacgttagtttaatcaactcaagtctaggaagcagacacactattatcatctccattttgtaaatgaggaaactgggcttggaaagtttaagtaactgacccagttgcagagccaggatttgacccaggaagtctgagtcaaagccaagctcttaacccacaggcttgtcccgtgggaacaagcttcctaccaagcactaaacaaagactcctaaaggagccatggtcagctaagatcaggcctaaagcaacctaccttcaagtaacacaaattccagttcagactgactacataatttatggggcccgtggcataatgaacacttgggaccccttgttcaaaattttaaaaaatgtttaagaagacagcaacagcagagcattaaaccaagtgtgggtcccttctaagcgtcaggtcttgtgagattgggcatgtctcacacccacgaatacagccctgattctaagtgttttatttctccgaaactttactccctgtacttcaactgtattcatctccgtataaggttcaatgtatgagtcataaggaacatatatatgtgtgtatatatatatatatacacatatatatatgtgtatatatatatatgtgtgtatatatatatatgtgtatatatatacacatatatatgtgtatatatatatatatacatatatatgtgtatatatatatacacatatatatgtgtatatatatatacatatatatgtgtatatatatatatacatatatatatatgtgtatatatacacatttaaatggaaccagcagagtctaggcagggttggaagcacgtgtacctttcccactttatattttaaattgtctaagccatcaagtggcagtccctggaattgcatgaagagagcttaggaggcaaaaacccattcggaaggaacgagatctaactggattccaaagttccaaactttaagaaagttgcaaaagagccatctgaactgctccacagattatgtggatgagcatttataatctgggaacgttttatctggatggattttgctagtttttccaagtgatatcctgaatgtaggtattgctgcctgcggttctttggattgttcaacaaatactttccaaatgtacattatgtgccaggcaatgcgacgggccttggggccagtttttgcctctgtggaacttacagactgaacactgggaaataaatgttaaacaaatgattttacaaatagacatataattacaatgtatggtcaagtctacaagagctatcaagtctgcagtactatgggagaaaacaataggaggaccccatattttcagctgagaggacaaggaaggaaaaccccaccaaagctctcactgatttcacagagttaatctagaaacctttgaagtcttcaacttataccatttagaataatttctccatctacactggaaaaggcaggaaagttcctatgtctagtataattccaggtcccaagctgtacagacagacctaatcctacagtttaactgttctccgtataacattttacagggatgcaagggaaggagggagaaggtagagacagggaaagaaggaagaagcagagagagtggggaaagagagagaaggggagaggaaggaaggaaaaccagaaagatcactaccttctgtccacagaatagcttttaagatacaaccattttctttttttatcctcctccaaaagcttgaaaacactcttcgtaccactcatagcttctaacactccaatgtcttaacattattttaacagagctttgtgtgtgcaaataatgctaaaaccagaaattgtgcctctttccttagaagcatctatctaatctgattgtatatatgtcaagtcgatgtgtgcaatatgtatgtcaacagtgcttaagtaatatcttgtctccacttgcttctgatttctttgaattctcatattaaccactctcatttttttaaaacagtgctgggattttccctctttgaaacttgacagaaacataagatatttcagttcttgctatgaagcactaagcacgctgaaaacatcgccagccctttagtctcattagcttcctttaaacacctactttgctggtataagctaatgtgaacccttttcaccctgtttaaattccaacataaaatttgtacacaacaataaaacatgtggctcatttgtcatgcttccagaagcaactatgtcactcacaccaagaaccacgggctgggggtgcagagtgattttgctcccatttcacatcactcaattgtgccttctgtagaaaagcttttaacaaccacatctggcctttaataaatcactgcactttgtcttcctgccaaaactcctcctttatctaacttacatcttcatgatgagataggaaatcatgcattatggtggtgacaaacaattgtaattatgtcattagtagccatttagtctacaaaggtgctcaaaaaggaaatacaatgcaaaataagatatataggataatacattgatcacagttctaatccgcttttacttcatgagtgtaaaaagctggcataattcttgggcacagcaggcagtaatggcacaccactttatgaactatacagctattttattcccctatctacttaaaaataaaaaagcatttaatagcttgatttagacataaaagttatttgtgatgcctcgctgattataatatttatttttcaactgttcgtagaagtgactttctgtgttaggaaagaaacttgaattatttgggtttatgaaatttaacaaccatacgtgtgtctatgtgtgtacatacacatatgtgtatatgtgtagatatacaggtatgtacataggtttaggtgtatacatatgtatgtgtgtatatacacacaaaacacactcagacacatctctaaaggagtcaaacaacttcacagtatgatacattctctaaagctcccaagtcatgaagaaacaaaactacaaaccagaaatttaagaaaaggtgactacacttaaggaaagtataaaataccctttattccaccatctcccaccatacattttagaaacaagaaattcaagcaagtttcaaaataagcagctatttgggtatacctgaagttctaaaatcctatgcatttcactaaagtcgataaaaatcaactcccagattgcacacagaacatagttccaacattcacccagacggaagcactactgacaaccagggcagggaaagggggtttgcaacctttgataacctacaaccttctgagatggagcatgatgaaatttcctcttaccacatctcaacctttgaaaggcatacacctgaaatatgtaagtaaaatgaatccaaaagcagtgtggtcaaacattagcaggggcaattttatgtataactacagtcagccacttcactctctgcacctcttacaaaccttcattttactgggaaatctttccatgaaactctacaaatggctctacgaatcatttaaaaatttctccagttgttaatttgaaaacgatgtagcaaatgcctagtatgttccacatcaatctgtgaatcccaagataattaaaatgtaaacccagagacaaaaaattgaaactcaaaacaccaatgccaaatctaattaatgcagtgttaataattatgaccattatttccagatacataaattttttcatgtgacaaactttcattttttacctcgcacttggcagtgtatgttttcctgggagggtttggggctgaacccattaaaaaaaaattttggcaagtaggtaaaaaatgtttatgtcaccataatattgacgtaaatcttattgatatcattacctggctgattcaacccagtgctggcatgaatgcaatgaaaccaattatttcaaatttttcatggacttaatctgataatcaggtagttagtgtattgggtgtttctaaggcatacaccttctctgttttattaatttatgtatgatttttttttttgagacagagtctcgttctgttgcccaggctggagtgcagtggtgcaatctcggctcactgcaacctccaaattcctgggttcaatcgattctcgtgcctcagcctcctgagtagctgggattacaggcacgagccaccatgcctggctaatttttgtatgtttagtagagatggtgtttcaccatgttggccaggctggtcttgcaatcctggcctcaagtggtccacccacctcggcctcccaaagttctgggatcaatgcctgagccaccacggccagccaatttatgtgtaattaatgctttgtgtggactttcatctgaatacagaacctcacattttcaaaagatgcttgggaagtaaaagaagctgaattttttccccatcatttttgtttttaaaagagaacaatctcccagatcaatgacctacattgtgttagatgtagaacccccctgcaatttttttgaggaagaattagaaaatgactatttcagacaaagaaagtaataccccaataataaacagaggcttcaggagaacacataaggaggagggaagtctacgtctcataaaaacagaaggatcttcagtcaaatttacctacatgctgtcagtttgcttttctcttcatcagtctgtctcttgtctaagacgagtccttccgtacgggagtctcctccacccccactcaaaaaactttgacatttaaaattttattttttctaagaaaagcttatctgaaaactcacatgcttctctagttacatatgaaagaaactgtacttacatcaacattatctttatttatcaactcccctgcacattgccccctgggtaccaacagttcaaaagttcaaaaagggttttgaaaataaaccaagatagaaaacaggcaccaactcctatttggaacttacattctcatgccttctagcattctctggatgacggatcaagaggaatgataaaagagagagagagaggcagctgccaggggagggtatcaattggtgtggatggggcatttctcacaccgactgaaaaattcgtgttgtccccagaagctgtcaggctaagcaagagacagatctacatatcacaattcaggatgagaggcagcagctgaaagcctcattcactcagaaatccttcctctcttttattcttacattttccttgtttttaatgctatttttatttggcttccaacattcctctctgggtttctgttagcctcttaaaagggatgcgggagagagcacatgaacaggtctgtatgcaagacaacctttgctgggcatctggaactgtctctgctctagtgctgcactaattggttgataccttccttcgctaaatcttgttacaacctgcaactaaagacgaggctctccccattcaatcaatgaagcgggatatctctcttcaaacagacaaagtgaatggacacaacacaaatttgaatctgtctgttacaagacaccggggcccaggcagccgttacttcctccctggagcaccaattcagtccagctgggaaacagttattctgtacgtggagttatccctcacccctatccccacccctatcctactcctcaccaggctataaacgccatgagagacggaatggcacacaaacatcttcctcactggagttgtggcaggctctgaactggggatcaagaaaccttagtgagtgcggtttattgtcctaattctacttccaggtatttactctaaagaagttctcatgcatgccaaagatgtttattgctttaaaaataaaatcacaggccgggcgcggtggctcacacccacaaacccagcactttgggaggctgaggcaggtggatcacttgagcacagaagtttgagaccagcctgggcaacatggcaaaaccccatctctactaaagatacaaaaattagccagccatggtggtgcatgcctgtagtcccagctacttggggggctgaagtgggaggatcgcttgagcctggaaggttgagactgcagtaaaccatgtttgcgccactgcactccagcctgggcgaaaaaatgagaccctgtctcaatcaatcaaatcataaatgtctgttatctgtggaatgaataagcacaattcattgacaaatgacagaatactttgtacatttctagcagggtaagtgagatctatacatgtcaacatgatacctttttcaaaatcgtgcctgaataaattcagcatgaagtagttaggatacaatatagtttgatactaaacttgtaaactaaatacacactctcagaaaaggctacctgtgtacataagtgtatataaatggaatggaacgggtaccccaagctcctgatggaatgtgctgctgagaagtgggaaggggaaaagttataagagatcttaggtgttgctgaaatgttttatttgttttaaatatatctaaaagcaaataggacaagctgctaagaggggttccttcagggtgaacaggatgcagatgactgctaaccctgtatattcctctaactggtatatgtctcaggctctccacccaatccactccctgccaagtgaattctgaagatggtttgaaaaatccctcaatcaactaggttgtctttttacacatatttagccaagcaccctcttcgtcagataagagattgtataagcaaaaccaaattagtttctcaaaagaggaagtttacttttttgttttgttttttctttctggtagaaatatcataaccccaattactgagtgatcaggaacagtgaagctggatcttctccaagtcacaaaatcctcatgtgttcatgtgtggcgtgtacatgtctcttccagtctgatgtagtgaagaacacaaactgttcttcaaaattccagctggggctaggagtatggaaccctgatttaacaaaaagctcgcctggatctctgagctggagatggtgttttcaaaaaatgatgtggctcatcactgaaagttttcagggtgatggctcataaatggtgaagaaaaaaggcaacagaaaaacaagggaactgtttcaagatttggactgggattaaaggaggattactgatgtgagaggtgtgtgagtgtgtgtgcgcgtgcatgcacgcgtgcctcatgtttataggaaagagtttattctctctctgttaagaataaaggagctggcttaggcacggtggctcatgcctgtgatcccaatactttgggaggccaaggtgggtggatcacttgcacctaggaattcaagaccagcctgggcaacatggcgaaaccccatctccattaaaaatacaaaaaaaatagcccaatgtggtggcaggcacctgtagtcccagctacttgggaggctgaggtggcaagattgtttgggcccaagaggtggaggttgtagtgagccaagatcgcaccactgcactccagcctgtgcaacagagcaagacactgcctcaaaaacagcaacaacaacaaaaaagtaaaggatccgagaaatgatggaattccaagtatgataaaactgcccatcaaaatagatggcatgtgaagaaaagaatgtaaaattccattttatttgctttcaataatattaacatgaatgataacaaaagatgtctttctaaaacaaagaagagatatggcgatggcctacagataattaccttagaggaggggatgggcaatggagatccccatgtattggggtttttttcttttctttttcttttttttttttttttttttttttgagatggagtttcgctcttgttgcccaggctggagtccagtggcgtgatcttggctcaccgcaacctccgcctcccaggttcaagtgattctcctgcctcagcctcccgagtagctgggattatagacatgcaccaccatgcctggctaattttgtatttttagtagagacagggtttctccatgttggccaggctggtctcgaactccccacctcagttgatccgcccacctcagtctcccaaagtgctgggattacaggcatgagccaccaggccggcctgtattgggttatttcttttggaaacaagactttattgttacttttgatattgttaatttgtttcccaaaaatcccagagccaaagcacaagttttcttagtgacacctgaccaagtttctaaaaatgttgtacaaaggccattaagaagaaaaaaaaaaacccataattgttgactttaaatatgcaggcaaaagtcacagtaaataacaataatttgcttggaatattgttccatacagcatttcacagaaatccagcatacaatttacaagaaagtgcaggcaaattaattgtatactttcaccttttcttctcaattcacatatgagaagaataccattttaccccacacagagaagccccataggcctcacaaggttttgaaaagagactaatcaatagtatcaactgaacctgagattagactaaacggcagacagaggcaagcagcctataactattaagaatcctcattcccatggctttcaacctccttttccctgatggcaggcaacagggcaatatggtttatcgtgcagagactgaatccggtacaaaatgccacccccagcccaaggactgacactgctaatggtttgtgaaatacctccaaaggcactgcaccagcacgcagccaccaacttccaaatttccacacatctgccttgccagcctttacgtggaggtctcccaaagacaaggggcaaggatgcatggccccaaactcacagtgagccttgggttcaagtccaggctcccatgtttagtctctgtgcaactatggaagagtggttggccttttctgatgcctgccatcctcgcctatggaaagggtatagtaacagcagctacctcagaaggcaggtgtgaatgtaaggtgtataagttagccagacatcaggggaatctatgttctgtgcatccaaatcatcaccttacgagtaaaaacagtagctgccatttattgagcaatgaccatgtgagacacacaaaagctctttcacatttctggactgcaccaccctaggtagaagttcacagtattaccagtttgcagatggaaaaactgaagctaagagaataatccacccagacagacagccaggaggaggcagatgttggctaggaggccaggtagatctgattccacagatttaggccctaaaccagagttccacgttcccagctgcacctcagaatcacttgggaaggttataaaaggccaatgtccaggtcaacctccaggccaattaaattggaatgtctaagatcgagggtccaggcaacagtatttatttatttatttatttatttttttgagatggagtttcactcttgtcacccaggctggagtgcagtggctcaatctcggctcatcacaacctctgcctcccgggttcaagcaattctcttgcctcagcctcccaagtagctgggattacaggtgcccgccccaacgcccggctaattttttatatttttagtagagacagggtttcaccatgttgggcagggtggtctcgaactcctgacctcaggtaatccacctgcctcggcctcccaaagtgctgggattacaggtgtgagccaccacgcccagccaggcagcagtactttttaaagcttttcactccaacatgcagccttgttggagaacaactgttccagtcaccgtaccataccaggcacgtggtccttccccgatgaattagtttcattttgctgtgtaacaaattcctgcaaacttaagggcttaaaacaacacacatttcttatcttacagttctggagatcagaagtctcagatgggccccaacgggctgaaatcaaggactgtgttccttccagtggagaatctgcttcctcactatttccagcttcttggagctgctcacatctcttagcctgtggcctcttcccgaattattttcgttatttttttcttttgtttttaattgacacataataactgtatgtgtatatatatatatatatatggtacagtatgattttttgacacatgcgtatcttgtgtgaaaatcaaatcagggtattccatttccaaagtcagcaacattgagccaagtccttctcgtgatgctatctctcaggctctctctctttagcagccttcttctacttttaaggacactggtgattccactgggttcgccgagatactccaagataacctccccttctcaagggggcaggtgatcaacaaccttaattgcatttgcaaccttaattctcccttgccatgtaacataccatattcccagatccaagggattaggatgtagagctctttgggttgtgttattctgccttccacacctgacaattctgcctccagatcaggatcgcaggcaaaaatgacacattctgacaataacgtgaaagtgggtctcagtatacaagcctcctgcttgctttacagttttatggtgagtattttacctgcccctgcaacttaggtaccaagcacagtgcttggagcacaccaggggctcaacagatgcttatggagggaaagaaagaaaggatcttgcatttctcccgccacaacagtttatatcagatatgctatcatgttcaataaggaaagagataacccgggctgtttctaattggatagtcacaggagaaatttctgcttgattctaaatacagcaactccactctgtttcttgcattgggaacggcacgccacccattctccccagcacacagaagcctgcatctaattttacaagagcttgaaagtaatatgtcctctaacttgaattttctttgccagtggccaccacaaaaacaaatgactttcagtagtgtatgtttcactgggtttgtgtattgggttgttttttggaggctggggtggggggtggcgggaacacacattttaaaaatcatgcttctaatccttaaaaagactaaaatagtttcatcctttcataacctgtcatcacgcatgtttttctaaaattaaacacatatggctcaagccagagttacattatgcaccatattatgtaattatcttttcaatttattactcctcaaaatagaaaaagattagcccatgtttcttaagtctgagtaaacatatggcctgaggattgtaaatgacatcctatctttaaaagaagttccaagactaaacaacatacaatactcccttcggaaaggccatatgtggtatcagggttgtgagatacagaagaactgtgcgtgtgtgtgtgtgtgtgtatacatctttttgctttctggccatgtctttgatgccgtgaaatattcctgctggcggatcataaacagcacaaaaatagggaccaaaaaaaaaaaatctccatttcagcatttcccattagcctagtgcacttgggtcctgtttaatccataaggaaaaggttcccagtcatctgggtgttcgtacaagaattatctgtcgctctacaattcaggggctttgtgcccgcttccccagcagcctgtgtacgtcccattcttcatgttccctggtgatttaagacctcctttgagaccctgtgcttgatcactgtccttttcttcctcgtcaggaaagagagcagtcaagcagggatcctcatccctgccaacgactcccttccctacaactacattaaagttattccggaggctcccagcagtgtgtggcttagttaagggtctgacaacgtccctattatcagaacctttcttcaggggggtttgcaactcgaagacttttaatttgcaacaggcggaaatttttgcatagggctgccaagcataaaggaaatatttcagagaccattcaaactgaaatcagtttcattgtttattctgtgttgagggatatcagaaatgaaatgctgtaagtgggtttctgatgcctttatgctccccttaactagaaaggatggttttgaaaaataattttaaagaaagccaagcaagttgaaaaccagctaatcaggctcgcacacagccgttaccatgcgcacattcacgaggtttttaaatatacattgtgccatgaatgtccagcaggaatttgtggatttcagaagacttttcttcaagaaaatatcattcccaatgggccgataccaacaatttgcaatggtacagccaagcaaattttaggaacagagcatctgatcacattttattgactaaagcggaagcatttagatgagatagtaaaacagttggtggatgttctgctctgccatgatggaagactttctctttttcacagcataaaggcaatccttttcatttgctctaaatgggtaagtagaggcaaggggcagcagacaccctgtcataaccattccacagtgcagcataaagatcccggtttctaattactaggatgagactacagtccactaaaaataaaccactaaattggctagaaaaagatgtatcttagaggcagaatcgatgaacaaatcatttgggctacatcctatgtttactgaatctttggaaccagaaatgccacgtttagcttatttagcacctcattatttaatgcagatcaatgctgacattcccccagagaaatgtataatagtccaatcaggaaggaatatgaagtgcagactaacgtgcacagcaggttttttcctttatgagcaggctctcactgcagggcctttgcacttgctgttctcattcaggaatggtcttccctcaaatattctcatggccccctcaggtctcactatctttttctttcttaatgttcctaagtaaaaacagcacattcctcacccacagtctccatttctttatcctgatttatttcctccataccacttaccaccaagagaaacattatatagtgtttgatttgtttccccatctaggataaaagtgccatgagatcagggagtagttttggccactgctgcatactaataatctgtgaactagtacctggaatgtaaccagcactgagatatttactgagtaaagaaataaacaggagaatgaatgaatgaatatgctaatacaaccacctctgtatcctctttggtaggcaggaggcaagaagcaggctaatctgtctatggagacacaactgcactagggctcacctatcttttcggaatgaagaatggcttgaatctaagttatttactttggaaaaaaaaaaaagagatctcaggctattctgacattaacagtgagaaaatttaaaacaaaaaacctggaagtaaaagtaacatagcccagcagttaggggttttaactctggggttaaactgcctgggttcaagtctcagttcctctccttaaaaacagtgtgcagtaatcccagcactttgggaggctgaggcaggcgaatcacttgagcccaggagtttgagaccagcctgggcaacatggcaaaaccttgtctctgctaaaaatacaaaaaattagccaggtgtggtagcatgtgcctgtagtctcagctacctggaagggtgagacgggaggataacctgagacccagaggtcaagggtgcggtgagctgtgatcacaccactgcactccagcctgaacaacagcatgagaccctgtctcaaaaccaacaacaacagcaacaacaaaacaacaaaaaaacagtgtggcttggccagttattttacctctctcagtgtcagctccctcacctgtaaaatatggccaagaacaggacttaaccactcagagttttcaggaggatgcaataagggacttcaaataagcacagtgcctggtataagctaattgtcacaaaattgtacctacgagttattttccttttcaaaaaagcaagtatctaccagactgaagcttctgagacacagaatcagagatcttttgatattttttactgaatcaactgcccacaattttttttaagttaaaaagtctgtttccttattggagctagttagttgcaacatttacaaatttcaggtggattattatctttgtttccaacttttttctattccaagaaattatggtatgcttccagttgtggcttatccttcctgacgtaattttacttactcacaagaggcacaacctccttcattcactataagctgtgtccttatgattatgcagtcaaaaaggcatccatgggttttttaaattgtccacacacattgtatcaatgtttcatgtgtcctcccaaaggaattatgaaacaaatgtcaagccctgctttaatacatttttttaaaatttccccaaacactgattttacgtttctgatctcttagagggatgtatcatggaagaatcaggacttcaagtggaataggctttgttccatgataccttaccttttcaaagttgaaagacacatcatatttctgtcctttgcataaaaaagcaataaatgtctttttcccagaacaaacattgttctatggcttttcttaagaatggctggtatttgtctatttcctcgcctactgctcatgttagaagctgactagaggtatgccttatcacgcgtggcttcatatgtgtagcagacgagacaaacaggcaagctgtttactcccagagatgttggttattagggctttctttaggaactccaatgttagtcacatgcaaagatgtaattgaattaatccactctctacagagcacaacaggatataaaataacttttaaattcccatatatgaaatatacacgcttattaccctttgacatcacacaatatataggacgtctacaaatttgtaacccctagctccattcgcttctttcttatgcatctgctccagttccccctccagagtggacaaacttgttgtggacttaaaccagaggctgaatgggcgtgtgtgtgtgtgtgtgtgtgtgtgtgtgtgtgtgtgtgtatgtgtgtgtgtgagtgacggagtcttgctctgtcacccaggctggagtgcagtggcgcgatatgggctcactgcaagctccgcctcccgggttcaagctattctcctgcctcaaccttccaagtagctgggactacacacacacaggcatccgccaccatgcccggctaattttttctatttttagtagagacagggtttcaccgtgttagccaggatggtctcgatctcctgacctcgtgatccacccgccctggcctcccaaagtgctaggattacaggcatgagccactgcgcccggctgaatggtcttcataccacatcttctgatcacctgatgctggcaggtggcaggcaaagcctctcgtagaaaaggacccatcaagagcggtctcagttagtctgctccagtgtggcagtgcaaacaagcaccactggcttttgaatgagggaaacctcagttccaatattgcctctgtcacttaaagctctgatcctgggcaagtcacctcatctccatacacctccatttcttcatcaatcatctggagtaggggaagcgggcatcccattacccatccaccgactgagacgtggatatgtcaaatgagataacttacattacaaatcccaacactgtgactaaaagtaaagcctaaaagtctcaaaaatgatgaagaatgttgttattactattaaaagcgcaagtgcttctaaacagaagagtcactgtgtcttgccctacagcacctgtctctccctgcagtccttgaaatgacctctggacaaatcattccttttcctgtctggcaatctattcaaaatccttgggacccttaagagggacaggtcgcatggtgtaggggatctagagacacctagacttgctcctggcacctgggcgcctttgggcaagttatttaatgtgtcttggtctcagatgctttgcctggaactccatgagggctcaaagttactatctcccaaactaccttctgcaaagacataatggggtttatagggtggggtgaagggcaggtttctaggactgaagtattagtcatgttgaggggcatgatctcatcgactgggcccccaacgctgcttctcccttgatctccatgttatgactctgttaaggagggaaaaacatcacagtattctggccaaagtgggccagactagggactaaaacataaagccaaagaaaatcacaaatggggcataagaacgcccaactaccctttgaagaaaatgttacccaagagggatgcaccattctgaacaactcaacatgatgcaaccaaaccttgtccttgggtaagtagaaataaaagatatagaaagaaaaatgggtccttaacacaggttgtagtcccaagaaacactgggctcacccttcacatcttgtgaactccaccactgacttacccccacctctcctctacctcctccctgggaacccaggcaccaataaaacaactcgtaatgcatatatttttttaaaaaattgacaagggagaataaacacatttgggggtgaatatgtttgtctaattaaaaatattttcctgcttaatataggctaaccggctggagaattaatgtgccgcctgtgcacatatgcagtaagagtttaaaaaaaggaggaatttcagtaggtgctttgtcttctgatgtacaggaatgactgcccaaattcatacacagggcttcgtctttgaaaaacacacaaaggtggaggaggcaacaaacaaaccaaaaaccgacaaacagccaaccggctattcagctaaaacacacacacacacgcacccccaaacagccacacacataacccccaaatagacacacacatctcaaatagacacacacacaccacccccccaaatagacacacacacacccccccaaatagacacacacacatcccccaaatagacacacacacacacacacacacacacacacacccaaaacagccaaccagtatggaactggctaaataaatgacacttcatccatatgacacaatgctgcgctgccattacaaagaatgatacatacctacattaatgatagagcagaatggcacacacacacagacatgcccacacacacatatacacacatactgtacttttactacttgtttaatttctgtctttttgtccgtcactaaacctccccccaccctgcaaaattttattataaaaatgttcaaacatccagacaagttgaaaagacaacatatttaacacccatatacctgcctcttagatgttgccaattaacattttactttacttgctttagcctatctttgttcatctattttggtttttgacacagatcacagtaagttccatgatatattttcaaggaaaaagacaaactaccaaacagcatgtacggtatgacctcattttgaaaatatatatacatgggtgtgtgtgcttacatacctagaaaaaaacaatggaaggaaataccacacaatgttacagtaacattttatatatcttttcccctcgttacctgtaggcacttttttcttttatctctcatttaagccatcaacatttattccttgtgaaataaatagacatggaattacgagaaggagccaaggatgaggggaggaatgtgaagcaggcaggaaggatgtagggcagaaaggaaagattcaaagccatccatccatcccttcctaggctgcggaggctcatgctaaagccacccacgggttgctggccacccaaggcaaagaaaagccaccgagaagcaccccaactctcggtcttgccggccatccaaattgttttagtatcaggttcacgatttttcagatgcagttttaaaacaatttccaaccacctccctgagattgtctgcggaacgtgatggggatttcctgtttccaggctctgctttttggccagccgtcataaagaatccaccgcatcaggttcccagtgcaacaaggccaccgtcctgtgcctccacacccagctcggggccctgcacattggaaagcacttggtcagcatccacctgggcctcagcctctggctttagaaggccaggaaaatcccagtcacagatgcactgcccagacctgcggcaccatccacacccacacagcaggggatgcagccccaggcttttgccgcccaccaatatacttgtctgccaattcgaggacttactgggtaagatttaggtctcacttccaattattaaaagaagggaacaaataaagggaattgcctctgctccaagggatattctaacatggctcttggagtcttctagacgtgccccagcccgcagagggggagtaaggggagagggcacgaggaggacaagcggagccctggcctcaaaggcacctcttaggagccttgctgggaaacaccgggtgtgcctaagacaatgccatgggtgatgactaaaaagacaatcacagagcatgcaaaataaaaatgataacttagatgaggcctgtgaatttttaaatagcactcgctgatggatcagcagaattgcatagcttcagggtttagtattcaaatcctgcatctggcttcacattaataatccattaccatgttcccattcaaaatactgcattttcccagcactttgtttctgttgttcactttaaaaaattaagacacactcaaagtatctataatctcaccctaagaaaaatctaggtacttgaaaacattaagctgtcattcatatcttaagagtcacctatatctgaactacctcctccacacgggcattctgaagaaagaaagggaatctgtgttcaagaaagtaagtatgcaataccccaactctaggaaattcattcgacacgtgtctgtatcagacgctctgagatgttctcaatttaaaaccatcctccatagattacctatttaaaatcccatgaaaaaacactgagaaatgaggatcccagcaatttttttaatccagctaatatctttcagtataattttttaatctataaattgtgattataattttcactcctgttgataacaaaatatgttttaagaaaccatgaggctttatacaatgtagacataaaaacatgttttttgaacctgggtctttgatgtgagagccaatatttatacaaacaaaatctagactatctgagcaaaaaaggaatgtagaaatcatggattccaactccctggtttcacagagaaggacactgaggctgagagacttaagtggctttaacggcacaggacataaatggtcccataacatcaagtgaacaaagaaaatgaggcagaaacagacagacacatcattaggaagtgtaagtgtaagcagaacataactcaatcattagttgctctttttttttttttttctattaagggctttagtatctgatgtttgggtctttgactgtaaaatagtcatgaccacaaactgtccttaacaccacaaaacacatcatcactcctcaaaaagaacctcagccctgtaacataaaggcaactttagaaaactgataaaataaaccacttaaagagtaaccacttggtttgtaagtaaactatttggtttggttttcaaagaggacttcaaaggggctcaagataatagaaatctgggacttcggcatctttcgtcacaggaatgatagaccaactactatcaatcaccatttgctgaagaaatatttacaaattacctactttgtgccaggtattgtactcagagaccaaaacacaacagaaagaacctgtaaagttacattcttgtcttttggagctggggagaagacagacattaatcaaaatagaaacaaagatgtgtataaaaccgaaagggatgaatgccacaaaaagcaagttatatgggtccaggagaaaatataagggaggcattaggatggtcaggggctgggcacagtgacttacacctgtaataccaacactttgggaggacgaggcaggagggttgcttgaggccaggagttcgagaccaacctgggaaatacagtaagaccccatctctacagacaattttaaaataaaaatttgccaggtatggtggtgtacaccacctgtaatcccagctatttggggggctgaggcagaagaatcactttagcccaggagtttgatgctgcagggagctatgattacactactgcactccagcctgggccacagaacaaaactctgtctcaaaacacacacacacacacacacacacacacacacacacacacacacacgcaaaaaaaaatgacgtatggtcagataggtcagggaaggcttccctgaggaggtgacaactgagctgagagctgaaggatgagcagcaggtaaatgggtgaagagtgaagaggagagggaggcatattacaggcagaaggaactgcatatgcaaagaccccgtggtacctggaagcagagttaagatgtggttgcagcaggaaaaaaagggggcgggggtggtggccgcatagaaggagaagaggcagaactcacactataaaggccatcctgaaattacagaactttccctttatcataagggtaatgggaggccagtgaagggacctcggcctggtaaacaggtgagtgggacatgatcacatttgcattttgaaaaaaaatcactcaagctgatgagcaaaggggagactggggcggaaccagtcagtctctgataaaaacaaatgtccaatcctattcgctgaattcctggtatatgcaaaaaactagaggaggtccttacaaaatgctcaaagcaattctgcaaatacacttcagaccacaggtggagctgcggctggagagaggagtgtgctgaagtcaaatggtacagactcgcgacatcctccaggctgagcccagtcgtccacacgatgcaaataaacattttgagtccccacctcacccaccatgaaatttacagatggtttattccggcatctgtttcgcattggctatattccatggttattgattttagacttccaattatctctgtatttgagcttgtggactaagacgtgtaagacccggcaccaaaaccaaaaccataaaccattccaagttgtcctcctaaaaatgagcactgggcttctggactatcttccccagcagatgctaaggatggcagagatgaaataatagaccatccacacaagattttaatatcagaacttatctttctaaaaaccacatggagcttcttgtgatttttttttcacatctgagacaatctcaaagtattacatttccagcttttaggagacaaaaattgactatattttatgtggagctaaattcctttcaaccaaaaggttgggaaacagttaatgcatcatttttatttttctatgcagatctacaaatgaggacaggcatcttagctggccctggactagtacaagtttggacagagctgaggctgttgggtttaatttggccaaataaaggaactctcaacccaacgagcatttggtccgcatagccgattcacttcatattacagatcgaggacaccagcagtactgtttagaaaaactggcaatgctgtttagacaaacacccccgagaagacagactgtggataggaaatgtggtctgttgcactgttatcctagttttttttttttccttcttccttccctcatgagtgcttttcatgtaatttttactcacgaagttgccagtgttaatttctacaggccaaatttggctcacttattccttgccaattccacagtgaaattctgtgtgcttgtgggtgtgtgtgtgtgtgtgtgtgtgtgtgtgtgtttccactgaattgcacctaaagccaaagggatttctatgaccatacacttgagaagaatgtagacagaatcacacttcggtgtctctaatgacaaaatctgtctctattagcaaaaacaatcaaaccctccaagctggcacaaggctcaactcaacaagatgcatggatccccacagaacctttacaaggctgtgacagggcgaccacagaaaggccatttgcatattctcctgcacaggaaaaatggcaaagcagcatttttaaaaaattttccctcatgggctccataatttaaatctaccattcattttagggagctaggttcaaatggcaagggtagaaaacaaaaatttgtttcctataataattcaatgctggttcttttttctataattattctgaagtgttaaaagcggtgtattttccccttcactcaaaagagctaataggggaagaaattagtaactgtcagaaccaacatattttatcatggccacctcagatctaaacactacttaactgtcaattatcaaaattcaaaggtaggatataaatctaaaccaaaagattaatttgaggcaacaatattttgtccagttagccatttgagaccaataccactgtcactatcgcaagaattaagaaatcacaatatcactgtcactatcacaaaaattacgaaagcatctgccaggcatggtggcttatacttataataccagatactcaggagggtgaggccaggagttccagaccaacctctgcaatatatgaaagaccggtctcaaaaaaaaaaaaaaaaagccgggtgcagtggctcacacctattaatcccagctctttaggaggccaaggtgggtgaatcacctgaggtcaggagttcaagaccagcctgaccaacatggtgaaaccccatctctactaaaaatacaagaaatttgccaggtatggtggtaggcacctgtaatcccagctagcaggaggctgaggcagaagaatcactttaaactgggaggaagaggttgcagtgagctgtgattgcactactgcactccagcctgggtgacagagggagactccatctcaaaaaaaaaaaaaaaaaaaaaaaaaaaaagggaggggaggggagggaaggaaaaagaaaacacagcatctattcaatcagttatatatttttgaaaggttatatatcttaagaatttaagaattagaagttagtgacacataaggggaatgaaagaaaaacaatattcccaataacagcctctaatctttgtagaagaactacaaagaaaaaaaaaaagtagatgtttacagaagctgtaggccatgggtaaaactgtgctggtctgactcaaggccatacctaacacctgctctcaacaggtaagaaagaaactggatctccatgaacattcttagactcaaccatcagtgcaccaagggcaatgacatttagagactcgtctctccattcaccacatcatttgcaaactgatttggaggtttctagtctaactcagcatttcccaaagtgtgctgcaagtaccccgggtggtaagtgggatggttttaggtggcaaatggatgagcatatacacatacatgtacatacacatacatatatgcacacacacacattttaggagctaggtatttttttttattattattattattttgagacagagtcttgctcttgtcgcccaggctagagtgcagaggcgtgatctcggctcgctgcaacctccgcctcccaggttcaagtgattctcgtgcctcagcctcctgagtagctgggattacaggcgcccgccaccacacccccagctaatttttgtaattttagtagagacggggtttcaccatgttggccaggctggtctcgaactcctgagatctgcccaccttggcctcccaaagtgttgggagccactgcgcccgaccaggtatttatttttatagtgttctttcttttctggcccaccatcatattagttttccatttacagccaaattctgaagtttcctcttatgaaaaatgttaaaataactaatgatgaaaacttaaaaagcaatttacaggaaaaatattaggtatattatactacaaatgtataaagaggaggcaaaaatgagggtgtggagtttgacaagcaatggtctagccacacaaagagtgacatggaaggtgatgagactaatattagggcaagtagcaggaaggtggcatgatttctaattccatcaggatgctacaggggccacttcacctctctgagcatcagtgtcctcagctgtgtagaagatgaagtctgtgcatcccaaatgttcctatcatgggactccttaaaatggtgaaaaaaattctatgcatacacataaacacatacagatacacgcacctataaacatatacacaaacatagtcacacattctacatatatgtatgtaaaacaaccagaccctgcccaagtggatcagcaaagcaagcaaaaggattatgaataaagtcgcttttcctgcctgaccttaagcatctgagtttctatccttttttttctttttttttttgagacagggtctcactctgtcacccaggccgcaatgcaatgaagcaatcaaggctcactgtagccttgaactcctgggctcaagcaattctctcacctaagcctccttagtacctaggactacatgtacctgccaccatgcccggctaattttttggtagagacagagtcttgctatgttgcccaggctaccatgtgagttctacctcctgtcttaacccatgtctggtgagccctatgcccagtgaatgaaatcacggactacaagtttttttacattcctctcaagctctataatgtcagaacgccacaaagcctcaccctaggatagcgttgagatgagactagaaatgcccatgtccccaaggatgctactggactgcaagggacagacacagcaaagcaaaatctgtcaccatcattcccagagttaggtgtttcctgaagcagagacctgagcgacaaattctttgggaaaaaccaagtaagaatgcgcaaagcaagaaagaaactacaggggaaagtgaataaatatcattttccttgattctgacatcaggataaaaaaaattaaacacattaaaggtgaatttagctaggcgatgtcatcctctaccctcaggtaaatgtatgccctgttcgtaatttcagaaaaaaagaataaagttgcacatggtttcaatattttttctgtgctagaacaatctagttatctttttattcaataagaacaccaaaatcgcttgtgtttcctaaataatcttgaatttatataatttgacatttttttcaaagaagcataaattgtgtgagggccatctccccagcgtaggacaataaatggcagggcatcctattttaggataaccacaatatgcaaacatcagaacccagccgactcaggacagagacacctgcgtagtgaatggttcacactagaaacagaggggccgctggtctcaggacctcctgaccaaagaaaggctggcttgactcttctttcatccaagtgggatgatgtcaccaagccactgcccaaaccttctctcagaatggctgacttactcttaaaaccatcaccacctaccataattctcttaaacaaaaacagaccagtgttggccctcctatgattagcctcccagctgcctctgaactgctgatggagcacctccatgtgaaaagctcagaaggcaagtcataatttgatcccctcttgacgtggccttggtttcctattttatcattttaggagatgcttccttttgaaattttcaaacaacccagcccaactttttaagacagtctgcagtcaccccgcaattgggatgctgaacatcttttactttcaagcactgcgacatcttaatggtgtgatgtggaacaggaaacattaactcacccgctagtttcagtcacacttcacagctttctaacacaagtcaaggacaacacgtaaggaagttagaagtcaaggggagtgataatgcaggcacttcagaagagagaagcatgcaacagcatcagcataaacacgaacttctcaaccaacaaccctcccccttttcactcctattagaaaaactacatacaatccaaaatgttctagtgctccttaaacctaaatgcacgtgaatcacctggccatcttggcaaaagactgattcagtcggtctggggtggggcctgagaccctgcatttctaataagaactcaggtgatgccgcggctgctcgtttgaggaccacactttgagcagtgagggcatggggtccctcccccacgtcctcacctctcttctcacccttccagtgaggtcaggagagcccacaactgaaaacaggtttccacctgaacaaggctgaaaacttgtttcaaatgaatctgaagtgtggggaaataatcgaaaagaaagccaaaaagaataatcgcccaagctgcaacaagtccttccaattaaacagagaaggaactcactggtagtgctgtacagctcccacacttcagagaaggatctaggggacaaacttaaccaatggaagaaaaaaaggggtgaatgccctctctcttggctgtgtaagccttgaaattctttcatctcagtaagagttacctaccatttctgggtacacacacacacaagcgcgcacacacacacacactcacacaccccttctttcatatggagaaaacacaaaccaaaactccaatacaaacccccatgtgtaagctaagacaagtcaagatttccttggagaaaactaaaactcattcaggagccaggaaagagctgcctgaagcccaacacccagcccaatatctgaggcctccaactctccagctgctacaggcaacccagtaagatgccaatgtctctggttcaacaggtttagaacacctccaagtccccagagacaatttcacatcttcaaagctctcactgagggtgaatttatgaatccacacagcacctacaagttcttccttccctaggtgctattaagcccatttcacagatgaggaagcagagagagacataagaattgtggcaacttgccaagcgcatcgcagagcaagaccaagcgtgcatccaaagtgagaaggctccaggctcccactcccaagaccaacccagccactcagaacatcctagtcacaggccctgaagcggtgttcctttggcaaagacagaggttcaccttggacttctgccaaggaaaaacacattagtcctaaaggcgtgtcctctgtctcccctcgcaaactgctcaactttataggatatccgggattagaccagcttctcctcacacaaagagcatccccctgctggctggcatgctcagacatggttctaccaggggtacaaagcagacctgacaaagaatcataggccatagaaccagaattagagaggtagctggccatggggccaacacaggggcctcccaggctggcctgtgtggatttctcagtcacgttatctgcatcccaggcacactgtatctcccacctcactgagcccttcagcaaccctggcagggaagtgctattatgctcccccgccgccccgcccattctatgtgtgatctagctgagcctgagacatcttcagttgtatttaatcagcttgtcttaggtcacatgatttcatgaatggccctaaatatacccgcaagtccataaagatgcaccagcagaaatatatttctatttttatttcttacttattttatgtacatatttattttttagagacaaggtctccttatgctgcccaggtttatctggaattcttggcttcaagtggtcttcccgcctcagcctcccaagtcgctggattataggcccaagctgtcaggcctggcttagaaacatttctaatgctaacatttctgccagaatgccaacctttttcaataagtaacaaagaactgcgctgaaggatggtcctttaaccatagtctcaccagcagcaagaaggaagggacaatgattttggcgaccaggcaaacagaggcatcacctcctctgcagtcaaacagggaagatcataaatcccaatttgggctttcaagtcataattaggataatgtccatcttttgcaagctctggcgatgttgcaagcactgggtagggcgccttccctatctcatttgtaatccccaccataaccttgcaatgttaccaatgaggaaacaagtgctttgcccagtgcccacagccaggtaaagaggattccatgtctggttctcctgactctaaatttgtgatatttccaccacaccacaccatggaaattaggtggttctgtaagaacactggggaccaccatgcctaagaatcataaaatgcagctaacttccagaggtgtattaatcaaacccaaaactgtcagaaggtttttaaaaacccacaaaaatccgcactccaattttgccactaatttccaagccatcataggaaaaccaccaaaacaaggttggtgtcactgccgagctgaagaagtggtcctcagaattcatccagcaactgctgcctatgctgggctggcttctgtcagcaaaagtggaggacacagccctggccttcaagaatccaatgttcccattggagaagccaaacactttcatgaaacaacgtccagcctggggtgggaggaagtcacaagccaactgtaagaggtaaggagtgatcaagaacagggaaagctttttctaggaagagggaaatgtgtatggcagttgccatactctcagtgtttactcagaaaaagaaaaaaagcactatcttgaatttgtattcatatactggaaatctactaacttgcaagtgtcagacaataatctacaaggtgtcttcattttcctgtttttttttgtttcgttttgttttgttttgttttgtatgagacagggtctcactgtgctgcccaggctggagtgcagtggcacaatctcggctcactgtagcattcacctcccaggttcaagcaattctcctgtctcagcctcctgcgtagctgggattacaggcatgtgccaccacacccggctaattatttgttgttgttgtatttttagtagagacaggattttactatgttggcccagctggtctcgaactcctgacctcaagtgatccacccgccttggcctcccaaagtgctggaattacaggtgtgagccaccacacccagccattttactgttcttaatacagactctggtttccaaatccattccaaggggccactgcagtgtggagggtggggaggggagaccaacttctcagagctggaactccctcaacttcctggtgtataaccgtctcctcagctcctggcagagtccctggcaaaataaatgcttaataagtatctgctgaatgaaaaaaacaaggagaagctttgaactcatgcccttactcaaccataataactcaacttttgtttattttaaaggtgggggggctctgagtaagatttcatttggtcaaggcaatcaaaccacttaaaaaaaaaaaagaactgaaaaagacatgagatttatgagtatctatgaatacctcaacatttgccctcatttctttctctaccatgacattcatccaacatgaagggccattaaattgagcttattcaaactcttgcaaatttccaggatcccaaccatgtacactcacccacgtatagctgaaccacatcaatcaatagtgtggcctgtttaagaccacagtctgcaggccagctgggtttgactaacatgctggctcatccaggtctctgcccaggactgaaaataccctagcatcagctcaatgcatgagcctctcatcatgccagctctgatcctatgagatgttgaaagaggatattaacttgatggtgatacctcttgacctaagagctagaaaacagggcactctggaaatgcaggtaggtctgaggattgaaaagatcctatgaacattgaaagaatcaggcaaaggagtcaggggagggaattaacactataagctcaactcctggctaatggtaagctattttcctaaatatgcagccccagtaaatcaccaaacaatctgtaaactcttgttagatgggagtctctccttgcgaagatgtcaggaaggaccatggaaacgtatggtatatagtcactgccctcaaagaattcaggggagactattcaaaagatttagtattaggcaaagaggagaagtcttctacaagacgacccaagtggaatgaatgcacaggataagtagagatgaacccagctgagccaactaaatgtggtttctgataaagggagggttactgtggctatatgaaggaaaaatggaaacttaacagggaaagtgctagagtttttccatcccttccacacacgctcatcccacctcaaggtctcctctgcctaaaaggctctttctcaattctatgcatggtgttcttcctctcatcctccaacacttcacttaaaaattaccttcttgggaagtccttctaaaatagttccccttcttgcactgtctcttaaaacatcagatgcagccaggcgcggtggctcacgcctgtaatcccagcactttggaaggccaagacaggcagatcacaaggtcaagagttcgagaccagcctgaccaacatggtgaaaccccatctctactaaaaatacaaaaattagccgggcatggtggtacatgcctgtaatcccaactactcaggaggctaaggcaggagaatcgtttgaacctgggaggcagaggctgcagtgagccaagatcgcaccactgcactctggcctgggtgacagagcgagactccatctcaaaaaaaaaaaaaaaaatcagatgcattttttttttcatataatcaccccaatttatgcttttatgtctctcttggtttatttattatttgactcttcccttaacagatcataaaggcaggaatcgcagctgtttgggtcaccaccatatatctaatatgtagcccagggtctggcacaaatatagtactcaatccatggctgcagaatacatgaatgaataaatggatacaaaacggagaagggagacaaagcatttcacacagagcaaaaggagcagggacacacgcgcaggagagtgtcagtgatattagaggtatcctacggagagggtctggctgcagcgaagggcatgtaaagcgtaaagctagcgagaactggaaaccatgccgcagatggagtttgcaaggagatcacagaaggccccggatgccgggctagggagcctgggctctcttgtgaaaaaaaggagctactgaaggttctgaacaaacacacgtgatatgatttgggttcttccaggagggacatataaaggcagagttgtcagcctcaggctatcacaattgtatggacaaaacataccaaggaccagaatgagaggagatgctcaggaaggagaatgatacaagcgatggacggaagtcacaggattcaggaactaagggaacatgaggggtgaggggtcaaaaacaataaagaggatgcctggctttcaggcatgaatgactggacagatgaggatgaaatcagcaaatgcaggcaacccaggaagatgagcaggcaccaaagaaaagatgacaaatcccatctcagaaatgcctatgtggagatctgaatgaaggtcaggggggattctttgtgaaaatatcttccaggaacctgaaaatgaattccaagaaaaagatcagctcaaaacagggctatctcagagtcctctatactgaggtaaagagtggaactgggagagaggagggtaaattaagtcagaaacaagtcccatcttcaggcactgctatcatagcttttaatcaagttgataaatactgtgtgataagggaagagcccttttcctcccgtaggagggtgagactgtcccatctacattcaaagccctcataccctcagaacaaggcattcaggaagaaaagactgaacatcattctgcccaacaggaccatgaagatcaggaagatattatgaagcaattctggaaactgtgtctcctgcccgcctaacctccaagtgggacactctgtcaagtcctctgcaatccctttttggttttaaaaacgcccttgttccaaatgtttcctgctgtaaccaaattaatgggaacagtacagatatgcatgccagtgcaaaatatggcagcagtagaagttgacagagctaatttccaattgttttggcaaaacagcttggtccaccccttcgggtttggaaagcaatcagcttattagcagagaatgggctactgtatcttaacaagtcttgttcagaggcctgccttctggtttttaatgtcatgagaagtccctattgagagtccattgttctaaagaggcccccctatgaaatgtctttcatgcccaaggtttgaaaagagcccttcaagaagcagagtcataaaacaataatagttaggcaggtcatgagattcaaaggaaattaaacatttgtgatccctacaatgagatgtggcctggacacacatacacacaaaagaaacttgaaggggaacattggaaagaaggggttaagcacacacttcaccttgggctgcaactgctcagtgagctctccccacaacctggctcggccaggaggcactgctgaagccggggctttcctggccctgaggtcccgttcagctcgtccattctactgtgcaattacagaatcaataaaacatccctttgaaactccctggactagtgccgacatgcagacagtagtcggctgacattttttgctatttccgttattacagccggcaagcacgaggggaaggcatcagaaccaaggcacaggctggggacgagaaggtggatgggagttccggcttcatgcaggctgccctcatgctctgcatggcccatggagttatcacccacaacctcgcccatgggtgggggcaaccagaccaaggtgacatcattcccaaggggacactgaaggaaaactatgggagggtctgggttctgtctgtcttcaccctttttggtgaagtgtggggaggaagaacagcaggaaaagaaattattctttaaggaaaaaaacttcttggacaggctcacctgagaaacactttttttttcttggtttgctctgagcatttcaggaatcaaaggcctgtgccaagaagcaggcagcgaggcggaactcagcacttgtgtgtgctgctcgtgagaacttgggggtgggggggcgggagggggggtactgaaacgtccctgtccatctgttgatgtctgggtggcagaaaatattgaaatagaaatagaaagttagaaaaagcttaggagcaaaacctgaaagagtattgtatttgaaaaggaaatgttagactgattgtataaaaatggaaaaacagaattaacatgttccataatgattcgtctgtgttaactaaatattgagctaaaatttggtgaaaccctcaaaataagactttccgaggaactcgtcttcaagaatcaccgtcattgaaagacagctaaatcaccccacggtgcctgatctcactcacctggttggtggcttttttcattcactttattaaatacaatcaaaaatgatgtgtggtttattcctcactctaaaacctcaagacaagcccattaccagcattcctcaaacatatttgcatatccagtgaaaaacaaaattcaaaatctttccaagctacttctgctctactgggaagctagaaaaactggcaactttcggaaatgaagattcctttttcctccatccaagctcacacaggaagtgatacgagaggttttctcaaattgccttgctacaatgaccacaacctcgacagagaaagaccaccctgggaatgagacaattcaggttttttacaggctccctcctgaccataccccaaaatagccagcccataccacggaaagcctgactcgaggactttgcagcgtgagcgatttcggcattgctaactcaatccgacggtccttacttataaaataaagaccacagccatgcacacacagtaaaatgagcaggcgcaaatctggtgcagtattgcaagccgaatgaataatagtacaaaatatcagaaaaagaaaggttatgaaattttataacagatgacaaattggtagcttttccccacttttctggaatggattcagtaacagatttgaatcttgggttttgatgcttgtctgtgatatgcagggatcccaagttcaagaggaaagaaagaaaaaaaaaaaacaggagtcatccgcatgttacttcacttacagtagggtccattctttaccatttattctagaaattatttggttccttatttaacctgctttgatttaaaacaacattgaattttaaattttcaatctcagggtcttctatacttcaagctcccagacttatccctaaaagaggaaactacctgcccagattctaggaaaataaagagagaaagcatctcattctgccacgttggaaaagaggcttaaactctgccttatggtgtctgtcacccaaactcatgggctgttgggggaggggaggcggcggggggcaggcccatgtttctatggcaagaatggccacaggggaaggccttacaggtcactgactttagagcaacgcagtagccacaaccaccgggaaatatggcacctgtaccaatgggcccctccaatttatatgaaacactttcctagacattctaccccaccactttgattttactgcaacaaagcatttagaaggtgcatggtggacagaaccaggcagggaggtgagtggtggaagatgagccggtggacatgtcccttgcgtgcatgcagcaagctcaggcaatctagggaggcaggtcgatctgcaaatgagccatgcaaagacagcacagacaaaaggaatccactcttgaggagtatcacaaatctccaatgggagcagagttcagtggccgttctctggttggtgggcaggaaatcagggaaggcttcatggatgaggaagccttattctccatagacagagtgcgagaataagtggcaatgtgtgagaagatgcttgcccaggaagtacctgtgtggttttctcagcgacttaacttttcactccagtgaatactcctaataagagctggcctggatgactcagtgctcataccatgctaggcacttagctaagctacgagcttcaggcactcaattcttaccatgacttttgcccaatttacagatagaaaacctgagggtccaagagatctggtaattttccagggtcgcgaaccaagtaagtggcgaagcagagattcaaaccctggtccatctggtcccacacagccccattgcctggtttgaatacttactacaactaaacatatttccaaaggtatttgctaaagttaatagaaacttcagaactcctacctgcaaactcatttcacaggcaacaaaacacaccaaagacgaatggagactaacttttccaagtcacccgatgaccttgggtcaaattcagaatccaggcctcctggctttttcctgactttatttttctttccaggtatttattctgacttcattgtgtagtgtctatggaaaaccaaagctatagagtgatttttttaaaaagactaaatttaaacaccatcatatgtgcaattcctgttgccgtgttgcccctgggtgtcattctgtgttgcatctgaaccatcagagaagcagagagaacctatgaccaagctgcaggatcccttaaggctgctagtctttgaaaacctatttatggcaagaatttcttaagggccaaacaatgtgccaggagcactctttagagaaagcagacgctgacatcagtgtcctcaagaacttccattcccacagagcactaagcaactaggatggattgagatatgcagagatcaaccactgacgactgtggtgtgcatagacttctcacggctgaccttgtcgtggccgggaacggcagcccagcacagacgcagaatattcccttttgctactttcctgcacccatcgagttgatttttccatctcctccccggccctgcacagagcattttccccttccccttccctgcctcaccacccctgaaccagcttctgaccttgcacccctccctacattcaaagcacaattgacgcacccctcccgggccctggcccaatgaccctcattcttctctccctttggacgcttccttttcctgtccctcccagtctaataatctgctcctattccaccaggtcccctaggctacgccccacctaacatagggcagggcctgggctggctccagtgtctcagttgtggcttcaaagggtttgggcctaacaccctgggcgcctgcagcaccagaatcctgggatcagatcaccagcgctactcatgatcgcttcaccccatccccaagcaccctatcccccccatccaaagaagcagaactcagcatttacagcatttacattcattttcaggcttaagtgtggagctcctaagtcaagccttcaaagcagttcgacacttaacactgacaggaaatgtgaacatgttaaaaaaaaaaaaaaaaaaaattaaaaaaaaaagccccatgatttggctgaggaactattctttgcaatgtttccaaggatataccagagtctgagctttaagacagacaaaataatttgaatgattctaatggttagaacaccctgatcattttgtacctgcttggtcttcttggatcttttggtgttaaaaaaaaaatagtgacttgagtaactcattttgtccttttaccctcttctcagcgatgggcaaattagtgatgatggtagagttattacatgtaactctatacatgttcttatatgtaactcatatatgttagcatatgtaagacttcagccatcaaatggtaaaaatcatgtcatgaactattgacatacaaggaccctgaagaaaacacagcaagtcagcctgaactacccccaaccactttaggcattgtttttaaaactataaaatcagactgtaggtgccagacttttgctgtgtccctttgtctctaaatgtataaacactctacgtgtctatcagaacagagcaagggtttcatgtgtgttcctgaaatgcacgtgcaattgatcagggaaacaactttacgggttcaaccatgagaaataaaaacatgcaaaggcttccaatacattcagtatctgacatcacacatcagagagagggcaggcaggggagactttgaataatctcagattgtgcaagggggaagggtctgtaaactaaaataaaaatccacattaaaaacgtgcatgctatacaaacagaatataaaacaggttcacgggggctctattttcctccctggtgagataagttctccccagcttgcaatgtattctggaaccctgctagcctgtttttctgttactcgggagagcagctccaagcccatccaatcccccacgtgagttttctcttccctgactggttacctggatgaatgtgaatgccctggtcggcaggcaagcaaaggcgtgtctacacttacctgcattgtctgccatcccctgatggcacagggaagcttagatcgcatcagccacagatccatgccaaatggaaacccaagcccacgttacagcttcctggctggcttaaattgcaatcgtttatcttcatatgcctcaagttttagtttcgaaaaattatttaaagaccaagcaccataatgaatgtgtctactacacaaatgcttttaaaaacagaaaaagagttacaaaatatttcttaggtaaagccccaacaggagatgggaagagatcaagattcaaagtcctgacttttaaggagtttacagaccaacttgaagaaacaggacaaatacatctccaaagataaggagctctgaagaagtatgtgttacatgccaagtgaaagatacagaaaataatgacgttaggcactggatcctagagcccccccgaagacttgttcccccgcagtcaggatgacagcttcagaagacacctccttcccactccagtcctgggagtccacctgcaggctgcacctcttgctgtccctcccaagtccctcttgctgcaagcccaagtcccaacttccctcaatacaggagtccagaaatgggcttccagggtccaggaagtacctgaggccttacgttttaaaagttttatgcacatacatattatgtacacttgtgcaaattaaagaaatgtacacacaaaaacactatatagccttcctgggcactcatgtatatgaaatagtaaaaccagaaggtggacacggtgaccctcatgaggggatggggtgtgtgtgtgtgtgtgtgtgtgtgtgtgtgtgtaaggaaggggatggagggaggtgaggagttagacttaaatggtgtagagtagagttcttcttaccacagatgttgtatttattaaaggtaatagagtagaggtgaatatggccaaatgtcaacagttattaattctgggtagtaagaagatgaacatttgtactatatacacacatgcctgcacacacacaaatagagagactcagagatttttcagcttcaccaaggagtcctgaccgccaaacagtttaaagcgcttggctaacaggcccccgtcacctccgtctctctcgcctttgatcttctatagccaggtattagatggccatttcacagcccactctattcagctttacggcatgtcgtcagttcttaaactgataattaacacatgagttttcagctatgtcattctttttctcataagagcttaaagtaagagacttcaagacaaaagggaaggtggacgttgaggatgaggaggagaggaaggagaaggagggaaaggggacggtagaaagggatggaaggaagaagggaaggaagggaagcaggaaagaaggaaggaagaagggaggaaggaagagagggagggagggagggagggaagaagggagggagggagggacggagggagggagggagggacggagggagggagggagggacggagggagggagggagggacggagggacggagggagggagggagggaagggaaggagggagggaggaagggacggagggagggaggaagggacggagggagggaaggaagggagggagggagggaaggaagggacggagggagggagggagggacggagggagggaggaagggactggagggagggaggaagggacggagggagggaggaagggacggagggagggaaggaagggacggagggagggaagaagggacggagggagggaggaagggacggagggagggaagaagggacggagggagggaagaagggacggagggagggaagaagggacggagggagggaagaagggagggagggaagaagggacggagggagggaggaagggacggagggagggaggaagggacggagggagggaggaagggacggagggagggagggagggacggagggagggagggagggacggagggagggaggaagggacggagggagggaggaagggacggagggagggaggaagggacggagggagggaggaagggacggagggagggaggaagggacggagggagggaggaagggacggagggagggaggaagggacggagggagggagggaggaaaaaaggagggaaggagggaaggagggagggaggatagaaggaagaaaggaagaaaggggggagaatctgtctacatatattaataccctgttatgtcacaactgaaaaccatttctgatttttcagggaatgtgggtttatataccatgtaggaatttctaattattcctattacatatttcccaaactgttcctggtatgggctcttcaggtcatcaaaaggcattgtctccccgcaacagcccctgccacctccaaagcagtttcatttggaaaactttacacatgttcacaatccctctgagatcaacaaagcacattactacgctaaaacctgaaaatcctaagatgcagcctggtataagccagtgttttccaacttattttcaccatagcatagttactgcatggaacaactgtgccgccgaacttgtggtctgaggagtgtggggaatgctggccctggtggtgatgagaccttctggatttaacactgcagtccacatttcaaataccccatctatcgtccctataaacatgactcactctcataaaaatcagaaatcctagttttagagtcataaaatatggtccctattacaattccatgtatttccataaaacccttaaggaactgactcacataggcccttataatactaacaagaaaagaacaaaaaatttcaaggattcactaagccaacagcactgaaccgactgtagtcataaaccaagtctggagcacatcctccgagaatgatgatgagaatacaccaaaatacctggaaaccaactccgacttggagccagccaggcaagtggtgatctgtaggcaggaatactgcaaaatgtctgctataataatgtaattttggcgtaactttgacatctatctaaaacacaggaaacaaaatgtaagccccatgaccgatcaaagcaacgctgatcaacacaattccattttttcacctatcaaattagggaatattttcacatataatatcccacattatttggagtttaaggaaatgggccattacatacaaagctgattgagaacaaacttggtattaccattctgaaaaacagaaagctggcattaacgtttctcagtctctttgatccaacaatgtcacttctaagaatgtataaaaaggaaaacagagctgggcatgatggctcattcctgtaatccaagcactctggaaggcaggcagattgctcgagcctaggagttcgagaccaacctgggcaacatgatgaaaacccgtctctatgaaaaacacagaaattggccaggcttggtggtgcacaactgttgtcctagttacttgagaaatgaaggtaggaggatcgcttgaacctgggaagttgaggctgcagtcaaccacgatcataccactgcactccagcctgagtgacagaatgagaccctgtctcaaaagcaaaacaaaacaaaacaaaacaaacagaaaacaaatcatgaatacatacagagtttggaggtacaagaagccaacagccattctccactgggctctcctgactcaccaggaatggcagatgcactggactggggcagagtgagggagcagaatgaggtcccatcacaggaacaccccaggtctctctgagtgttccccaaagaagaaggtatcacagacactcagcaatggctccaccatcctctctctccacccagcataaaacgcaagcccaaagggtggaggagcatgaacttccgagtctgtgatcatcataatgcctttgggaataaaaagaaaccctgctggacaggaattaagagcctgttcctctggctggggcgtaagagacccaaaccaaaaaaatgatcaggtgaaaaacaagctgcctcaagaggacagggccccacccgcacttgcagacaaaaagaaaagcttggttccaggaggtgaagaaaagctgtgtacacgaaattgagtcaaagagagcccacggatctgctgatgggaggggtagaaaattaacatggattgaaacaataacagtgacttatttccagaagaaatgtatttatgtgattctaccactggaatctatctctactagttatatgaaagtaatgggataaaagcaaacaaaataattgaacaatttattaccttcaggaaaatgtaggcatctaacatgttcagttacgcacaggaattacaggaatggaataacatgtagactctttaagaacactgtgtctggttttgctcagcactgaattcttggctcttaaaatctatttctgaatgaatgaatgaatgaatgttgtcccttattcttcattttctggcagcctcgtttaatatgagctacatcggccggaaagtactggtgtttttggattgctttcaaaaatgtgaaaacagcaagactaatcctatttccacttctttatccacctttaagagtaacctgctgtggcatgagttcctgtgcattccattatctcggctgactctccatcctcctggccatcagcagaggaaactctggctcacaaaaggatttagcatcctagcacagtagggatttcgacttacggccaccttctccaggctcccctccactcacataattttggtctccaaacattgagactgcctctcccttgggtcttttggacctcatttataccccccagcagttgatggccaagatctagtcctcatcacaaggcttggtaggcccattctgcaaatagaattatatagatttagggaggtttcagtctaatttggagaaaaaaaaaaaaaaccagtctccatagatacaagcttttcaacatattgcttttttgctctcctgttttcttacactgagaatgtcaatgcagaaccggaatataaagtaaattacacaggctggaggactgagcatcccacccagccctccccaaccccactggtggagaccacagggcagagtggatggtagcagggacaggagctcttcggaggcaaggaacagagccttaaggttggagctacaacccgctctccaaggctctataggaaggaagacaccagctcgctgctctcacaactcatcttcctctccactgtttcattaaattgcacaaggatgggactgcctatgcaggtggcagacaggcagtgagggtgccaggccttgccacagatgcagagctcgggcagacttcaggctacaagcagcacaggtcctgatgacaaagtggtcaaggtgtgattatggctgcacgagagctgctcagaaccctgggaccatgcatgcaaacgattgccttttcctggttcctgaaaacctttctgtgtgtccatgtgcatagggtgggaatgggagaaagaatcaaaggtagcagtgatgtaatgaaaaccttcaagaaagggtggggaggggtctgaagggcagtgcattctatttctttcagctaagaaaaggtaagaaaacttagaagaaggaaaaatagaattaccacatgatccagcatttccactactgggaatattccctagagaactgaaagaagaaacttaagaaatacttgtacacccatgttcatggcactattattcacaatacttaaacggtggtggcaatccaagtgtccagcaaaggatggataaacaaaatgtacacacattcaacagaatattattcagcctttaaaagggagaaggggccaggcgcagcagctcaagcctgtaatcccagaactttgggaggccgaggtaggcaggtcatttcaggtcaggagtttgagaccagcctggccaacaaggcaaaaccccatccctagtaaaaatacaaaaaaattagctgagtgtggtggtgcacgcctgtaatcccagctacttgggaggctgaggcaggagaattgcctgaacccaggagatgggggtttcattgatcggagattgcaccattgcacactccagcctgggcgagagagtgagactctgtctcaggaaaaaaaaaaaaaaaaggaggaagttctgaatcctgctgtaacaggcacgtaccttgaggacattatgctaagtgaaataagccagtcacaaaaagacaaatactatatgattccatttatatgaggtatctagagttgtcaaattcatagacaaagtagaatgctggttgccaggggaggagggagtttcagttatgcaagatgagaaagttctggagactggttgcacaacaatatgaatatacttaacacaactaaaccttacacttcaaaacatttaagatgataaattctgttatgtgtattttaccacaattaaaaataacaaacaagtccaggtgcagtggtttatgcctgtaatcccagcactttgagaggccaaggcaggggaattgcttgaggtcaggtgtttgagaccagcctgggtaacaaagtgagacaccgtgccgggcgcggtggctcacgcctgtaatcctagcattttaggaagctgaggcgggcagatcacgaggtcaggagttcaagaccagcctggctgatatggtgaaaccccgtctctactaaaaatacaagaaagttagctgggcatggtggcacatgcctgtagtcccagctacttgggagcctgaggcagaagaatcggctgaggcagaagaatcacttgaacccggaaggcagaggttgcagtgagccaaggtcgtgccactgcactccagcctgggtgacagagcaagactctgtctcaaaaaaaaaaaaaaaaatagttatccaggcatgctggcatgtgcctgtggtcccagctacccaggaagctgaggtgggaggatcacttgagcccaagcggttgaggctgcaatgagctataatcatgccactacatttcagcctgggtgacacagtgagaccctgtctcaaaaataaaataaaacaaaataagaataaggaacaaaaaattggaaaactaaacaagcaaaagaccctaccctgttcctcacattttaaagtgaaactggtattaaatggaaagcatgcaccaggtatatgttaggaattctctttttctgtcagctatgatagtacttcaggttttttaaaggtaactgcattccctattgcaaacaggataatataaaacttttttcagctgcctcttgtgaaattttgttccatattttagattagagacctagcttagcagtgcctttagtaagggtaaataactttgcaaatcatggcacaactccctaggtgggactgtactatggatcagtcattctcatggaagtagaaggtagctttaacccctacgggacatacatgtggaaatgtctggagacagtcttggttgtcactgtcatgggcaggaatgaatggcagaggcaaggatgctgctacacatcccaccgtgcacagcacagaccccacaacaaagaactttctggccccaaatgtcaacagcgctgaagttagcagctctgctccagattggcctagcagttcaggcatcttgtttgttttgctcttccttttacccatgcctgtgagcaggcagtggagtgagtagtcactaacatgtcaggccctgtgctaaatgctctaggagaatgatcctacgatgcccccggcgtcactaacagggaaccatttggagaggttgaggaatgtgtccaaagtcagtaccactggtggaattttaaatcagtcctaaagacctccagggtggtgttcttacctctgcttcgtaaaccctcaagttctcaaactcattctggcttgtgggcagcaagccagggcaccagtgctcaacaagacacgctatagagaacactggcactgggaactgttagccaagtcccttcccactgaggcccttcaacatcttggcagcctatcaaccccactcagactgcagaagaatgtttggattcgaggggaaattggggaaaaattattttctagattttataaaggttactgtcatttgcacataataaatctctgttctgcctgatgttatttgcatgaagagggcttcacccactacgttcttaacgatatcttcaccagaaccttcccattcagaagtcatgcctacacaactttgagaattcccaagcactaaacatctcaggagctgaaccatctagggaactcatattcatgcctcaaagccctgttcagacttggtgccccacttttgtggagcttgaccatatatgtcccagatgccccagttgttcattccttctgcatagctccatactgtaacaccctgacattgtacgcatacttctctacattaaccattagccaaccagactgagttgcttgacacagggactaaggacacgtctttgtataggttttgcatattacaacaggccaactacagcacctgtcagaaatggctgaagaccttaaaaagccaaaaaaaaaaaaaaaccacattcagagatcaactaaaacacacaaggagacacccacaggaggacactggtgatttcctctgaatcttgagaacgtccagctgattttagtgaaattattcatgcaagtctcgcgcagtgagttgggtgctgggatgtctggagaaagctacatgggcacggaggtcctctctgtcgtcagtatcatcctgcaccaaactagccgcggccccagtaataatgccacagagaagcttcctccattccatggtcttggttttttcttttgtttttgtttttttgacaacaatcacagtcactcccacgtctggatttgtcaaaagcccaggcctgctccatcaggaaaaccagggagaaggggattgcaggcggagttgcctgctcaaaaaaatgaaagcatgcagattgtcaggccccacttgggacttaatctgaatctctgagggtggggctccagcacctgcagtttttatttaaatctttttttattttttttttatttttttgagacatagtctcgctctgtcacccaggctgggctggagtgcagtggcgcgatctcagctaactgcaacctctgcctcctgggttcaagaggttctccttcctcagcctcctgagtagttgggattacaggcatgtaccaccacacctggctaatttttttgtatttctggtagagatggggtttcaccatattggccagactggtcttgaactcctgacctcaggtgatccacccgcctcggcctcccaaagtgctggaatcacaggcgtgagccaccacgcccggcccttattttgtttttaactgacacacaataattgtatgtattcatggggtactgtgtgatgttttgatacatgtatatttggtgtcatgataaaatcagagtaattagcttatccatcacctcgaacattcatcatttctttgtaatgagaacattcaaaatactttcttctagctcttttgaaatatacaatactttattgttaatgacagtcgccctactgtgaacaggacatgggcacgtattccgcctatctaaccgtaactctgggttcacgtctgtcggtctaacaagccctccaggtgaccctgatgcacactcgagttggaaagccactgccttctctccatgcttctcaacagtcatgaccatcagaatcgcctatagggctggttaaaacacagactgccagccctcatgccagattttctgattctgccactctccctccaacagggccccagaacctgcatccctagcaagctgccaagtgacctgctctagggatttctgaaactaaagaagggagctgagtctcattttgtatccttttgtcatttttttctcacttgtatatacttttaaataaagaatggaggctatttctcagctgatgagaaaattctatagtattgtagggtggccttatgatgatccaagaatataccaaaataacctcttcaacagaatactatttccccttttacccttctctcccaatattctatgagacccccaaaggcaaaaagcaccccacattttggaccagcagcttggcactcagcctccttcagaggggcttcaccagccagccccagcccaactggtttctacctaaatactcactccctatgcactatagctactgactttgcctcaaagtgatttctctctcaaacgcctagtacatcaacgtcaattggcactggtttctgttaacgaacagactggcctgcgccaaccacagcttaccacacgtgtactcggcctacttccctattttcaatgcctaatgatttttgctgcgcctgaacacatctggagggagccaggcccactggctgcctctcgtcccactccaggccctcctacaaaggtgcactcagcaaaccctccaagtacagacaggttctacaatgttgctccaagtcagagaggaggcctcaaacaatcaaggattttttttttttttttggagaaatgatcaaacccgggggtggggacagaacttcctgcaagaaaccgcatcctgaacaagcatcaccacgactcactgtaaataaatactctctccttgcagcacttccgtcaactgtcagggccctggctccaatcgcctttcaagtccaaacaggaaaggggagaaaagagagtgagatggcagataggaggtttaatttgcttcttgctgcagttttcattggtggggcgcttccaattcagcaggcctgccagctgcctggaattgctcctggaccccactttttcctgttaaccttcataattgtattattacgggccagcccacaactggcctacccaaggctcagaggagtgcggcttcttccctacatcagataagaagccaaaatcaaacaggcctgctgcagacagaaaggcaactgatgtttgcgagggatgctctgtacatgcctctgctgtgacttaacccaagggattggggggagtggggatggccatggggactggagggtagagggttcaagaaggaaataagtcagtgacctcaattttctggaaaacgaatgtgaaggatatccttttcaaagtgcacaatgtggccgggcaggggaagatgtgcaagggagatctttcatttcaataacagcaatagcaagtacttctggagtgcagaccacgtggcaggcatgacataaatagcttcaacatacctttagtccttagtgttctccatggtacctgtgagggaagagccataacccccattttaccaatgaggaggccaagtgtgggagggctacagaaacacaggctgcttcacaaaccgtaagtggcaaaagcaggaattcaaactcagttttgcctaaatcagggctgctgtgaacagctgggaaggaggtgtactgcacaactgaaacgagtgccacacacatctccagcaatgtaaatggcagctcagcagtgttttgcctgaaccggaatggggctgatgctgaagtccacattttaaccatggaatatactgcctcccaaaggttctggaaaataaaaatgagctctgtccagagcttctcaagaagttctaagattctaaggtagtatgaactccatggctttcaaccaagtcaatttgccctatataaagggcctttctttgttgaattccctataattcaaatttcccatttgtttctgtgttatgtatgccccaagtctgtttttacacagtattgaaattaacaatgcctggcatattaataatagatataaatatctatcaatagatatttatacctttttttttttttttgagatggagtttcactcttgttgcccaggctggagtgcagtggcgcaatctcagctcactgcaacccccgcctcctgggttcaagtgattctcctgcctcggcctcccaagtagctgcggattacaggcacgtgacccaaccccagctaattttgtatttttagtagagatggggtttcaccatattggccagtctggtctcaaactcctgccgtcaggtgatccgcccaccttggcctcccaaagtgctgggaattacaggtgtgagccaccgtgcccggcctatgtgtgtcttttaacacatacaagtatctattgaaaacaactcataggtgagtgagtgagtgagtgagtgagtgagtgagtgagtgagtgagtgaatgaattcaggcattcaatgtgtcatcacgatggccaaagcagaagacagttcttgcccttctctgagaagcctgggcctcatggagaaatgggtgctctgccatcttgctaagactggcttccataaaagctgctgtcacttgtgggcacccttgattttttttaatataactatgaaaattcaggctcgggcacagtggtggtagcagctctggttgcagatggaggtaatataatatgttgttggcagcccaggaggaaacagggagggtaataagcagagaaaaagcatgttcaagaatgaaggagtgggtgaaacctcgtaaactcttcgcagacaagacatgccccctggagcctctgccctaaggagggagggagccaggcggcttcccagaggcagaggaggatgaagctagagatagggctgaggtgcccagggcacctgctgccacacactgaaaaaaaaaattaataaaagtaaaaatgaaccactgcatgtagcagcaaagtgttattaaaacactgtaatgtctcagaggttcctatgaagtcatgttcttacaattcactcataagaatttaaagacaaaattatatgcctcgtaattctccaatgagtatgtttctctatggatcccattgtttagatgggatgcacagcttccagcaggtttaaatcattgaagggattttaaaaactggcactttccagaaatctggctgcacattcctcagcaggagtaagtgtcaatacagattatgtctacatacttgtgtataccagtacatctatttcaggacacgctttccatcagggttgcaaactcaaatgcccataggggccaggcagttgcttcaatggattcaatggatgaagcaggcagggactcaaacactagggagtgggtgggaatgcatccctaacagacagctttgacaagccccatctaaatgggcacttgaccccagcatgggagaggggctggtgttactacatcttttggtttgttacaagaagtcaggaatctgggctctgcataggaaacctcagtaaataaatgccagtgatcatccaaataccttatttagaataccatacaagttagcatgtagttgtggcctgaatacctctgtctacacctatgtctacacatacagcaagaatgactgtttaaatttagccactatgtttccaggcccctctgccttacacattctcaagctagtttatgaggcaccccaacgagcttacaaacagtcacatccacttagatgaatggcctgagtcagggaggaacctgccaatctgggcagtgattggcaaccaggtgccacatggctggagtcagatctgaaagggcatcactccagctggaaggaagtaggtcagtggcctagttccacaggtctgcataccaacctgctcccattccattgtacttttcccttctggacagatgaaaccatcgaggcctatgtccagttaccagacagaaactgagaggacccactaagggagcgtgtggatgaggttcacgctagcagcatggttctttaaaggaagctcatccacgtccagcgtgccctacctgttcagacacaggttgcaacagatagaagcaaagcccttctaaaagaatctggcctttttcatatatttttattaaacttgaatactcaccagaatggggcagggggagaggggtttggatatcatgtctttctctttcaccctactcaagatcatagtgaaatttcaacatttgcaagtatagaatctatacagtatacttacaactatgcaagtatagaatcagccagagacaagtgtagacacgttcagagagaagaacctcaaatgactcattcttccagttttctcaaactgatttcagctttgaggaaagaggcttcattcatacacaccacacatcagatagtgccaggcctcatggaacccttcacgggttgatgcctctaaacaacgcttccctgccgaggaatgtgaatgttgccagccttggggacggaaccccagcacagaaatagactccttctaagatttcaatcttagtgactgacagacacctcctagtctatcaggagatctttatcccctgaccagggtgaaggattcccactgcttcctttccccttacacacacctctctgaacagcttccacaaagaaatgtacaaaatcctgctccattaagtctgcgaaaacagtatgggcactaaatgctttcctcattctgcaaagaaaggctgttgactggtaaggtttaagcaatacttaagaaagaaattctggtacctctcccaaaagacaaactgtacctataataatatccctggacaattaatggaacatagcaaagactacacagtggttaagatcactggtattaagagcactggctcatgggttagggtctgttgttattgacctgtgaacttgggtaaatgatttaatttctccaagcagcaatgtcctcatatgtaaactagtaggtaataatggtacccgcaaaaaggagttttccttaagaataaaatgggacgcattcaagaacactttgcaaaataccttaactagtaggtaatggtggtagtgtctacaacaaagataattcctgtcggctgctttactgtccccagctaagatgcctattccaaacttctctgttttgaataccaaattaccattgccacaatttcagaaccaaatcactggcaagtaagaatccttagaaacctgcttagcaaactttgacctgggaatgccggcacacgtctttttcatggaggacacttgcaactgtacaacttagtaaggcgtgggcatgcaaagtttattagctaatgtcaaaccctagctccaatgaaatcaaagaacaaaatgcgtgttatgaccagacctaaccccaaactggtttttggttcagaaacagaatgcctgccaattcggggaaactacatagaaacagtaatcaaacaatattatatgatcatattcattgtcattattaaattttggtaataaaaacagggtagaaatatagaaagagcaaaaaattgatgtgttttacttgggtcaaggtttttcttaattgcaaaaatagagcagggcccaaattataggaggcaagcaaggtgcctagggtgcaaaatttagggaggcactagctctcaggatcgtccaagttcaagatcagcattgacagcaaatgcctccttaaattttccaccctaaacaccctctgtggctccccttaatccggtgttaaaagaagtgaaatgtaattttcatgcatttgtgtgtgtgtggcagtaacctgcaaggaggctccaagatgtacactgatgggcaacattacaacacatctttcctttaaaacccagaatttcatggctgggagcagcccaggcaaaggactatttcctagaaccttaccaagttcaaaggcagctctttgcaactttgtgagggtttcctttcatcagccctcaacaaccttttcttgtcctctcccatacaaacagggattaattctacaagcagcagaaaatcctattctcagatataatttttgcccatgtaaaccctatggaagaaaggggtgcaatgtaaaatgaataggggtcacttactgatcatgcaatctgaccactcgaattgaggaattcttttttaaggggctgtttataaatgaatcattgtttcattagataaatattcacaaagtttatttttagaaaagctaaaccataacaaagtataactaaatacaatctcacataggtctatgaaatacgaggtaaataaaagtttaaaaaatctcagagaggtgacttcagtcataaggcatgaaatttctttcccaacatgtctacgaattgagcattaaaaaggaaaaggggctttataaacataagtcctttaaaatttccttctgaagttttccactttaacctcacaaagcctcatttacaaataaacaggtttctaaatacataagacattagaagaggtaggtggaagacaaagaaaaatcacacctgcgtattagagtcaatgtgtttatgttcctaatttcaatgatttaactgaaactactttggttagaaatgctaaacaaatagattcacaactaaaaaactacaggtgtttctgtacctccatgctggcaatttttagatgtacttcacctgctatcagaacagaaactctacatactgataaggaatgggacgacaatgaacttcgccctccccagctcaaccttcttcataacttcactgcagaatgacaagctcgttgccagtgaatgccactctctaatgccacagaaattttgatctcagctgtccgatgcaaatttgtgtacgattttgtatgcattaccaagctacgaaataagtcagtgtgttaggatgtgtgaacacatggcttgctcttgtttctgaacataatagttcctaatgtctagtgtactgtgatattcttggttcaccctgccctttctcttaaagaaagcctatgttaatttcgaacaaaactgaagaatggcataggacaagctcctgtctaaatactgtttcttgtgatggcataaaataagtagtaagtgataagatgagttggtcatttttttaatttaaagagggaagaataaacaattttatggaatattctttttttttttgaagacctaattatatatactaagcaagaagtaatttctccctcctgcctacattttatgttttgggcacttccatttcatgtcccttgacaccttttccaataatccatctacttgatattggaaagcctcacatgaataaaactttatggcactacaggcgtttagccttccactgacattcctggcctgttcaattctgcaattcaatcaaaatcaaatctcaaaatcctcttgtcagccagcactgctttcatatgcctgagccttgtgtaaggataactgcatccaatcttccccccaagcagtgcttatattgttttattacagttcaatgagtggagttcaaaattacatgcagctgcctactactgtggttgggctgtgttacgcatggacacaagtattgcccaccaggcctgaaatcattcacttactggccggccagaaagactgtgagcacttctttgtatggaagaacatcctgtctgctagatctaaagagggtgatgttaacagatcagtccctttataaaaggattgtgaaagcccgatgaaatgcaactcaaatgtgctcaatgttaagcaagtggctagagcacataaaagcgaagataaacctcaacatgcactacttattctcagaaagcttgtgaaggaagataaagagatctggaataaaagacatcttaaagaattttcgtatgtgttttagatgatgaagcttcatttaaatgagttttttttttaacacccccagtaatcctttcattgaaacaaaaagacaaaatacaaagccaattaaatacaatttaacctgatgaacaatacagtaattaaagtaccagtagtcaaatgcttcgataggctaacatcaggcagagtgacagtgaaaatagctttagggatacaccatattttcaacactgggacaaacacatcaagtggccatcccctatttttaagcgaaatgaaaaatgtgtagaaaatactagaaccaaaaaggaaagcaaactgggtctcatttgtgtaggtgttaaattacttagttattaaacaggaaaaaggtcttgctagaagaactgttaaagccccaaataaaaatgtgtgtgctaactccaggctacctctgggctagtaattctacaggtaaaacaataacttcctagagtgcagtgtttcaagaaaaagaaacctgcctctctcatttatgaagacatgcatctcctgtgcaggtggccccacacttctctgtgacaaaagtcagcgccaggagggtaaagacgtacatgtcattgccaaatatttactggcgacgtctctaaaattaatcactctcggagcccccaaaaggtgaatgtatatccatttctaatacctaccactctgcatctttggaaacaatatcatcaaaaggaactttaaagggatcatgaaaagctctaacatacagaaacctctttcagactacagaaattagtctcaagactaaatactcaggagtttaattattaagtcagcccccatgccaagagggggaaatggaaaggtatttattctgttgcagctatgtttataggtaacaacctagaaaaccaggtgattcacgtacaatgataccttattttctaatgacgtggcaactcaaagagccagcaaggcaagatagggacaatttggaactggcaaaataatgaatgagtttctagacataattttattttctctgggataaatgatgagattcaggcttactgacccccaaaggaggctcttgttgtattttaatatttgagagggttgaacttggagggacaaggcatacatttttttaccgaggatgctgctttggtcaagacctgtcatcctttgatggtcacagagcaggagtgcctgcctccctcccaagtcaactgcagtgaaatgttattgtttgatagcttttcagttgctgacaaaatcagctggtgttcccagaaaatgaaatgaattccacacactggcctccctcccttccttcccctttcactcagtggagtcccaatggatgaaatgaacaaatctccaaggaatttgaagaccactcttactacttacaagagtgctttctggcatctgtagaaaaatcagaaaatccaacaatatggcccaaagtcctgacaacaactggctggagtgaggcagcaacaacagctccctttaaataaagcctgtgctgcctagttctttactcttctcaccccatctgcttaattcttttaaattaactgtgtggctgccataacaatttgagtttcagccccctgtaatacagcttacctcgcattacttccaggacacaaatcccacaatcctattcacacttggtgatgtttgggccagtatcagggtatgtccccacacttcctaatttcctaagaaaatgaaatacatatatacacagcttcatgataaatgccaagaccagccaactaaacagacaccaagaataaagcaagatcccttccccaaactccatcctaccaatgtcatttcataatgtctactaggcaaaggagtacttggtccaattatcagatgcaatattcaagctgaatgatatatgcacatgaatattttgagacctggttaccttggctatcctaacagccaaagcagatttgcagtgtgatcccggcagccctactggccgcatcaaaggataggctgtaataggatttcaacacaggagcaaacaatgtctggtactgatggacacataaaactcactgaagtttaactcctacttcttaacaaataaaaccaagcccctccccaacctggagagcctgaccaaactcactgagattatcaatatcatttttgggatctggaatcttattctcgttgaagaaataaacaccatccccaaaatgctgatgacatttagagttaagccctctgatcacactgctctttcaaagagcccaagagtaaagggaatttacaaatatgtactaaagtcagacaccaacatcctaatagcttctgccttctagagataaaaatataaagtatttatggaaagactctcctcatccctttttatgcaaagagtatcttacaaacgcattatgaaccagacatctgtgtcttaagacaatgaacacatcaagttttaaggggctgtaactctgaaacaggcctggcaggtatttccaccaaaccacctcttctgctgtctaatcctttactaagcaaatatttatactttagcaggaaaatcctgagctagattgttacttctcttaccaccctctgcacccctttgtaagatgtcccttctccagtgaccctggagtttagaactacatttgctctattttgttgcataacagcagcaatagaagaggtaagagaaagtgtctctaaagaatcctaaagaaccctccgtccagctgggagaactatactcctacagcgtgatcagagctagggtcgccggggctaatctagaatcactgtgcctccacatacacgaggcacatcatctgtattttcacgttttgtgaaaatgctccttaatgttcacagacgtggttacccactgaagcaggagctaaggcacagagagagacaggtgttcgatagaaaaccacagagacaaaaagcacccaaagagtcgctttataatttttatttgattttcaaaaactccacaatataaatgactgaaccttgaggttccaagtgtggcctcgaccagcagcctgaacattatcaaagatgcagggtcccagcctctaccttagacatactgaacaagaatctgcattttgacaagatctgcagcttgacctccatgcacctcaaggtatgaggaggactgtgctctagaagaactatgatgcagctgctcttgatggggagatggtagcgaaagttccctaactttcagaacatatgtaaaagtctgtggaatacgtggattcgaatcatcaaagcaacttgttttctttaaaaaaaaaaacaaaaaaaaaactgctttctgagcgccatctctctcagacccactgaattagaatcactggcactcaggtagtcctagggcccacaccagtctgaaaaccactgagcaacttcaaatgtgcatctcctctgtgctgcttctggagctggtttcaatatactgttaaactgatcgacatttggtaactgaataatctgcaaaaacttcaaaaaccatgtcatagctttgtatatgccctaaagtgaatgaggcgggggcagtgttctggaattcttatgaatgatatacatctctttacaaatagtcagttttttaaaaggaaatgtgtgcattctcggtaacacatgcattcacacatgctttcagtgctaaactcttcatagaaaatgacaggcggacgtggaaatagccacacgagcacacatcccccccgccgtctgaaatacagaggcatacatctgagagtacatccctacgtatagacaacttcaaacaaaaacagaccagctaaagacggaaagcaccctccttaaatctaatattcactttgtctaggaccaaaccaactccaactaatttaacaagcagcaataaataacccattatatgttagcttttagtcattaaacacccttcccttttaattaaagaaaacttggaaactagctctcaaaggggtcctaaatttaaatgtttaagaaaagactgcttttgatacaaactgcataaaacaaataatgaaaactcttaaatgttggatggggtgggatttcaaagaattaactaattgcaacctgcgagagaaacaagacacatttgcttctgggtacctctcccacgtcatgctcttaaaggcccaagtttcaatttgggagaagaagcccaaatgttttttgttaatacgaagagtcaaaatattttaaaggatcacacttccaacagttgcaatttcccttttgcaagttacctaagaaagaaaagagctattagtgatagttacgggtgggtatggggtgacagccacatgcaaactgatgcttgctttatctcccattgcagatctgcgggaatatgcaagaatggtttaataaacaccatcattccacttttcagtttaaagtgttctttttttgtgcaattaagttattaaaacacgactataatttgactacattaataacacaatgaagcaagccttcaggtaaagtaacttggatggacaaagggtttccaaaaaatcacagccaaaaagtcatgccaaaccgagggaaaggaggtaatgtctgtggaaagaataacagttgcccttgctcagatgattcaagtatttgagggaggtagcaacagcccttccctagcaaagatatatggggcatactttttgaaaccaacaaacaagtcgcccttgctgtattgcaaagcacagggcagcaggcacaacagagaaagagagagagaggggacacacaaaagtcaggcaaaacaggaaatttgaggaaactatttctgaaatgtaaataagggtttctgttactttcaatattgcagaagcaaagaagctccactagatggaaggtgccgggttttcttgtacatctcatttttcagcacgtgagacctgattcacaatgtatggagctgatatttcatatacatattgtcaacatcagaataagaaccgaaatttgttttacatgttccccttgagggtcagcccttccttttctctcctagagactatggaagaagcctgttcccaactcccctacacactagcttggggactcaggacaatgtatttgtcttcttcaacatcactttcttgtctggaagaggaggataagagcagttcctactccacagaaacgtcgtgagatacccaaatcacacagtgactgaaatctagtaagtgccaaatatgctaggtatttttattactaacaacgtggtaattctactatcaaaagcaacccatggaatatcagaaagtcagttattggtagtttttttttttttctgtgatatatctatgtcaactcatatcagtggctttatttttaaagaaagagtgttagcaggttattgctatagaaaatgccccatatgaaaaagactgccctggtaacttatctgagagatgtgtcatttacccttaaagacagcagaatacacaaacacgagttctcatgctaggatataaagatgggtattggagagtgctgacagaatgctgggctactgaagacagagtttactcattcacacatctctgccatgttcttaaatgtctctgctaatcctcactatgaaacttaaaaaaaaaaagcatctgaaatccacagaaatcagggtgaaagtgacagtaataacatatttatatcataatatacttgtggattaataccattttcaaaattagcaatccaataaaatcaaagtcagaaaagcaaacctaatgaatttatgcacactggatttaagaaaatatgcagtagtactgtacccacatgatcctagaacttctaggtaaattacaattactgtgctatattgcaattttactatcaattagcatggaccatttttcatcaaaaatcaaacaaatcctctctttctgccaggtacatacctaaaatatcctcggtaatcacaaaagagatccaagtccttgaggggttgatccacctctccatctctacccccatgaaattaaagcaacaactttatcaaagtagaagaccaaaaggactcaggagtgtgaaacaagaaagcattaattatgaattacagtgcttttgcagattcgcatttagtgcaaatccctctaaagcatattttagtatactatgtctcacactgcagcaactgagaactcctgtacacaaaaatactaggggaaagggcttaaccactgggtcaaaatttgcagttgctctgacatgcacaatcaaagcactcgaagagatatgcctgggaaataggattttattgatatttatgggtaagtttgtttactacaagccttagccatttcttctctttactttcttccttttagcaaaacacactccgcttcccagtgcccaacatgggggcacaggacagggactattgtgctccaggcttccttgcagcacatctcaaccagtattggctacaactccagcaccacgcaccaatttcaggaaaattagagttcagccctttctttctctccattttcgtaatctcacagaggcacaactgttccagaaaccagctcccctaccagtcagatatttacactaaacctttactaaagggcttgctattacaatgctatctcattgatacaagattacttcacttctggaccacatcaagctatataatactccaacaatcaaaaacattgcccctcaagaaagatgcagcccagattattttcatgtgcttatgtgagcagaatgccaacatttttgtttaatgcaatgcaaatctcaaaaaagagtttaaccatgaaagcagcatgcaggcaaaaatccttccaatgtatacatgtccacatacacacattacatagacacatgtcaagctataaagaaatcacccaggatcagaactttacatactgtcaatttctcaaggtgcaaccccattttcaaaaaccccaaacaagcatcagatcaaacgaaatatacatttttttaattttgggaaagtgtaatatccctgtgcttgacaaggtgaaatattctgcctttttactctgatttgcaaaataggtatgtgagcaaaataacagaatatagcatttacctatccatttagcaaataatatggaagacctactctacatctttattcaaatgaaaatactttccccagcatttatttctttagctggtagaaaccccaccctgtaaggaacacaagcgtaaagcaatctcttgcaatggaccattttacttattctgcaatttcttacccaaattacacaggtataattattttgacactataatgaaaagaaaatgggatttgggcaccgtaggtttatctaataacactatttcttgccagacttcacagcactgacagtcacaaagaaccttgtccattccaataggaaatatttgattttactgtaggaacattatttattttcaccaagttgctattatcagaaaggatatgatagctgaataataaaaatgaaatcaagaaattctggtgtttcaaggctttattttttttctgctctcacttttgacattttcttcccctggagagacaagataaagtgctgtcataaatgggtgacttttcttgtcaaatgacagatttgattctccatggtaaccacaaatcaaggtgctagtaggaattaaagcttctcttaaaaggcgtctttatgtttataaaatgaatttaaattaaatgggtattaggtacagtctttacctcaatttatttattgactgaagagctctggattgcaagaagcacatttgcatttttaaggaaagataacatattgtcctgacagatgtataaacaaagcaagttacaaggtcatgcttcatacactagttctgagacccaagaaggggatacagatggacatctagcagttaagaagtatttaaatactgaaaaaggtgtaaaaattacctacaggggaacagatgatggagtctctctagttcccttcctaacgcagctttttttctattcagttaataaagatttgtgaaattgtcacaaaaagaatgccaaaaggcaatctccctcttcgtcttgtgtccctcatgtaatagatatggggttgttgttttttaaaatcccttcatcacaaataaatattccattcaaaatcatattattttagcctccaaattcaaatacagctaaaataaaacatttgcttcccaatgtgtttaagaaaggcaaacacacatgaaaaagactatatatcatgatttcagaagaatgagataattaatcagtgtgttaagctgatttcaattttcataggaaatgaatgctgatttgtttctttttttatagtattcttggccattagaacttaagaagaaagattacgtgccattggatcctaaaataatatatcaggccccatcttcttttttttttttctttttttaagatggagtctcactctgtcacccaggctggagtgcagtggcgcgatctcggctcactgcaagctctgcctcccgggttcacgccattttcctgcctgagcctcccaagtagctgggactacaggcgcccaccaccatgcacggctaattttttctattttttagtagagacggggtttcactgtgttagccaggatggtctcaatctcctgacctcgtgattcgtccatcttcttgatattagcaaaccatttagctggtctagaggagtaaaggctttgtttgtttgtttgtttgtttgttttttgtgacagtctcactctatcacccaagctggaatgcagtggcgtgatctcagctcactgcaacctccacctcctggattcaagcgattctcctgcctcagcctctcgagtagctggtgacacagccacctaccaccatgccccgctaatttttgattttttggtttttttcgtttttttttgttgttgttgtttttgagacagagtctcactctgtcgcccaggctggagtgcagtggcacaatctcagctcactgcaatctccgcctcccgagttcaaggaattctcttgcctcagcctcccaagtagctgggactacaggtgcacaccgccaggcttggctaactttttttgtattttagtatacacggggttttaccgtgttgcccaggctggtcataaactcctgagctcaggcaatctgcctgccttggcctcccaaagtgctgggattacaagcgtgagctaccgcgcctggcctaatttttctaacctaaaacaaagaaagggaaaataagagtcttacattatacactggtagctgagagaattcatcattctgagtggcaaccatgtaagcttagcaaaatttgattgtacaccgtatctagctgaaagaacaatgtggagaattaagccaaattcccttcttagaactgtctgatggtggtgcctttgactgtcgggaatagctctgacaagctgaagggaaaaaaacaaccggtacagttttacaataaagagatgggcaatatcatctaggaatttgtgactgaaacctaaattcttagacgtttttgtttgtttggttgtagagagaggtttgagttttatcttggggaagttaaaaagactttgtccattcttgagtttcatcagtacgagctataataaaatggtgcctaaaagttataaatctctttggaactctgtgtacaaagcatattatatggtggtgtgagtcacacagaactctccatttcagtcacaatggcttttgtttcatattagaataaagtgggttgatgatcttattctcattccgtgtaaaaagtcaaactaacatcacgtctaaaaacacagatcgacgaattacccagaaacgagtgttcaaggagatctcatgcaacatagtaagtgtacggtagattctgcagggttatgacatcagttttaaatgagccatgatcgtatcactgtgttccagcctgggcgacagaatgagaccctgtctcaaaaaatcaaaaagaagaaaaacaagaggccgggcgtggtggctcgtgcctgtaatcccagcactttgggaggccgaagcgggtggatcacaaggtcaggagttcaagaccagcctggccaagatgatgaaaccccgtctctactaaaaaaacaaaaattagcagggcgtggtgacaggcgcctgtaatcccagctactcaggaggctgaggcagagaactgcttgaacctgggaggcaaagggtgcagtgagccaagatcgcgccactgcactccagcctgggaaaaagagcgagactctgtatcgaagaaaaaaaaaaaagaaggaaaacaaggtaactgcttacagggaccacaggtctctggtatcacagtgtaaagttaccccatcaagagaagattggcagggcttggcattctaagaaagagtgattaacactgagagaacttaaccctccccagaagaactgacactccctttaggcagaggggagaatcaaggatacctgaatgctaacaaggacgtcccataaaactggaactatcactacctggtgttgatattgtctgccttaaatagttcactagtagagaaaggaattcaccaagaggaaggccttacaggactgcacataaacacttgccgcataaaatcaggaaacacttcactaatgcactactggataaagcaaattgctcattaaaatgagactcatcagggtaaaaaatgggaatgctaaactggcctggaaatgaagttatttaccattttgtttgaaaggcgggacagaagaaaaatgtgtaaacctattcgagtcatgcagttggaatctggttactctgtttagatgttcatgtcacagaatcagctcaagaatttcttgagaaaaataaaatagggttcacttcaaacaacaccttccacctgccttctggagtgcactaggcttttcagaggtacactcagcctcacagaatcacgtatccatgatgggccaactacacagataaagttctccttcttggtaagctccagtcgccgttcaactttctaagacagaataaaataagtgagaacccattcgtgtaaagctgaaatttcaccaggtgtcttcagccaaaacctccgtagaatttaaaaatcagtgaagatgtgagagggaaatcattgcatctatgttagaaatctggacttgactcagaagaaattccgtgtaactccattgtattctagtcatccgatgaaggaaaattcaaaccagccaccgccttcaacatgttttttatttgtgtgtgatgtagcttcatctggtccagattaaggaccgccacatatatattgctgacttgagtttactgctgaacttggcctagcaggctggtcaccccaggtcttctctcgaaaaccaatgctatgccaaagacagcaccatgtataaaaccacctcctacgccccatcaatcaaccaaatgtgcattttcacatggaaggtgcctgcctgcaaggccagcaaatgacttaaaccttggcaggaaagcctctcctctctgtgattgtcattctcagacctccgaacttgtcaaggaggccaagcatggtggctcacacctgtaattccagcactttgggaggctgaggcaggcagattgcttaaggtcaggagttcgagactagcctcagcaacatggtgaaaccccgactctactaaaaatacaaaaagttagctgggcatggtggcataggcctataatcccagctactcaggaggctgaggcacgagaattgcttgaacccgggaggcggaggttgcagtgagctgagatcacaccactgctgggtgacacagtaagacactgtctcaaaaaaaaaaaaaaaaaaaaaaaaaactcaccaagggggaatatacccaccacaggtcacctttggaaaacagctcacacctaccacatggctatgggttcaggaaaattcagggccctgctggcagggaagacatcccacactaaggagctgtatgcaacaggctctcccaattgcctgacatgaatggtgatgctgagattctctgggctggggtctctccccaggagatatgaagataactataacaacttctacctcacggggtgttgtactttcaattaatgcctgtaccatgctttgtggtccctgaattaaaggcactgtttaatgaaagcaagaaagcagctaccagggtaactatcatgactgcgtcttgaccccaaacacagcacagttcaattaatcatgtcctggaggttttgtctggctactcttggttcttggctaggaccaagaacagcacctgcagaggcatatattttgtaataacggaagtatggatgctggccaagaggaagacactggcaagaggggatccagcctgaacaggattgagaggtggcatcaaatatacatttctgcaaaggctgagtgtccagtttaccaatctgtaaatgaggtacactaattaagaaaacaggctacacatggtggctcacgcttctatcccagcactttgggaggccaaggcaggaggactgcttaagctcaggagttcaagaccaacctgggcaacatagggagacgccatctctacaagaaatttaaaaattagctgggcgtgatggcacatgctgtggtcccagctacttgggagttgaagtgggcggatcaactgagcccgggagacggaggttgcagtgagccataatcgtatcactgcactccagcctgggcgacagaacgagatcctgtctcaaaaagaaggaaaacaaggtaactgcctacaggtctgcaagtcgggagcaggtgaccagcatccccagagaatgccctgctccccacagtgcggggctctcggctcactgccaaagtcagcgacctccaaagagggccccagagatgtctccttaaaggccccacacaagttggagtgctctcctgagagggggaaggtgaatcagaggccaagttactactgttccatgctcagcctctttgggagttgactggagccagggttcctctggctcctgggagttgggaagtcaagaagccaaatagcaagatgccctccccccgacctggcactttcaaaaaacagcccttctccataggcactgccaagaagcaagctggcctctgctctacccttttcacccccaaggtgaggggatgactgaagacaagtggcctctctgatttccgctcaacagtcacttcctcagggaagccgaggcccttgactagccattacaaaggtggcacacacagaggactgactttgtggcaagcaggggactaagcagaagtgggaaaccagactgccccaagtctagtctccaaactgccccccttccccttacataacctcataggagctacttgacatctaacccttagtttcctcatctgtaaaatggagactgtagcacctgcctcatagggttttctaccatgtgtggatccagtgagctattgtaagcacttagaagatggccaggctaaggctgggcacagtggcttaagcctgtaatcccagcactttgggagtccgaggtaggcggatcacctgaggtcaggagttcaagaccagcctgaccaacaaggagaaaccccgtctctattgaaaatacaaaattagctgggcgtggtggcacatgtctgtaatcccggctacttgggaggctgagacaggagaattgcttgaacctgggaggcagagattgtggtgagccgagatcacaccattgcactccagcctgggcaacaagagtgaaactctgtctcagaaaaaaaaaaaaaaaaagaagaagaagaagaagaagaagaagagggccaggctagaattgtcatcttcttcataacaatgctatgaagtggagactaatatgatctccactcagcagatgggaaaactgaggcactgggtgcttaaggaatttgcttaagatggaacagccaggacgtggtctaacctaagccgtctaactccctgctctgtgaaatctaaccttgtgcacgtcccacagcctctgttttacatcactgaagatggcactgaaacctcacgtttattcatgcaatgctccacaagggcagggtccgtgcttggtttcactcattgttgtcttagcacagtggaggtgctctaagagtttaaaaaaagagcaaatccatctttccatccatctaagctaggggtccttaacccccaggccacagacacgtaccagcccatggcccgttaggaaaccggatgcacaagaagtgagcagagggcaagcaagcattacagcctgagctccgcctcctgtcacatcagcagcggcattggattctcacaggagggcgaaccctattgtgaactgtgcatgtgagggatctaggttgtgcactccttatgagaacctaactaatgcctgatgatctgaggtggaacagtttcatctggaaaccactacccccaacccctcgcatccatggaaaaactgtcttccatgaaacaagtccccggtgccaaaaaggttggggaccattgatctaagcaacatgctggacagataaaacgaaacacttataaagctggcaaccaggcacaagtgcgtacagaccccttggaaacagatgccagcccatcctaagcctgccccagacctttcaaggacgcttcctctgccttctctccaccactgactgctgctcgacagtacccaacctctctgctttcctggcctgcccttatttttgtcttggggctggaaaaaatctgaacaggcgagctgctaacttttctccagaaaacaactttccccagctatttgtcaacttctgtcattcaaagggatacaacacaaatgtatatctttaatgaaattcacagtcaaggaaagttgtcatcatctagttatatctgttatgacatacatttcattttgttcaatacataacagagaagctatttaatcaaacagaagattcttgctaaaatgacagtccaagcaatgtccaaacaagcgtttattatgctatgcgaatctgatcgggattggattgttttcagcggaatttttttttccttcctcttccattgagaaaatagcttagggggtgggtgcagaaaacaacactggacaatggaggcggagtctgatgctgactcagcgctgagtgcagggacgtgagccccaccccagagtttacagggagaaagtagaaagatatatccgaccatcgggaaggtcacaaagagcactgcctagggcagggggttgcatcttccctctccttaccatatagttctacatgagagacgcaggtacaagctctaaacacagacacatgccaggaatgatgacatctgtgtttctcaagtgatacttatccttggatacgttttgtttgtctttacaatttaatgaacacttagcttcaatgggaaaactcatgttactgcaggagaatttagtgggttggggagccagcccaaggccagaaaaacaaaaagaaaaaaatgctgaaggaggtgactgggtacttgggctttgggcaccacagatgttgcgagcttgagaaaaaggaaacattattatatgtgtgtgtacgtgtgtgtgtatgtatgtgtatataacaaacatacacgtatatatacatacacgtacatgcatacatacttatgcctatgcacatacatatatatacacatacatatatacatacacacacatatatacctatataccagtaacgttcagaggatgataaatttcttccttctgcttcattcaccacacagtacctggaacgaagtaggatttcagcaaagaattgttggatgattggatgggtagatggatgaaaagacaagttaatagaaggatacatgggtaggtgggtgggtggtggacaaatggaatctccccaaaaagaaatgactgatgaaaatgattttaatacattattctaagacacggcggccctttatccagggacttcctccttactattgttcaaggtgtgtcctcagccatgccacgacagctcttgtattaaaggaagaaaacgtctttataagatagttgggggtagcctgtggctaaaaaaactttccttttcctgagccaggttaattggtcaccatggcaacaatgacaaagactgccaattagcccaaaactttatattactatgctaatcttctaagtaaatgagggatggtggagcccagtaattctcatactgaaagacttgttaaaacaaagatcgttggatctccctctttgagtttctgattcaggaggtctggaataggacccatgaacgcacttctaccaaatttccagatgatgctgatgctgcagtacagggaccgtgctttgtgagccaccaatcctgacaatctacaaggttccacagattccaatatgttacaagtctattcatgatctaccaaaactcttcttagctgaatggacttggaaaagtagatccacccttatttaaggtaccataaagggtcacagcattgttaaatataagatcaagatacctgatcattccaacagtcctcattaggtgggatttttaatccttggagaagcaatgtttttttttttctttcacattcctgtattcatttttggtgagataaaaatacctgtccaaacatttgaaaaaatgaatttcaaaaattcaatcacgatatgatgacataaattgaactcaggagtctgtaagaaatttccaaagggtcatctaagtcattgcttggcttcaaaaaggatttgcaaatcagccaccaaatgtcaataagtatgcctgattgacgtgaaggtgaaggaccccaacatttctccttggtgtgactgtcctgttccagagtcgggctaccttgaaagactcttgccatgttctcacatcacacagggatctcacctgctcttcgacacgtgatacctttctaatgttaggtctctggagaacagcggggtgaacagccccttgcttacaattccttttgttatgtataaagacattaaaactcccacccacccccaaaccaggcttctcctctatatgttaagtagtttccattcctttaaccgttctaaaaagatcccattcaccaccctttcatcattgccatggatcacctctacagcctttcccaaatccctaccctttccttgttttccccctggggcctggacaagtcactggccgtgactctttcatggactctcattaatacatcctgaatcatgtgaggcttttaagaacagcacttcactgctgacacaagcatcagtgtgaaaggagaagcaccagacaactccacttgactgaagatctgaaagagaaaaacgagcaggaccacgttggcatgtgggtgcttgagcaagacacaaaagatatctcaggagtcactctcctgaatgagaatttggacccagggatgtttgaggcctgtcgaatacttccaactcagagcaattccaccggcgctgggtgttgccttgtaaatggcaatatccaaatcagagaggaaatgacagtgcattccaagcaaaatggcacacatttagactgactaagaaaataacaataaaagtgcaaatttattctgcatgtgtgatcatgattatcattacatcaagttccatatatgcccagccagaataaatattaacccattttataaatgactttatactgcatttgtggatacagctccacccaaacccaaaacaacactgtttccatagtaaccaacagatttcaaagaaggaaaaaggaggggaagacttcagaacggatagcaatcaaataaaatagccagcatcaacaaaatatgtcagcattatttaaaacacacaggaccattctatagtttaatctctttcccagaaaaccaccccttctaagtcaccttcttgtaaagccagtcttccctcaaacaaacagttgcaaaattgtttccattttaattgaggaaagaagcaaatttcttgagtcattcctgggatccaaatgggagtatgatgaagaaaataacatctactaagtgacttagcccacacagaaattcacatggattaccaactggtaattatgaaatcttagctgggctttgatgatcatattagagtgtccatttccttgctgaatgtaatgagggaggaaaagaagcaaaagccaaaatggaaagccagggagctaaaaaccgtaaaagctgcagaccaccctcaactgaaagcccgatttttcactggaactttctcaaatatcagttcccccccagtgaattttgcacacagatgatgtgcagtagctctccacatccctgcaagttctttggtcttatgcctatagataaaattcaaagcaacacctataggcagcatcctgtctgtaggacagaaatggcctcatgtggggtaatctatgaactctaaaaactcacagccctggtgatctctctctcctctcgctttccaactgcctcctgatttcaaaatattgcagataaaataaaataaaatattaataaaataaaattaataaaaataaaatattcataaaacataaaaaaggaattttgagtctctagctcctactgtcctttggaaagaagttctaaagtaatttattaatgtgttctctcctacattctagctgtgtgaccgtgggtaagttatttaacatctccttaaccttcctgagcctgtttcttcatctgtaaaacaggaataataacagtatctaccacatagagttgttatacagataaaatcagttaatttgtacaaagagcttagtggaatacctaatacacagctaagagaatgtgtgttactattattgttgttattcataagtaattcttctttcttaatgacttgagtcaaatcctaatggctttccttaaaaaacaacgtttgaggccggtgcggtggctcacgcctttaatcccagcactttgggaggctgaggagggcagattgcctgagctcaggagttcaagaccagtctgggcaacatggtgaaccgcgtctccaccaaaaatacaaaaaattagccagacgtggtgtgcgctcctgtagtcccagctatttgggaggctgaggcacgagaattgcttgaacccggaggcagaggttgcaatgagcagatatcacaccactgccctccagcctgggcaacagagcaacacttctgtctccagaaaaaaagaaaagaaaagaaaagaaaacactgaatattgcagagagaaatactgctgaactaggagatctcataaacttcaactattcagtgtatcaactagtcttgaatggcataagcttctgagacagacagaactggatttgaatggtacttgcacccacgtgaccatgagtctgtgccttaaccttcctaagcctcagcttcctacctctacaatgggagcagttagagagtgaccacctaaagacttgtggcaagggtaagtgggataatccctgtatagcatttcacaaagaatctgctacattaaatattaaatacatgttcaccattattattctgtttccttgcttggacaaaacattgattcaacaactatttactgcatcctactgtgtgctagatggttacaaaaattgacatggtctgtgctcttatgaggtttacaccccaaaggggaaaagtttacattgaataaacatacacaaatacacatatttaattatatatataaattatatagtataataagtacacttttatgtttattatatgttatagtaaacatacaccaaaaattaattatatgtatataattataaactttgacaagtgttataaaggaaaagaacagggcgaaataactgaggtttgtcaatgggaatattaggtcacacttttcagatttttctactgtacccaatataacacaaaaatggtatatcccaccaataatcacccagagtacaaacgaatgttttgagtatacaccttctagtcattccacaaaggattcaaaacaactgcagggccttccttttaggcaaaactataacaatgttccattcttttcaactcagatggaacacaggctaagtttacgtttatagcggacatgcaaattgaatactcaagtgatagaaaagaaaaaaaaaggtagaaatgagacagtccaccctgaaagccataccttcaaggaccccacatgttttgttactgtgtcactttatgaatcaccaatatcttaagaatcatataatcctggaatacagcggcagctttaccacgttcccaggtgaataaaatgataactccatgttctgatgattcaaagtggttccatctgagcagaccaagaaagacccggcagcataacaccaggtgactcccaggtttaaagatttatctgaatttgttctacagccctactgggagaggttccctgtacttcttcctccagtttgcctaatggtagaagatggccaaatgtaattacatttacattttattatgaagtcagtgagtcactaaaagtcgatgctagaaggtacgttttatagtttttcattatgttttgtgtgcttcattgcctttagggtcatatttttgttgggggaggagttataagtaaggaattcttattttgcagaggacatacctttttgtcagggtgtttgtttttacctcctcaggaccactctcaccctggattatgtgaattcccctatttaactgtgttccatcattcttggtaaggaataaagatttagactttcaagacagaaggtacagaactgttcatacccaataaacactcgacacaaaccatacaaaaatgattgaccaaaaaatgaaaaatcttatgggtccgagaggattcagtagaagttctgaaaatatgtaaaatcatacttttcctttttttttttctatgctacattttaaattacattcttcaagtcatattttgggtgtcggttccacttgctctgatacacgctatttcacttcaatgaagtaaatgatgccaaccctgagggaagacctcttcttattctgcccagcatctgggactttgaaaccagcccagaactccaacaggaaaccccagtccagaaaacaaataataaagagaatccaagctcccattttactcctaacaaggcattttgttaattttaactattctagtccataagagaagtagattagaataatggaaacgctagttggtttttcccccaaagtgagaacagagaaaactagtctacatattaaccccacttattcaaactccccaagatatgtctagctctgcagctgccatttatggtgtgctccaaccacatgcaggcattgcactccagggcaccttcaattagttagtccttatgatgacacagtaagagggatttttttaaatttcaacttctcagatggggaaccaaggctcagtatggcaaaataacttatgaaagggccagacagctaaaaaataactgaactaagatttgaacacatagcctagcactagagcctgtgtctgtaaccactacactccattagacaaacactggtctccattttaggtaacagaataacatcacgtgcatagctcatttaatctcacaggagctctctgtggagtatactattatttaacagaggaagataaaaagagatgcaactggatggaataatttacctaggtacatacagctaggaaatggcagaactaggattttaagtgagaccctaaattgtgggtcagcaaacattctccagtactatggcccaatatgctcccctgaaatacactccacctttgggctggtagataggatcgatgtgaaaaaaaatgaaggaactgagaggaagaaacaaaaatttccaacattagatcttattcagaagtggctcccctcatgtcatatgtccttcctctaagcattgtcaaaatattgtcccaaaattttgtgtatagccttctcacaagtaacaaagtggcaggaaaaaccacctataacccaaggacctgttctacaatgaaatggcagagtcatagatacaactgatgtataactgcccgccacctccccgccaccacccgcaaatgaaagaaagagaacaaaaggaaaccaaatcaaatgtccaacagaaggaacatagttaaccaaattatggtttaaactggtgatcctcaattgggagttagaagggggttgatattaggagctgtgtgggagcatttttggttgtcacaacgacctgggaggcatcctgcaaaataaataccctgcaagctatgacacacacaaaaagaactgttacatctctaatagtgatgacgtcctcatggagaaagacagtaattaattatgaagccctacatgggtgggacatgtcacctgaaagatactgaacatgccctggcacagagtaggcacctaataatatctgtgtaatgactggatgatctattacaccgttcataaaagataatatggcaatatgaaaatagttacgttaggaaaagaaagtaggataaaaagttataagcacaagataattgcaactatatatttatttaaattccaaaaaagactagaaggaaatacacttagatgttttattgtttcacaatagcacgagaattagtggcttttctctctgtggcttaagcatagtataattgatcatgaaacagtaaaaaacctaaaccacatttaactggccaaaagaggactagaaaagaagagtagagtgcaaccactcctgaataaatgtgatcaagagaaaagaacaagaaggtttttgaagaaagataaattatgactgtcacctgggtatttctagacagatttctgaccctcatctccaaattctgagtaccctagttcaggggtccccagtccccgggccacagactggtttccgtggcctgttagaagccaggctgcacagcaggaggtcagcgtcaggcaagcaagtgaagcttcatctgtgtttacagccgctgcccacagctcacatcaccacctgagctctgcctcctgtcacataagcagtggcattagcttctcatagaagcgtaaaccctattgtgaactgcacatgtgagggatcaaagttgtgcactccttatgagaatctaatgcctgatgatctgtcactgtctcccatcaaccccagatgggaccatctagttgcaggaaaacaagctcagggctcccactgattctatattatggtgagttgtataattacttcattatataatacaaggtaataataatgaaaataaagtgcagaataaatgttatgtgcttgaatcatcctgaaaccatcccctcctctggtccatggaaaaaccgtctcccatgattctggtccctggtgccaacaaggctggagaactgctgtagtttacaggccctgcccactgaagccttcctcatggagtttcccatctctgttatgcacactgccatccgctgtgtcaggcaagctcaagtctgaagtcatgattttctcttctccatcctatggctcccacctgcaggcagccctcacatcctctcagccctcactacaattcctattccatctcaccttcccccctgcttctatttccaatgccatcccccaacccaagaccctccctctctcctggatgctaaccccatgccgtcctataatttcctatcatgtgcaaggaacacccaagcatttttattaagcaggctaagatgctcaaactccacgattaaaatgctcagtggaagaaggagcaactataattttttaagaagtaatgattagcacagaaaatacgtttggtctcaaatattcccaccaaaatatacctccatggcaatcggggaaagggagagggtggtaaatgtcaacccatgagaaaggaagggtctggaggcacaaatcaaaggggacctaagtaggcaggaagtatcactgaaaaccttcaaaatcttgcattatacaacagcattaatttggccatttaaaatgtaaaaatgggccaggcgcagtgactcacgcctgtaatcccagcactttgggagggtgaggtgggcagatcacttgaggtcaggagttcgagaccagcctggccaacatggtgaaactccatctctactaataatacaaaaattagctggtgtggtgctgtgcacctgtaatcccagctactcaggaggctgaagtaggagaatcgattgaacccgggaggcggaggttgcagtgagctgagattgtgccactgcactctagcctgggagaaagaacaagactccacctcaaaaaataaaaataaaaataaaatataaaaatgatgtattttcctactaaactcttcaagggaaaaaaaaaaaaaaaacctcttcatggagatccaccagaataaattattctatgatttggggatacctttaccacgtcaatggggtgctaatggtatacacattctggtatgaaatgcacaagtctacatgacaaagtagaacacaacctcaagaaagcagattatccgatagcattcaaagtgaaacatcactagtgtgttaagtgactcttcaactagatatgtcagtaaatggtccacacaatggaaatgactgaaagtggttttctcccaatcaggttataatccatgagggaatctttatggatgtgttgtgtttatagtggatgaaaggaattaatttagaaagaaatctatctcatattttcttttttaaatataaattcatcaagttcttttttttttttttgttttgtttttgagcaatggttaaaccaaactagtctgagccataatttggttaactattttccttctgttggatatttcttctggtttcctttcattctctttctttctttcatttgatggtggatggagaggtggtgtgcagttacacatcagttatgtctacgactgccatttcattgcagaatgagtcctcgggttatgggtaaaatttcatgccattttgttattgcaatggcgcgatctcagctcactgcaacctccacctcccaggttcaagcgattctccggcctcagcctcctgaggagctgggattacaggcacccgccatcatgcccagctaatttttttttttttttttttgtatttttgtacagatggggtttcaccttgttggccaggctggtctcaaactcctggcgtcacgtgatctgcccaccttggcctcccaaagtgctgggattacaggtgtgagccactgcgccgggccgcattgatggttttctttaatgtgtttgttcttaaattatgtttcctgtcctttggtcttatttgcagcttaataataactgattaggtctatgacattccccaagaaccttaagctttaataatctgtttcattaagaaattactcatctgaaggaaacttattgacatttatctcattctccctcttgctcttgttaagagacacctttggttttcagagacaaataagaaaaggtgagggcctttatgtatcaccagagccttgagctagtgttgcagatacagctttcttcctgcctggctggtttccgccatctttctttctgtagcaacaggtgcacaatgaggtgtgacacagcgccccccagaagatccaccaaaagcagcacacaatgctgcaggcctcccaaccacctagcaagtagaaaagttcaaggtgctggaagtgtcccattctaggcagatgctcaaattctgaacacttaaatccctttgcatttccatagaattctttcatctccatgtagggctccaatgagcctccagaaactgtaaaactctcgtaatcaaatgcaattgaagcatcataaaatgaaaagtctgggaattatgtgtaggttgccatgacttaactcattgttctcatttccttaataaaatatatttttaaatagctctctattatttatagcaaaaagtaaaaatataaaatttttgattcaaataattacataggtaagctcgacaaaagcaattctgaactgtataaaaccatacaacatagagttagcaaacatttctaacccttgatttctatttctcttatgatgttgagccttgcattcataatgctagattgaatattagtgctacatccaactaaggtaaccatgacacctacaaaatacacacaagcaatgcacatgactgaaatcctgtcagattattcaagtgacaatggaaaagaatattacaaggtaatttctaatattgaagatttgtatgcatacatgaagtaccaactgaaatagatcttcagaatgaaatttcctaaaatgattaaagtaaaatgtgaaacctcacagtttatacaagacaagaaacatttggctgcaaatcgttttataattttgctaattaaaaattatcccattttcactttggattcattataacagaaacaggaataaccttaccatgccagaaacacaagcaaatggttaaagttctactctcaaaaaaatctttaaaagttggcaaaacattcattaggctacaaatcaaaacccgtctgtccttgacatctctttaatgtcttccagattccacatcttcttttttaatcactcgctgaatcactcaaaaattaaaatatgttaaaataccacctatcttggacctctagaaaagtcctctgatagaatacaaccttcagccccctacataagccatggatccgtaataccaccatctgatttatgtaaagtattcattatatttcacaatgagaaaaaaatattcccaggatcatgcctgcatcaataaatctgctacatgtgaagaatatgaataaatactaaaaaggggccaccatgaactctctcttgtgaagtttgccaagtagaaatgggtacaactatgagtaaaaataaaaatcattttcaagcttccaaggtgttaccaacaaaatatgcttaaaaaaagaagaatgagagtggcaaggaggttgactgatgaacaagtatttctctgcaaagctaatgaaggcaatgtttacagcctgcacttatttatttatgcttctcttccctgagccctccatgcgccatgggagtcagtatgcattaatggcactgaaaaccagagaaccttccaactgcaagttacagtagtcactgtgtcagtggaaacaatgaatcacagacattcaacctgggatgagttgtggcagcaccttacatgtgtcaccaatgtgtcgtgtgacatggctgttgccatggtgaggcaccatgttcaggaaatgtgttaagtctcatagaaggcacccagccatccctcaagatacccatgcccagtaacattgtgattggcttcctctctgagaatcttgttgaaaggagggggggagggaaagtcacttggagaaagctgaaagaaaatgaagtacaccatccccagtgttgtgtgtgtgggctctggcacattgagaatagcagtatctttaactcaaaattagcttgaatagtttcaatggaataaaagcagactatcccaaaagggggagggggtaacttttacgtcacttgcacaatttatatgcattaaaacaaaggatagggctgggcgtggtggtcacacctgtaatcccagcactctgggactggggagttaccacctttacttctacacagttacctggcttaaaatgaagaaaagcctattccagcatactaaagtttcaagagacaatttataattctttatgtgccagcttctcagatttagaatttaggaagtaggttaagaacagtcactgtttcgtttccaaatgatggagataggtttgtcaaaaagaagtacccttaagtgaattatatctaaatgtggacacatcaataaaatatatctctatgactattggggcaggtggatcacctgaggtcaggagttcaagaccatcctgaccaacatgttgaaactccgtctctactaaaaatacaaaaattagccaggcgtggtggcggacgcctgtaatcccagctactcaggaggctgaggcaggagaatcacttgaacccaggaggtggaggctgcaatgagctgagatcacaccattgtgctccagcctcggaaacaagagcaaaacatcatctcaaaaaaaaaaaaaagaaaagaaaagaaaagaaaaaaaaagataaagcaaaagaccataaactacatcatttcttgggtagacagaacagaaaaattataaggattaaggacacatgaacaactaatcttggttatgtttaccaaaaaatcctcctcttgagcttttctaaccgaagtctccaactttaccctaccactgctttcatcatctggaaatagaaataaaaacagaaacaggctgggtacggtggctcacgcctgtaatcccagcactttgggaggattaggcaggcagatcacgaggtcaggagttcgacaccagcctgaccaacatggggaaaccctgtctctactaaaaatacaaaaattagctgggcgtggtgccacgcacctgtaatcccagctactcaggaggctaacgcagaagaattggttgaccccgggaggcagagtaagagaagatcgcgccactgcactctagcctgggtgacaaagcaagactctgtctcaagaaaacaaacaaacaaacaaacaaaaaaccccaaaactaaacaggaacagactcgtgatcatgaagcttaaatgatctactgcaaccaaaggactgagccgagtgtctggcacacagtatgctgctactgcaggtactagaactggaattaccacctttacttctacacagttacctggcttgaaatgaagaaaagcctattccagcatactaaagtttcaagagacaatttataattctttatgtgccagcttctcagatttcgaatttaggaagtaggttaagaacagtcacaatgtttcgttcccaaatgatggagatagttttgtcaaaaagaagtgcccttaagtgaattatatctaaatgtggacacatcaataaaacatatctctatgactattggtgctgtgggaaacaatgcacatggtcacagggcactcaaaattgaagcaaaagacgaacagctgaaggagcaagagatttttagcctggagtgggctcaagaagatctgctaactctcctcaaatctttcatagcttgtcaagtagaagagatgggttttctagaatcccaaggtaccaaaccagagtgggaagcccatgcatggtagatttgagtccagtgtaagaaagaacttcctagccctaacagctggccacacatatatcggtctttcccaaggatagaaattcaccatctctcaggttgttcaaatgcagtgtggatgttcatgtagtggtaattaggcctcaaacactgaggcacaaggtataaggaagggcaggcaatatccttcattctttttttgagcacagaatgtctgtctttgaatgtgcatgacatatatcactacaatacattgatagatacacatacatatatatacaaaaaagttcacatcctagagaaatgagggcaactttgctgtaatgatcacaaaccaaatattttgcttaggacaaactttggggctaacagctggctgtaatttacaaaaatttaccatgtgctaactcttttctaatgctttatgtgtgttaactcatttaaatcccacgatcacctatgagttaggtactattattttaaaggtgaggaaactgaggcacagagagatatgacctacccaagattatactgttggtaggtggcagaaccaggattaaagcccaaattgtctggccaacatcctgtatgcttattaccacatgtagatgttcactacatatcaaaggttctacatcttaacttggatcctggaatgcatttatttttcacttaacaaaaaagataatttacaaagctttcagcacaagcctatctttgttgtctcctctctcccacttcctaccttttttattacaaaggacatttatgtgaaatcatgatatttgcatcttagtcagtcgtcttttctgaatgtttattccccaaccccaaaaacaatactttggttcataaattctgacttggtgacaatcagaaactttttctctttcatattcaagtcagttttatcatgatacttgataaagaaatattcctctagattattcttacctttcttgagaaacacccatttcatttctacttcttggtggggcttccaccatcccttactctaaaggcgccttgagaataatgcccacaaaccttcttcgcacaccttttctcactcgatgctattttctacctaggcctccgttttatgaaaacgccccactccacaaattcactcttccccatgtttcccctgccctgacttcctccacctgtttacgacacaaaagatttaaatctccagcaaagagaggagggaggatttgcagcatcttctctccagagtgttcacatgcacatctgatcactcttgtcctccagagatttcttcagacgcaatcagctgacacgcacatgtcgcctgctgtcttccctcatgataaattaaggaacatttagaagaaaagttcctacttctaatccttcaataccacctctaagggctttgctgcacccaggtaccacttgcacagtaatctttatagttttccttaagcttctcacatttttattaatgtcataattagcaatatcatctgagaagccagacttgaagtgctaagtttattttttgctacaaattaatatataacactattaaaaataatacataacctttttttttttttttttttgagacggagtcttgctcagtcgcccaggctggagtacaatggtgaggtctcagctcactgcaacctcggcctcctgggttcaagcaattctccggcctcagcagtaacagggattacagttagggtaactgggattaccaagtaactgggattacagctgtgcgccaccatgcccagctgattttttatttttagtagagacggggtttcaccatgttgaccaggctggtctggaactcctgacctcaggtgatccaaccaccttggcctaccaaagtgctgggattacaggcgtctgccaccacacctggcctaataatacataactttaaaatttttttttaaattttctgtcttgcagaaaattcaccttaaattcctccactagtgagatatacaacacattttaataacactggttaggaagagactatagttcttatgtcacttttttttttttttagaccaacgtctggctctgtcacccaggcttgatgcagtgtagtggcatgatctcagctcatggcaacctccacctccaggattcaaactatcccccccacctcagcctcccatgtagctgggactacaggtgcaagctaccacatccggctaattttttttcttattttttgtagagatggggtctcactatgttgcccaggctgatctcgaactcctgagctcaagcaatccacccatctggtctcccaaagtgctgggattacaggtgtgagccaccacgcccagccttacgtcacttttcaaagtctacttttcttctttgacttgtcttcccttttcatttcactcttcaccttgaacctcatttttacatctagatatatttttgtcttttattaagtaaaggaaggacctcactaaattgtactctaaatcaataattatgcagaacagcctgtctcaagataagcattaaataaaaactgatgacattattatttcatcagaaaccgaagagcaagtgagcgagcagaaacaccagagagcgggaacaaagggccggtcctcgccactacttcccaatcttcttccagactggggcttggcaaactataggcgcgtgggccacatccaacctgccaccagtgagctagtttttactcttaaagggctgggggaaaatgaaaatcctactactacttagtgacacatgaaaatcatgtgaaattctaatttcggcgtctgtaaataaattgtactggaacacagccacaccccttcatttacataccatccatggctgcttagaggggacaaaggtaaatagttgtaacagaccaggtggcttgcaaagcctaaaatgtttactatctggctctttacagaaaagattcgctgatccctgttacaggcagaaattagactgagcctcccaccatcacacacatacacgaacttttttttaattacaaaagttttcctaaaaacacagtagtaaaaaaaaataaaaataaataaaaatttgaaaaaagaacagaaggaacctacctccatattaggaccaccattaaaagctcatttttttgtaaccggggcaacgactagaagcacagacacccacctattggcctcattatccaccagctcgaattttggttcccctaatttctcatgcaattctgcagaatattaaccatcctaagagtaaactaccctgatacctttttaaagcagcaacattattaacaattaaaaagctgccaccacacatacacaataactttcttatattttaatatgcatatccatagtctgattataacagcgtggagagattgacaggaaatgactgagtgtaatggctccaaaggagacagtacattgatcagtaaataatacacgtcccttgaaactgtctaactgcatatttacacttgtcaactctcatacactttgatgacagaattctttttcaaacatctaagtaaaaactctaatacttatttttaaaatgcttttaataatcacaaaaagcatacttcaaggatatgtaaggtttaaatttcacccaccaaatagtgccacctggagcattcattgctacatcctcaatattcttggttttatcaggaaattggcaaagtctcaaaaaggttcaaatacagttacaagcagcatatatctaacatttgcaaggtgtcaagcactgtattaaggacttttcacagccaatagtgtggatgacaccactgtccccatttggcagaagagaaaactgaggcttggaaggagttgtgacatggtcggggttacggtattattgagtcctggggccaggacctgaggctatccactcaacttcagagaccacactctccctaaccagtctaagggcctgtgtctcagtgtgggcccgaaagtctgtatttaatgcgcttcccaggcagtgctgagatgacactttgaaaaacacaaaacgtggaggtaaagaagaaaatctgatgggccctaaattcaggtctcctctacagccctccaaacactgcccgtaggaagattacagataaaaatctataacacacgtattatagcccttggcatgtcatacatactcaactatgacaactgccatcattttataagttacttggggactgctggtatgtcaggttaaagacattgtatctgtattgtccagtaaattactcctggacaaaatgggctgatgaggtcagcatctccttgccctaagaccccatatcaattaaattatactggcagctgagggccagcaggtgttgggtagaggacaggggtgcagaggcctggttctatcctgcctgtgattggtttatcaacgactagattagacagtgagctagataagcctctcatctccccaatatcccttttatacaataaaagtggtcaaaaatatttaaaagtagagaaaatagtaaacccccttatatccatcacctagattctagatttatcaagcttctgccccaacattttttcttattttctgaagattcataaaggaacttgcaactgacatgtcatttcactcttagataattcaatatgcaactttttaaaacagggagaaaaaagttccctgaataataactgaggctggaagcgatggctcacgcctgtaatcccagcactttgggaggccaaggcgggcagatcacctgaggtcaggagttcaagaccagcctggccaacatggtgaaaccccatctctactaaaaatacaaaaattagccaggtgtgatggcgtgtacctttaatcccagctactagggaggctgaggcaggagaatcgcttgaacctgggaggcagaggttgcagtgagccaagatcataccacataccactccactccagcttagacaacaaagagactccatcaaaaaaaaaaaaaaaagaaccacagaaataatgcagtgttgaatccagtggcatgactctggggagatttttttcaactgaggaaaaagccaggaggtgaggaatattttggagaaaatttttggaggaagccattcccttttacattgctgcctctataaaaatcttgcagatgaagctgctgttttaaataagtcagattccacctctttcacaaagacaagtataaactacaaaatcttctctgcctaaatcaaaaagaccttaaagaaccacggaatctattcaaagatgaggaagtagcatgtcctcatggttaagacaaaggttttgaaattggcccaacttggaataaaacccacttctcactcttgctatgcaattctgagcaggtgacttatgcactaaccttctctcttctcaacattaaaaccagaataatacctagaacacagagatgttgttaaggttcaataagataagcaaggtgatacttgaaccaacataggaaaagtaagtgcctgatgaatagctctctaattatttgttataaatattactaaaatctgatcgaatacagaaggaataaaaagattttatctcatgagcctattccaatccattggatggtgctacatagaatatctgtagggaaaaatccaaaagccaccatcagaacaggcctgctgtttcgggggcctgctgattttgtcacccttaatcaaagtcaaccgtatcatcctattattacgggccaagagggtaacaattcacgtgttcaccacagtcactcttccgcactctgcttttcatgaccaaaagaaataataatatgcaacatattgaaataaaattaaaatgtacattagctaaatgatagcttatatgtactaattgcttacttttcttgaagacagaataaaatgacggcaattctcaacaggcagctcagcagcctgcatataaactgaatggaaatttccttctctttgcttctgtgcattacttgaaccaacttaacagaaaacagaatattttcaaaaacaacatgcaatggagtttaagttcctagaattttacatcacggaagatatcatttgaaatataatagctaaatgccttcctccctggtacagcttgctttggtgtattgataagaagtaagattaatatgcaaaaggaaaatgtaagaaacttgccctgcaccggtcagcacccggcatgtatgtgcctctccctatgagaaagcaactgcacccagagagtgaaagtctgggtttggctctcacatcaccacttccttgctatgttagagcctcagttgatacacaggtaaaaagagagcgacatagactcattctcgtcttttccaaagttacgcaaattgaaaaaaaaaacactacaaaactataatatttcacagacataacacaaaaaccagttgaagggtagaaaataaactacctaacaagtcaatgtggtgcacacatattgcccaggctggtctcaaactcccggcctcaagcaatcctcccaccttggcttcccagtgttgggattacgggcatgagccacagcacccagcccagattctttcattaatatgtgaaatatggactgtttaaaaactgtctgccagatattagggtaagtactgggtatacaaaggcaaactgcaaagatcgctcaaaagccccggccttataccttatacactgcattgtaaatgtaaatggtgactctgtaagcctgcctacaagaatttaggtggaataattctgaggccacatctacactcagtaaaggaaagaatatgaccaattcaatgatgtctgccaaggcacaggatgggcacagaaaaggggaactataaaatcgaaagtgtgtcaagaatgtttgccacctctaatttagccaaaaggtttgatgttttgtgtaggtatcatgtgaacgaaagtctgcccaatacattaaaagtttatggtgaatttgtatgtccagaaaaatgtgtgtataatcccgtaaggggcttagagaggaatggaaaatacatgcaatataaatgcagattacctttattacaaagttggatcatattctcattcctagactaatttcctatatcataaaacctatattcaattttataaatagcatacaccaagaatcataaattcagttaatgcagaaatttaacagatttttttttaataaaagtgagaaaaggctgttttagagcaaatatctgaaaggacagaaagggttctttctttgaagatatgtttttccctttgactctacctccttagggacctaaccagagaagaaataaatttcacagctaatatatatgaagtaacatgtttaacattatccaatgaatttatatctatctacactatataaatttatctcacataaactgtcacctccaatagaattcattaaaacaatgttacagcttctgaattaaatgcaatcttctaattggaatttaatcttaaaataggagttggggggtttattttttaattgacaaatggaataattcattagtttgtcttacagttctgtctgaagaacttaaaagtaaatttgacacagggatgggctggctactgctgtgtggtactagggaactggggtgggggtgtggaggttctttcatcagctgctgaacacctcctgctgcttatgggcaggaagggatggacactgtctctcaccatcctgaattactacattactaatatattccattacctccacgtaaatgtcatgttaatttctgatcttcatcaagccagacaatggtttccaccttggcccctagccagttagctatgtggaaaatatttagccaattacattacttgtattgggttaggaactggagagaaaggcaaaataaacgcatcgaaaatacttcacagataaaatgtaagttgacactgtcttcgcatgcgggagcccgagtgatacaatctgataggcagctgccagcactcataactgcttattaaatctagcctctctttatggtgtgagtgaagatctgtatttttaccaatattaggttcattgtgttatgaaagagaccaaaatacttaagatcattcgctccagcttataaaacatattatgtagtttattaaattgttaaaattacttttcaaagtcaaaattccagagactggaagtttaagcacaacaccgtgggctggccccctgacaggctgcagcacatggcagaccagaaaggaaccctgtcggctggctctcctggcccaaggtacctgccagctgcacataccttctggaagctgcgccaccaccgccccaccccaaaaccggtcacggaaagtccatattctcgagttttattttaaaaagaaaggaactcccagccaaaaaagtagcccttcaccaagtcttcggtgagaaggatgcatttcccttgtttttgtctcttcctagtaagtcaaaaggtagcaatttgattatgagagacatcaaaagaggaaggctgggcaaataagggaaaacagttgtaagcaaataacacataacaatgaatgttgcgtgacgcttatgtcttttcaccagatctaccagcaagggacaacctagtggtagagacgatgcaatgacagagcagagacagacgaacaaaccaacacattcgccatctctagtcagcccttctcaaaacaactctatgcaaatgcaaattgctatgatcacatttattaataacactgtggctaactgccgattaaatatgcagcaggcattgccagccttcactctggaagtcctgtgatgtgcatcctataggtaccagtgtcaactaaagcttcacaccaggaaacaggagccaactctgactccttcctggtgaacggtggcattaaataaccacagcacaaagagagatacgaagtgctcagcccttctttcgctgtctcctgcctctaagttaatttattatgcaagcatggttaccgccggcatcaatcgagtacattacccgtcttctgaccttaaaaagttggccataatgatctatctgtgcaaaccttttatttcatggtttcgtttccttgtgtttgagtgaagcaatctgttgttctggatgcctacctctgtaactctgaccctggtctaccaggaggacacttaccatgaaacacttcactcagaattagagtttatttcaagcctaaagactccaaattgtcagctgtaacaattaattggtgcttcttttggttgttcaataaactgtaaagttctaaaaggcacaggactgtgaataaatgtttgacaatggaatgactaactatcagatgcataatgcacggaaggccagtcactgcagcacagaggaagagagtgagtcctttgagcaagccttggaaatgcaccttgagaaaaaaatggggccaggcacagtgcctcacacctgtaatcctagaactttgggaggctcaggtggacagatcacctgaggtcaggagttcgagaccagcctggccaacataattaaaccctgtctctactaaaagatacaaaaattagctgggtgtggtggtgggcacctgcaatcccagctaattgggaggctgagggaggagaatcacttgaacccaggaagtggaggttgcagtgagctgagattgtgccattgcattccagcctgggtgacaagagcaaaactctgtcttaaaaaaaaaaaatgggaggagaatagaaaatcagaacatatggtccagctcacaggatttcaggcacctctaccttctactaaaaatactgagaagggaagttttttaaagtctgataaatactaagaactgccttatttacaaaaattctagtattccactaggcctaaaagaacatttttttcaaaacagatatcattttcattatagttcttcagatggatttttcaaataatgggccaaatccaattgaaattaatgaataaaatgagcctcatcttcaacaaatccattcatgtggttttgttaaatttcatatatcaattttgtaatagtgagattgagtcagactctctcaataccaaagacagagatgacaggtaaccaaaaacctgagtttgttgttatttcaataccttcagaattctaacccctttgatgaattctcatgtgtatatgaaacagaccgaggctttgttctcaactctacctgaattcctaaagatatgactttttttattattattattattttgagacggagtctcactttctcaaccaggctggagtgcagtggcacgatctcagctcactgcaacctccacctcctgggttcaaggaattctcctgtctcagcctctcaagtagctgggagtacaggcacccaccaccacgcccagctaacttttgtatttttgggagggatgaggttgcaccatattggtcaggctggtcttgaactcctgaccttaggtgacctacccacctcggcctcccaaagtgctgtgatgacaggcgtgagccaccatgcccagccaagatacgacttttcttagcatgtgctgcctgttcactaatctacagaccatccacaaaagtctatcatacatgcatagcaatggaaaacctcaggagttcacgggtgagagaaccgaacaacttgcccaaggccacccagtaaaaagatcaaagatcactaacagctctaaaatttcatgactccattaaccatttcttttcattgtggacatccttgcccgtgtgttactgtttactatttgccttatttcttgccactgacagaagtaatactgtagggaagacaggaggctggattttttttttctctctctctagctccagcagaaccaaatgcaaagtacaagttatcagttaacaaactgtggcaggaagtgccttttcgagccaatagctctttgaaaatcatctggtctctaatatttgagccggttgcttcactatgaacacagtttctctggacaataaaactaaagtattttttaatgtatacaaggggaaggatttgtcaaaatgacctctagctataaaatcttcacaaatctggcccaagtaattgaatgcataacactgtcttagacatatcatcagaggaggcttaaaaagctaaatgggcaggatgtcttaatctctgtaattgaaataagctagaaagaaccactgaatgatgaccaaatagctatggtccagcccagaccaaccccagggacttagccatcccacctagactcatgacttaagctgtcccatttgtaaactgaggtatttaaatagataatttccagggcctcaataacactgataggataggatcctctaacctacatgctttgttttagatatagaaaatcaagccaggcacagtggctcacacctgtaatcccagcactttaggaggctgagacgggcggatcacctgaggtcaggagtttgagaccagcctggccaatgtggtgaaaccctgtctctcctaaaagtacaaaaattagccaggcatggtggcgggcgcctgtaatctcagctacttgggaggccgaggcagaaaaattgcttgaacctgggaggcggaggttgcagtgagccgagatcgcgccactgcactccagcctggaacaattgggaaactccgtctccaaaaaaaaaaaagaaaaaaaatcaaagagagagcctaatttgccccatgccaggttactattaagcctcccaactcccaatacagtgccctttctgcttcactacacttctctccattatttagaatttgcttccaatactactgcactaagacagaaaaagatgagggtcttaccaattaaatgctattcaatacaaaccctgaaatgataaggttctccatgaaactgacctcatccaatggcaaggctaccacaaatgatgtcagagttgtcacccaaaatgcctggcctcaaccaatcattgtctctgctaatgacaagtcacagtgttcattactacaggggagtcattgattgctgaggaacaggatggatggaaaacacacttagagaaaaatatcatcatgtcctttctaacctccccctaaaaagtcaatgaataacctaatgaggtaaattatgatacaaaaaaatttccagaagtctttcaaaaaatctttgaaaatcccaagtttccaatcctttggctttctcataagtcctgatcatacaaaaagtttgggataggactctctcaaggaacaaattagactcaaatttcccctaaaactcaagatgaaaaaattgttgtcttatttcttggtggctcatgttatcaccaagttgtaatgggaccaaaaaaacaattactcattcaacgttgcacatggaccaaaactgagatagtccatccttcagagtatgattaaaacaaacaagccaacagaggaagttatcctatgtcctattatgccttttataaatcctcagatcaccgcaggaattatctgaaaagattacaccagaaaacaatgacagagtttgtcccttctttcaagataagaatctctcatcctgggtgggcaactgtcttgaaggactttttgtcttgtgaattttcagatgaataatcacaaacattcattcactcacccttttggctagcaggcatcacatccatccgttcatggctgacagcaaatcagagaagggatcgaagccctcaccattgccgaaatgttttgttcggaaactggaattgtcaacaaaagcttctgggacactgcaacacaaaaatattttttacacataactaagatgtaacttctaaaaccaccacttccttacacttgaaaacagcaagacatagattcttgaggtaggggaaaacaccgttcaagccagggtatgtcaatacatcaagtgtgatgctgttaaatatgaaccggaaatactgttttgaaagatacatttactaatcacttcaacacgtacactgtaaagttgttatttattatgggctttgtaccaaatattttaaatattttagcatatgaaaataccacttcccattatcaagtcttcaggtaacaataaactgttttaactaaaatattacacagataaatgtaccattccctattaagttatgatctttttcgaagaacaaaaaaagtaaaaaatttaaataattttaaattattttagaaatactagtactaataacgaacattaaaactagtaggaaaggtaatcatcatttttttctccaaaataattctattttattctaaaaatgattatggattacataaggagcaatactcatggagatgtttccatcaagaaagcacatacggtgcgatggtcagggctcaaaagctgagaagcctgagttctggacccggtatggtcttcagtcactagtgtggccccaggagagccatttatcatctcgattccagtctcttcacctgtagggtcagggcattaaccgatgctcttcaagttccttctacctctaagcttctgtctttttgaaagaagcatatttcttctaaatactttaaactaattaacttctcctttaagcttcctgattaaaaagagatttttggtttttgttttgtttttaccatgattcactctcatgctgacctgccatcaacactgaagatgtgctgtgaccagagagtttttcaagcgcttagaatgctaagcctggcaccagtacctaaccctattgagccagcatcccggcggctggcagcatcccctgggtgcccaggaaaggcttccattcctctccaatgagcatagctccatgtcctgcagaaatctgtccagatgtattctagattgatgcttctcaaacttctgtgcataagcatcttttggagagcatttcaaaatacagattcctgggacccatccccgaagactctgattcactagatctggagtgggcctgagattctgcatttctagaaaactaccaggagatgctgatactaccaatcatggaccacacttcgagtcaaatggcaaagtcctattctccaagcctccaagcagctttgagatccaagaagtacttccaaggctcagacatgctccctaaagccatgaagtctatgtcacatagaaaaaaaaaaaaagaaaagaaaaaagaaaaagaaaagaaatgaagaaatgggctgaagttgtttaccatctttaggataaaatttgaatttctttccatggcctgagggccctacataatctggccactttctacttctctgacgctgccttaactaccaacccaatcccaaactataatcaatgtagatacagtggtcctccttttgtttcaagcaaggcaagtgtcttcccatctcagggctggtgcacttgctatctcagcttcccaagatgccatgagcccattctttacacaactggtcccttctcagtactgggacttagggacaaaggccacttcaaaaagcttgtcctgcccacctacttaagttaggttccaagttagtctcaattatatcatcctatgtgcttacttcagagctttcgccctgatctatttgctcatttgtcttccccactagaatataagctcaattagataaaagaactatttcttttcatcgcaatgctccaaaatttcagaaaaatgcccagctcatagcaagtactcaatatgtatcttttgagtgaataaatgaatcaacaactgaaagaagtaacttttcggtactctctaaaaatataattgccatttgttgaaaactcattatgtactgggtattgttttaagtcttttataatcattatttcattctattcttacaacaaagttcttagcagatattattattttaaactcaatatgtggataagaaaactgaggcacagggagttttagcagcctgactcaactctataaagcttgtgcccatgggaactctatattttccagccaataccctaatataaaagtcctgagtttttgtgatatacccttctgactcaggcttgctcaagtgaattttggcactacctgaccatgctggtactaacaatcatgggccacattttgtaacaggcaggtaatgcaaatgagcgaggaaggccaggtgtaaggtaacagggagagggaaggaatgtggcaagctgagaaatcctcactttatcagcttcaagggggaagccattgtacttccccctccaattactgccacatgggcacataccctcaagaacctcaagagctttcaattctacaaataaaggcagtaatctagatttctatttagtaaaattccagaatttttcaaagatggcagctaactttttaaataagttatatttaaacaaaacaaacatgttgcaatccctgtagcaaaggatggatgaggtcatgcactgtctccagttttatgattccagagtgattcagaagcacagagaagcagtacgggtgacacagaaaagcacagtaggtgtctgggcagataagagctttctagaagaattcattatcttgaggttttgggaggaattggaagattgggtggaaaacgcatttcacaggtcagaatatcatactcgaaggcttgggggtgaggagtaggcaagtcaacagcaaagatcagccatgaggagagggctggtggaggtttcctgtgggagtttcgttttcattcggactggagtgagtagcagctttctagctaagacataaatcggttaaacaatactctatgtggccggccacagtggctcacgcctgtaatcccagcactttgggaggccgaggcgggcggatcacgaggtcaggagatcaagaccacactggccaacatggtgaaaatccctctctactaaaaatacaaaaattagctgggtatggtgacgccagctactagggaggctgaggcagaagaatcgcttgatccagggagtcggaagttgcagtgagctgagattgcgccaatgcactccagcctggcgacagagcaagactctgtctaaaaaaacaaaagaaacaaacaacaacaacaaaaagacaaaaaaaaacaatgctctatgtgtatggtcattagtgctgtcttatttgacttctaatattttaaagtaaccaggcatatctaaaaataaagggtgaatcaccactgtggtgtgtggaagtgtgtgtgtgtgtgtgtgtgtgttgttaagaattcaacagtcacaggactgaattccatcttcatggaaccccatagctaactaaaatacttaactgttctgaactctagacataaaaaaatacagcaactgaaatttttaaaaataccagaagatagatacccaaataaattatcctttccacagtacagaggcaaaaacaaaaaagaaaagaaaaaaatgacagaaacccccacccgcctacgtagaattgtataactagaaaaactatctcttaaagctgagggtgaaatagaagctttttcaaacaaacagaagtttatcacctctctataaggacattctaaaagacttacttcagaccaaaaagaaacaatttccaggagaaagttttttgatttaagaaggtagggaacagccaacttgtgaagtagagtaagtgaaaagtaaatgcactaacaaacaatgtgcaagtctcaaacatttttttaaaatgtagcagtacccccacttgctttctaccccagctcacggtatttacactgtagcaatatcaatcaccaaggccatggactgcaaatgtgagtgtgcagggaggcaccagcttgaagcccaagttcccaccctccatagtccagagattcttaaacaagttccaggaatctgctgttctacccaacagataccccaggtaactctgataaagatctgaagaacactgcattgctctctgactactttaggggaaggaattattcagtgaacccccaggggctcatccctgggaggctccagctgagaacactatcaaacctttgttcttttccacttcactacagccccagaagtaccttggcccaggaggtcagcagtaaccctgcctcaaccctgctaatcaagagctgcaataaattaaaagcccattgaaatattttagagaaaagccgagaagtgctgaaacattaattgtgccatattcaatctgttttcctagagatttgaaaagccagattaccatcttgggggtcattagaaagaatgaagctttctcccttttcaatttacatatttaaaaatgcatgcgttctggcagtggctactaagtcctttccaacgctttccaagtcctgtggctactccaaatgccacagtctagccatggagagagaagcgtggaatgccaccggggcctgccttgtttctgtaaagcaaaggaacccaaatcccagggcctgtggttgcaaaacagctccagaaaaacaggtagaggcagaaacaaaacaacaagtgatgttttcttgttttgttctcccctgtttatttttccctgaagcaatccctgctcagtacaaaagtctgcagggagctagaaagagcagctgtggttccctgaggccgggacctagcaatcaagttgtttaccaaacactgccaggcaccaggaaaacaacaacagcacagacagcatttgcatctatttttcaacctccaaaagtctgccctggaacttgcctgcacagctgagagaagagcttaaaaattaaaggaatgaactgcactgggtattggcctccatggcctaaatgtaatcaagtattccatttctattgaagaatgtctatcctaaaaaaagaggattgaggaactgcagaatttcaagcagtggattgataacagacaacatgctcatcacgggcatttctgagcatgccaacaaaggccctctcagcaaactgacatcatatgctgagcctccagcaactcacagacatcttgaccaagcaccaggatctccaggggggtttgtaaaacacagattgctgggcctctcctgcagttttgcattccataggtccaagacggggcctgagaatttctagcaagttcccaggtgatactgatgctactgatccgggcaccatcctttgagaaccagtgctctaaagctagaggctctatccccaccctgaagatctaggaaggagttcatttcccaccttgacctctcccatgggttacctggttgagttatggcagttaccttgcatagctgtttccagaacaaaatgcattggatggtttccatctgcttctccagaggctccactcactatcccccacccagctctgtgtcctagagggccgctctctgtccaaccaatgggagctctcatctcaggacgccacagaagatggggtattcatttctctagttctgagtccctctttgaccagtggcaaccctgccaggcagctctctccacacaactcctctctctgggttctttcagccctcctctgcctcccctagtccacttaaggcctaggagaactaaaagccatctatttccatcagggacccttatgcaaaagtcaaattcaatgtgttgcccactggatctcccttggtttgagaatgctaaatggcaattttatacacacacataatatacgtatgtatatacacacacatataaacacgcacaagtatacatatgtgcatataaacatacagacatgcagatatatacatcttcataattgttcgtttttaaatgcaactaaatcagattggccagaaaacttgggagtcccctggccaaggccacctcatggagtttgcatggatgtttcctcgggtcccacgtgccacagcaagagtgagcctgctctgtctaatctgttacacaacctgataagaagtgcatttgtgagagcttcaatccttctctaatttacaaacttagtttcctttgttgcaaatggcaccaaaatagaaagggaacagaagtgggtggagcgggctccatcaccaactcctgtgaataactttttgacaatgctgaacccagttcaaaaaagcacatcagctgcaaaaaaaggtatgtgtttgtcagctcataaataagatgccaatccacctcaattcataggctaggaaaagaagaacaaataatacttctgtttttaaaataataataataataactcaaacgtgccctaaataagcatctgtctttagcgctaagttctaataaagttctggtaaaaaacggtcaccagatttaaccaaatgggtcactacaccaacctccatggtttgggcaagcccatttaactaactttgtttcagtgaagttccctaaaactaaccaatcactattccttttattaatcttccactagtaaggtttctttcaactcaccagaggacttattggtatctatgctcaaaaacaaatttttaagtaaacccactagactaattagaacacatggggaattacgtaattacttttctagctctgaggctcaacctgaaaccttttcggtttgtttgtttattgctctctttttcactaacaatctcctgaatattccatgtgaaactcgcaggctagtgagatttttcctgtggcatctgtctgctccattcccccatctatgtccaaaccctgctctagagaacaactgacctaactgatcacttcccctctttggggatgagatagaccatcatcctgctggcttcagaacactccagaatctcccttctgtgctgaagaaactccactcctccttcccctgggccttagtgctcacctctctccaccatcttccactaccatcatctggatgaatggagagacttgccttttacccttaaagatgtcccctctctccttttccagaagccactcattctacatctttcaacttcaagcaactaaaaaagaaagagttggtctctcttcaattcctgttacagccaagtcgttcctctgccaacagcccacctcacctgtcacctaccctcaaggaaagtaccatcaccttcctccaccgtgattccaagatccatggaaacctttctattcatagtcacatgtaagggaaccaccgcttcctgcccagccaactggcagttacttctaaatgtcaaggatggctaggcacagtggctcacatcgttaatttcagcactttgggaggctgagatgggcagattatctgaggtcaggaattcaagaccagcctggccaacatggtgaaaccctgtctctaccaaaaatataaaaattagccaggtggggtggcgggtgcctgtaatcccagctattcgggaggctgaggtgggagaattgcttgaatccgggaggcagaggttgtagtgagcccagatcaagtctctgcagcctgggtgacagagtgagactccgtctctaaataaataaataaatggcaaaaatgctcttcaacacctttctcaggtattttactacagagtgagcatcactaatcaaaaaaatccaaactctgaaatgcttttcttttttttttttttttttttgagacggagtctcgctgtgttgccaggctggagtgcagtggtgccatctcggctcaccaccacctccgactccctggttcaagcgattctcctgcctcagcgtcccgagtagctgggattacaggcacgcaccaccacacccacctaatttttgtatttttagtagaaagagggtttcaccatgttggccaggatggtctcaatctcctgacctcatgatccacccaccttggcctccaaattgctgggattataggcgtgagccaccgtgcccagcccaaaaggtgaaaacacttttgaacaacaacatgacctttcgaagaaaatgttcattgcatgggtacaaaaaaatagaaagaatgaataagacctggtagttgatagtacagcaaggtgactatagtcaaaataatttaatgccactaaccaccttgaatccattgctcctcccagtgcacacaatccaccttcacgtttctgaactcggtgtcttttacatcatctaagactcatattgtggtacccagtgccctgaaaaccctggtatccctcaagatggccttgtcttttctactgacttcctgttcaagctctttggtttctttcgcagagtgagatcagcaaggcagggtctgggatttgcaggttatatcctggatggtggcacgacagcgcctggaacacagaaggttgggaggcgtgacgctcatcaggaaggctcttttggggagccaggaagagtcccccagaagcccacttggcaccctatctataacaagttgctctttaagaatcatgggaactccagaatcattttcacaaataccttccactcatgattcaattaaatggcagaaaacacaaaccttccgttcccactggcaaactgggtctagctaactgagcacagctagcacaaggcaggccccctgctagcagggcaagtggcggcccggtccccaaggcccaggggagcctctgcagctccctggaaggacggtcaagtgaacagagagctggctgccatctgggttctttataaggcttttgtggtaaacatgtttactttcttttgattggctaggcttatcaagtattttgttttgagtcttgctctataaacatgtttactttgaggggagagcttttttgatagctagcacacttgtttttcacacttttaaattcaaaacatatttttcacagcctgtggtaaacaactcaaggtggtaaacaaattatattattttcatcttcacactagagaggtgatccctatgtatctattcaaaggcttgaactgggttgccggtaaccaaggctctctactggatgagaacaagaattatattcataatgatgatgttactaaaaggaaaacattacaatggcaaatcctgcagtatcaaacctaagcctcagtttccccagtgggaacattctagaagaagccagccataacaacagcaggggtagtcctattaattgatgacatccatattttccatgaaaaattaaggttatgtaaccggcatacataacagctaatacgggaggaaaaatcaaataatgtttcaaagaatgaagaaaccaactaggtcacaacactaagtgcaattcttttgagatctgttttctgtgatgatttttgcctgctttacaattagaaaaaaaaaaaaaaacaagtagtagcctctaatgtaaaactgaaaagccttccattattggaaaaggagtaaaataacaaaagagttaagagaagaaaaaaaaggaacatatctcttgagagaaaaccaatggtccctgaagtaggatttaaaagtgctgtttacatagaggcatcagaagagcccctctgtggaggtaagtgtgaagtcccatagcagtggagccaaatctgttttctagagagttctcttggtctccatgttccaactagaaacaaaagccatcttaccagaggcctttgtagttagttacaaattacttaaaggaataaaaatacaggccaaattacttgctaaaataaataaagcccccagcccccaaatcatcttctaagcttatgctcaagttaagttaaaaagcaaacagaatttcaacatgatgaaaccccatctctactaaaaatacaaaaattagctggatgtggtggcacacacctgtaatctcagatacccgggaggttgagacaggagaatcacttgaacccaggaggtggaggttgcagtgagccaagatagtgccattgcactccagcctgggcaacagaacgagactctgtctcgaaaaaaaaaaaaaaaaaaaacaccacgaattaaggttgtagcaccacactatggtaaacctcctcagtgactcgatgttattatttcgtcaggtatggtactgtagggaggggagaatggcagaagacacaggaagcctgtatggagcctcatccatcattcaggccagatcatgtacagaacatacaggcatcagagtacaaacatactaagtagccttgttttccaaggttataacatgctctggggacatgctcattagggggtcaggagaaggagccaagggcatttggaggcagccactattcctgactttcagattctcttctatcaaggaagaagaccaaaataaataatttccaggtagttttagcagaagtgcagcaagacccagggggtgagtacacatcacaaattcccaggaagatcaacgccatcccagctttgccaacaactgtttgagatgtttcgcaagtcagtgagcttctcggaacctgagtttcccttcttataaaatgaaggcatttgaatcccatctttttgaacaatactatgtcataattttatgcctcaaatcgaaaaaaacactttgggggataaccgagaattccaggctacatcatccaatcaatacaatacttggagcactttcaaaaaacccaccaaggaaccaaagctaccataacttaaaaggagcagaaacgaaatttcagattaatatgacgttggccagtgactagtcatcaagcatacttcagcatttagttgtctgagcagacaggtgactcagcgggaaatgggttacccagccagccacgctcatctgacccactgcctcaaagtaatttttcctcaattttcaaaaccaagaaagtaaatgactaatgaaatgactgaagaataacttccagacaattcttacattaaaaaataaaaccaaacttcagcacaacagtaagtagatgagaagaaaacaacccggctcagagctgtccaacgtctgatggccacagttccttctgacaaaggaaacgtgcacattccagggtgtgtggaatgatgtggtttggaaatgtctcgaggcgccaagggaagagctgatgatcaggacaatgtcatcaagaaaagtgtcacggagcccaagtggtgacatttctgttgcaaatatgagaaaggaaaggaacacgctggtccttcaccctggtgttcaatgcggtcgtaggacttttggatattctcctgggtacttccagttctaacaccaactaacatgtgcaaagcctgtgctgcactgcacatgaggtactctgtccatagcattttcatccaccctcttattaagccttataacggtggcaagagtaaatgctattatcttacagatgaacgaaccaaggctggtgaagggaagtcctttacccaagaccacagtcagtgacagagccacatctttctgaaacccaagcctcgtcccttaaccaccagtgaatactactgagtaccatttttccaacagctcaaacaggaaaagtaggaacgtttggaatggttcccaaaataaagacaacctggcaacatagagttataattctgttcagacctctacgttgcctcccactgtctaaaacccttggcttcttgcgtgaagtcaggcaaacccgggaagcagaaaagcaaggacccaagtcacccctggtagtgcagcttggaaatgagacaggacatctcccccaagacaggagacaaggagggagtttatgacggcatatgaggcatgcactcagtcctcctattggactgtagaagagggatgctttttttttttttttttttttttgagatggagtctcactccgtcgcccaggctggagtgcagtggtgcaatctaggctcactgcaatctccgcctcccctcccaggttcaagcgattctcctgcctcagcctccagagtagctgggattacaggcgcttgccgccacgcccggctaaatttttgtatttttagtagagacagggtttcaccgtgttagccaggatagtctcgatctcctgacctcatgatttgcctgcctcggcctcccaaaatgctgggattacaggcgtgagccactgcgcccagccctgaagagggatgctttctattcttctctcggtctcccttcaattctcccattttcttctgaatcacaactgtgggcatcgtcccccttcctctcctacttcttcccctccacgaatgtcacctgtcactaaagtctaaaggatgagattatcacttccgcccggaagcctctcaaatgaaattaaatcaaacatttattgcactgtggtaccacatgcactgggtgaggtgggggatacccaggcacagtctgcctctctgggcaagaagttaaataacaatgtgcgatttaaataacatttcaagacaacaataagagccttgtcaccgggagtacatgattaattgccagatgaattctacagacaataattgctgcaaagttcaaaaggagggagcaatcacttccaacaaatatatcccaggttgcaaattctccactgagccttagttcgcagttggcttcggcagtgttgggagttggctgcctggggtccgatcctggctgtgatactcgtggtccaaccctatttaagttttctgggcctctgtttcatcagctgcaaaacagaggtaatgatacttcctacatcatggagtggtttgaagattaagtgggataatgcatgtaaaccttgaaacagggcaagtggtagttttacatctcctgtctccacggcggcgtatctgctattcgaatccgcacacgctccctacactggctccccctcctcacctccctgtgtttgccaaatccccaggttttcttttccaactagctgataacttttccaactaaggggttccacggtatccttcccccagtaccaggcagctactacgtctgcccttgacttaggctcgctgctagctcttgcatccagatttccacctccatttctaatatcctaggacaagagcaggaagctgaacaactgggggaagctggtccttcccctcagtaccagccagctaccacgtttgcccttgacttaggctcagtgctggctcttgcatccagatttccacctccattactaatatcctaagacaagagcaggaagctgaacatcagggcacctgggttcagctcccaacgttgccatagagtagccttgtaattctgcacactttacagtttctctaaacctccatttctgcttctataaaatggggctaatgaaagtccctacctccaagcattgctgagattaaattatccaattggagagcactgtgctcaatgcctagtcaaccagcaacggctccacacctgagagctgctgttctcatctttgcttggaccacacaactaagtgaacaacagtgtccccggctgctctctcctctctcaaatgtgtgagctgctgccagtccttcatggtaccagatttgggtcagcgaaccacagaacttaattatgccccagttttctttcatgcccattgatctaattttacattaaagtttcacaaatagaaacaggtactctcatgcacagccagggccagggtaaactgacaccgcctttccagttgggtggtgatatgcttcaacaagacttagaatcccttccaaagagtaaggagtgaacaggaatgcatgcttttaacaaaatagtaatcactggggagaattcaactacaaggtcacaaaggaatacatcacagcattatctagtatatgaaaacagaaaaataaatgtcagttaaaaactatttctgattcatatgataatgaaatattatgcaaccattaaaaagtattgtaaaaacaaacaagggcatagaaggaaacgtgagccccaaatcatacctgcttaccaaatgtctattgaatgatatgttgcaaaactgctttttttttttttgagatggagtctcgctctgtcaccgaggctggagtgcagtggcacaacctcggctcactgcaagctttgcctcccgggttcacgccattctcctgcctcagcctccagagtagctgggactacaggcacctgccaccatgcccggctaattttttctatttttagtagagatggggtttcaccatgttagccaggatggtctcgatctcctgacctcgtgatccacccaccttggcctcccaaagtgctgggattacaggcatgagccacaatacccagcccaaaactgctactttttaaagttatttgagtacttactgtgtgccagctgacaggaataagcacattacatatgctaggctactgcaaaatccaatgaagtgttattatccccattttacagacagcaaatggagacacagggaaataaaataacttgtccaaatacacacaactagtaaatggatttaaacccaagtcttattccaaagctcttgctcttttctaatgagtgctgctgcctataaacttattagtatatttatggctgcattaagtatatttctatagggggaaaaaggactagaaaagctgacaaaaatactagaagtaattctttttagggggtggcactacagataatgtttattctagctttgatttggtttttagattctttacatttatcataaatcatgtttgtaataaagggaggaaatttgggggacaaagtatttttctgttttaaaagctcaaatggcagccaccatctttccctcactgtgacagaagcagatgctaggcaggcgctgggctcgtgagggaaggcagtgcctacccagtggttagaggtccaggtgctggagtcagacggcctgggtgcagaactcccagaagctctggggaagctgctcaggcctctgtgagttagaaataggcaggtatgtacagggcttggatcagggctcacagatcctgagggctctgtaatatgagtgatactcattgttttacgagtgacatcttcactctactcaatacgttttatagcctctttctgcagatggaaccaaaacatcgttaaggcaatgtgtcccaatatcttttaaccaattatcgtaatagatcctacaaccacccctctctggcccccaacctcccaagggcttagggctgtcaaagaaacaacttaggtctgcagagtgatacctgccttggaattccagctctgaccctggctggctctgaaatctcgtggatgtcacttaacttccttgcctcagtttccttgcttacaagatgaagagggcaacagctcatagctcacaggattgtggtgaggacaaaaggggaaaatgtatgtgagacactgagctctgcattcagcccactgggacttctcaataaacctgacccatcatgactactttggcattttctgatacagctccactctccgtatggatttcgccagtcattatgggtttcttccttgtaatggttttcttgccatcattttttcatatttaagcattgtattataatagagaatagagatgaagcatgcccttgtgcagattctgatactgtatgctcccttattagtcagccagggctgctgtaacccagtacaagagactgggtggcttgaaccacaggcattcattaatatttgctcatgactctagaagctgaaagtcgaagatcaaggtatccacagggtgggtttctcctgaggcccctctttttggccatcttccctctgtgtcatcacacggtcttcccgtgtgggtttttgttagaatctcctcttcctattaggataccagtcacactggatttgggcccatcctaatgatctcatttttaatttaattatctctttaaagtccctatctccaaatacagtcacattccgagtgaggtactgggggtgagggcttcagtgtatacatcatggggggaggacataattcaacccacaacagctcctcacctcctgaaaggacaagctaggccccaaattaagaatcagttatgctctaggaggctcagatgggagaattgcttgaggctaggagttcaagaccagcctgggcaacataaagaagcctctgtctctacaaaaaattaaaaattagccgggctcagtgacatgcacctgattcttagctactcaggaggttgaggcaagaagatcacttgagcacaggagtttcagattgcaatgagctatgattaggccactgcactccaggatggccaagagagcaagactctgtctctaaaaagaaggaatcaggccaggcacggtggctcacgcctgtaatcccagcactttgggaggccaaggcgagcagatcacctgaggtcaggagttggagaccagcctggccaacatggtgaaaccccatctctactaaaaatacaaaaattagccaggcgtgtggtggcaggcacctgtaatcccagctaccagggaggctgaggcaggagaatcgcttgaaccccggaggcggaggttgtagtgagccgagattgcgccattgcactccagcccggacaacacagcaagactctgtctcaaaaaataaataaataagaagagtcaggccatgtgcggtagctcattcctgtaatcccagcactttgggagtccaaggcgggtgtatcacttgaggaccagcctggcccacacagtgaaaccccgtctcaactaaaaatacaaaaaattagccaggtgtggtggtacttgcctgtaatcccagctacttgggaggctgaggcaggagaatcgcttgaacccaggaggcagaggatgtagtgagctgagatcccaccactgcactccagcctgggcaacagagtgagactctgtctctaaaaaaaaaaaatcagttgatcttgggccttgggctttggcaatctgagccagtccaggtacttcagaaaatgaaagcacacaggtgcagcacaatggaaaggcttccccctagacacttatgtgtagtgtcctcccagtgctgtagtgagctccttgctcttcccagccaccagacctgcagagggggctgatgcctaccaactgcaatgttcaactaagctctgtccaatcgagtcagcagacccagccattgctcatatttacatttgtaaaaagtcaggacggaaagtgttcattcctggcatgaactccccaatctgggctcataaacataaatcaaagctgaaggtcatttttaaaaaatcagtacatgcctcattaaaacaatttttttaaaactgagtttcttgaaccacggcctataatttacaaagtgcaaatgtctgagatacgtgtgctaaatttaaagaaacaactattattaaacaccccattatgtaaggcagtgaaatatatttgcactctgtatatccgttataatatttcaactgagcctcacaatgtttggcagttctttccttcggtgataataaaaggcttttctttccattaaatatctaaattaagtcaaatagtgtatgttaaataagcccataagtccttttgtatgatgcaatgaagtcttgaaatgcttatctactgagcactctggcttaaaggctggtggtttatgtcccctgcagagccccgggaccctgctggcttggccagactgtgaaaataagcttcaaatgaccaaacgcaactgcaactttaaaagtaggaaccagaccagacacaacaaaccacagtgtagtcagcctcacttgtcataattcatatgtgtggaattcaactgtaaaagcattcacagagtgctaaatttcctccattggggcattccatgtggaatgtcagattttgaaaagctgctgataagccactcctgattacaagtctacaagttgtagaattaataaaaaaaaaaaaaaaattaccccaaccccaaaacatctctgtctgtgtcatccaatcctaaacaatgtaggcaagtgccaatatttttaaataaccaggccataaaaatatgcactcaattggtggccctgtatgaacactgacttccttttttttggttttcttttagctccatgtctacattattctccattttgatggcctacataatgatcacttatagcaatcctttttttgaaaaagaatctcatcatggttcaatgacttaaaaatataatccttacagatttttaaaagagaaacttgaatggataaatatattcatgtgtagatttcaaagccatgcatgtatatatagatgtaaacacatgaaaatgtaataatccaattagcacatcttttttggaaactaaattaatcttaacaaaactggcctaaggctcaggtaggagttgacggaactgctggtgatgacgacaacaataatagctgccatttagtcaacatttactttgtgccaagtgcagtgctcagcccttgacatagattttcccatttggttcctcacaacaaagctctgatgtaggaatgcatctttatacgtgagaaaaccacggctcagagatgggaagtcacctgctcaaggtcacatagtaattaagtggaggggaaccaggggttgaacctagttcacattgtgctatattgcctcccagtggtgccttagagacaggatatagggcctggcgaagggtagggtaatatacctggcccctaaatgacctcttatcttggctaaggacaggcagcatagcctaggccccatctcaggagaagatttaagagcagacacaccctgtaagcaaggtaaaaagccagagccatatcccacctctcttgcagacacaaaggaagaaatccccacccaaaaatgaactcctaaccttcctccacctattaccttattgccttgttaccaaaagcaccatatgcatgttcctgaagagtctatttttcccccatcacaacacacttaagtagtacatatttaagacagaaaagcaatagtagtcctcttctttctacaatgcaatccaacttttcctgggtgacaaaagatgaataaagggatgagagaagcaaaggtgttggattattcatttgtgaatgccacttcatacaacagctggtcactacccagtagagtagaaagagaacagaaagggagtcaaccaacttggattctcagttccattctgtcccacatcctggtgccgtcatctcttcccacacacagtaatgagggaggaaagaccatctccacccctgtgtttatttcagactttctgtgactctgagagcttcctttaggtacacagaaccagcacgccagccctacggctcaagcaccaatgcctaacaccaaggaaacgtcaccctcaagagttaaactgagcatctccttacacggcaaacacacagaaggatccctgagatactagtaaggtcagttttaggggaacatgaaaacagcctgctccagtagcatttaccaggcattcctaactccctgggctcccaacctggcccatacctctttccttaactccagatgtgtgtacctatctgcctctacagcctgtcctctggaatgtctagacatctcagactcaacacgtccagaacttgatttaccctctcaagcaggctctatccacgtgattttcaatctcaagcaggctctgaccacatccttccccaacacaacttgtccttcccaatcatagtccacggcaactatatccttctcatcacactcaggccaatcatctttgagtcaatactgactcgtgtctttctcttaaattctacatctattccattaggaaatcccatagagtctgccttcaaaacagatataaaaagccagtactcccctccttcgctaccaacttcctggtcacagccaccatcatctccccgccaagcttcctaacaggactccctgctccttctcttaccccacccgtggtctattctcaacacggtagcaaaagagaacttcttaaaacttatagcagatcaacacctccacctctcgcaccagaactgtgtgaaagttgattatacaaaatgggtcagggtgtagcgcaaggtgtgaaagttcatgatgtggaatgggtcattctttgtcataccccaaactgaatcactctgagggcctggaggataaaggcactcagggcacatagcatggctccaagaatgtaattctctgcaagcccagctgctgaaactgcctgctgcaaccataagaccgggtttacctaatagctgctgaaatgacctgccacaactcttaaggctagctctacctatcaccgtcactcgctgttcagagcttgccagctcccctaagctgcttctcttgccagtgagctttctttccatttctaataaaactatgtctaataaaatcctcaaactttgctccaatgagtctgtgcatatgccttgaactgcaattctgtgattcccaaataaaacactgaatttagacacttgtctctatattttgactttgacaaaggcaagtcctttaatggtatggccccaactggctctcaggccccatctctcaccacactcccccagtccactcctcttggccacagcagcctcctgactgccctttgattatgcatgacttgcccccaaccatagggtctttgattaactgttccctctgcctggaatgttctacaagtctaactcattcacctccttcaagtccttactcaaacagcacctttaaaaagaactacttggcgtcacaatcaaaagcacagcccactctcactccacagaactgccaacctcattccctggtttttcttctcctgcacaccccttctaacctcctaactaatctacttattatgtctgtctgtctgcatcctttctctccccagaatgagtgcccacaaggccaggatctttgtctgttttgttcattgatttatcccacatgcctggaacagtgtcatgtacaaaacaggcacttggtaaatatctgttgactgaacaattgaatagatgaatgaatccaggagtggacattctgtgaaggctctcccccctgttgggaagggtatgttctcttcacctccttttttctccttcatacaagttgaaaaaacagacctgtctaagctcagcaaatacccagcacgtacaccacagttctgtgacctgcatgtggagccgacccaggtgagcagctcaatgctctcgcccactgggcccagtcacaacctcagaattcatctcacaccacgcccagtaagggactgaaacatcctttatcgctcctcttccaacattcctttccactcactaacaagatacccagccctaagacaagaaaaacagttcaaagatgcaaacctattattaaataaaaattaattagactcacagcaggcaacttcaaaagaaaaatactaaaactaccattttttatagaagtcaaaattttaattaaacagcataaagatagccaggctatctgctttcaagtttaactcaaaaagtttagtttgtgaattttacgacagacctccattctcttcgttacaaactggcatttctagaccctctcataaccaaaacaggcctttctgttgaatatataaccatggctatagtattcatgccatctatcccataccctctgcatcgaaccaaaatgcttcacacaacgcggtatggaaagctgctatgtggaccagtatctccattctttctgaatcttaagctcacatttccaatgccattttatttctgcttgttgttttacactaagatgtgattaaatttaaaagaaacgttcaactaaatggtatacgcatttccctttgatcaaaatttacacagcaaaaaaaaaaaaaaaaaaaactgcacatttatacagctgagctcgccgcaagtcattggaatcacgcttgcagggtaacagtcattttcaagcttttattagttactataatgatcggagacaggggtcatcaaaatgcctttgccagagccaatctaacattactgcaaagtcccatagtgaaataaagtctagggagggagggggaggagaaagggagacttttgtgctgtgtggctacagaagagaaaaaaagtaactcaagaatgtaacattgtgaagaaaacagcacttaacataagttatatctagctcacctttactggttcaacataagcaaaaacactgctgctaccagggtagtgagaccaggaagagattactaaggaaagttgctaaaacaaaaggaaacaaaaaacgtcatctttttaaggaaggaacaagggtcagaatacgctctgtctctgatgtttcaaaatgattttgtttgcagccaggagaatgggttagaagaatggccagtgtcgttcatctgagattccgtaacacattttgtttaatcaaacgctcattaaatacaaacttataaaagagagtgacaactaaatacagtacatgatcctggattggattctggactaggcaaaacaacagctacagaagagatcagagacactgacaacatcgtgccacagtcttttatcaatgctaaacctcccgcttgattaatgtactgcagttacgtaaaataacggccttgtaaggaaatacatgctgaagcattttatggtaagggtgcttgagatttcaaacttactgtcaaaggatttaggaaaagcacaatgcaaacgtgtgtgtgtgcacacgtgtgtgtatctgagagtatgagaaggagggatagaaaaagaatgaaaaacaaatggaaccaagtataatcaattggtaaatctcgctaaaaggcatagggaattcttgcattattcttgcaactatctgtgttaagtttgcaattataccaaaagaaaaatgagctcatactttgtatcctaatctcattcctaaaatatattatcttggttattttctagaaaatgaaatatactaaccagaataagactcattctgctgtaggccgggtgtggtggctcatgcctgtaatcctagcactttgggaggccaaggcgggtggatctcctgaggtcaggagttcaagacccacctggccaacatggtgaaaccccatctctactaaaaatacaaaaatcagctgggtgttgtggcgggcacctgcaatcccagctacttgggaggctgaggcaggagaatcgcttgaactcgggaggcagaggttgcagtgagctgagatcacatcactgcactctagcctgggtgacagagcaagactctgtctcaaaaaagaaaagaaaagaaaagactcattcttctgttcattcattcacttagccaatcgacacatacgccatatatgaagcacccatccagggccacgtgtgtgtctcgcctgtcagagctgactgtgtgtgtgctttctctttcaccccctgtgaattttaaatagctacatcattggtaggagaaaaacatggctttccaatttggaaatgatgtcagccacattagttggtcctgagaaaacaacccatactttaatacaaagtttcaaatagtcagaaaagaggatcaaaatattatgtcttacttttgctaaaaatattaacctacactgaaggtgatctatcaaaaaaaaaaatacatgtggctatgcaaaacacagatgataatgacaacacatctgcaagtccaagtccatacagattcacagcattgaagagaaggcaataacgaaaggctttcaaatgatggaaatgctgtctagtcatgtgtgacatgacttaaataagtaacaatgcaagaatgtatttgtctaaccattgcccaggggtttcttggatttagcagccaaactggcaacagggattatattatcagtagtattctataccactttattaactgtcagggaaatgtctattataataattgtcagtggaatgatgtttattttactaccaacacagcaacttgaccaatcaactcgagatttttcatccaatccttcccagaaatggccagcattccaggaacactgaactggtatcacttctttctcctttatcttcagtataatattcataccagagagaagagaaaacactctcttttattgaatactggctcagcaagctacctggttcaaattccagctccttcatttcattagttacattcttagacaagctactcacgctctcaagacctcagtctcctcaacttaagatgggaaaacaaactcgctggactactgcaaagatacaactaactaggtaatgtctacatctaatgttgcctgcatagaatgattgttcatcttacctaagtcatattccgctggcatataagtgtcattattagctctcccctcgaaatacatcaggtgcactggatgctatctcaaatgttaagtcaactcagtaacaaggtattcaagaaatggtccaatggaacattagagtaataagccctccccagtgaaaaactctctgcctttcctcttaatgaacaactgcttggggaaaccatagaaaatcttgctggacatttgacagtgtttttttttgttttttgttttttgtttttcttgcattttatctaagcacatgcatctctaagaactctaagaaacttaattaatacaaacagccccagctggaccaaatgatctcatcagatcaccagcagcaaaaagattccctgactccaaattcctacccttgttaggcaaacagaattctacagatgagaaaatgcaagctcaaggtcagtcaaccaaaaacctccccatgcttatttgcttaaaaatgtgagaaacaccaagaaagataaaagaatatatagaaagcactatccttgccctctagggaattatcatctaattccaaaagacagcataaattcataaataacttttgggcccttttctccctcttttgtgaacatgttcacctgtttcaatggagtgtttgtgtaagtgatatatactacttccaggacaggtccatacaattttacttacatgacccttgctcttttctcaagttggcagacttggaaaacacatgcagaagatggtggcgccataaaatgtaagaacaaagggtgtctgaaacaatgcttgcaagagaggccttgtcaatttggagaaaaatacctattgggtttgagtcattaaacatttgtatgtttatttgttacagcagctagcatttccttagctaatacaccctccattactctgtgaccttataagcaattctatatacatttgatgaacttctaacgagatgccagacactatgcaaagcatcagaggacacaatgaggagaaagaactggcaaggctcccgaatagatgaaagtggttacatagcaggggataaaataatgtgtgaggccaggtgcggtggctcacgcctgtaatcccagcactttgggaggccgagacgggcggatcgcctgagatcgggaatttgagaccagcctggccaacacggtgaaaccccatctctactaaaaatacaaaaattagccagatgtggtggcacatgcctctattgccagctactcagaaggccgaggcaggagaatcactggaacccaggaggcagaggttgcagtgagccgagattgtgccactgcactccagcctgggtggtagagggagactgcatctcaaaactaactaactaaataaataataaaataatgtgtgagcaggcaattgcgtgagctgcctagaaggctggggataccatgaaaggtaaaactgcggagactttacatagtacatcatcacagaaaagtactagacattagatttcatgttaagtcctattctctgccatgaagatcagccacctctaacctgtctcttcctatctcaaatgccaaagcacagagcctcctaactctctgataagtatattaggattctctcaggaaggcacagaccattttctaaggccccatctctactcaccccactttcctgggcattgtcttcccatcacttctctggttccacgcaacagatctttatatttacctaagttggggtcactttatttctattccttgcccccatgccaaattcaaaactcagtctttggcatgcctcaaagaaacaaactaaaaacccaattcttcccccagtgtgtttatacaagaatgatattgtggtgtaagtactttaaatgacaaactgttgtctgcttgctgctaaatctctataaaggtgctaaccagctgcactgggatgtaagcaaatgctttgttctctccagagtctgaaatgctttcccataaatgtgggggccagtccctgctgaatgcagtccctcccataaaggggccatgttaagtgaggcaaacacatgtcaagatattcttgggacacagttttccaagtaagaatcaagtaggtgaccagacaatctttggattaagaaataaaattagatgaaaaagagacaggcagacagacagaaaggaagaaagaagaaaagaaagtgcatgagcatacacataccattccctattaactccatgcatctccccaattatcttgggacatttcttcatcttattatgagtgtctgaaacacagaacatgctctcttctaacctataaatgaaccactcatagacttctgtttgcctcatcaatttctacacctttttgaaaaatagatcattttacattccttttcaatgacgggaaggagttcacatttttaaaaaacatatatccatttcttagcatatgtgcagaatgacttcccagcatgaaactggctgacccctttaaatgttctcattccaaatacaagggaaagcccatcttgtgcaactccacaggaatccttgcagaattatatcagatgagaaccacttggcggctcattagaaatagtccccgtctgtcactaaggttagatttgaggacatctttacaaggatataagggggcctttcccccacatttcccagaacagcaacaaaacactattccagttgccctaaaaatgtcagcgtgagactgccctcgagaaaacagcttcagatctaaaatgttctagcaaaagaatgagtaagtcaggcatacccaaaatgctgagaacagtgtgtatcagaaacctgtcggtcttgtgtctccacttagcctctaggagccaaaacaggttggcattgacaagtcaattgaaattttcgtgacatttatttttttctccaaagtaactcaggtaagtcacaaagtataatcagcaacgacagttgccatctgagaacaaaaggatgacctaactccctgacacccacgctgagcagcacatatgcaaatgaatatagaaagaaaaatataccaagggagaaatgaggacattttcccctcccaccgacttgcacccaatatccactcagcaatcacacagtgtgcatctaccaggtgccaagaccatggacataatggggaaaaagccatgatccatgaagatgacagagaaatacaattaaaatgcaggaaagtcaaggctaggtggtgtgggggagggggtgtcagggacatgatagcagcaaggaaagctcctgaaagggatggacagagagtcacagggaaggccactgagatatgtggtatctacactgtaatctgaagtaaatataagaaggggccaggaggccgggcgtggtggctcaggcctgtaatcccagtactttgggaggccgagtgaatcgcctgaggtcaggagtttgagaccagcctggccaatatggtgaaacctcgtctctactaaaaatacaaaaattagccaggtgtggtggcaagcgcctgtaatctcagctacttgggaggctgaggcaggagaatcgcttgagcctgggaggtggagattgtggtgagccaagatcacaccactgcactccagtttggccaacagagtgagaccctgtctcaaaaaaaaaagggcagggggaggggggggacctgggtgaaggacaggggctctgttctaagcctaaaattgtaaatcaatgacctgagagccaaatgtggtccaaagatttgtttcgcttgggccagactagacagactttatttttattctatttccaacacttaataatcaagattaagcatttgttaatttgagttttctggtttctttggaagatatgaggagaggagatctggccacatgaaactaatgtttctcccacagcaacaacagggtgaggccatctgcttgctcctgtcggctctggcatctgtatcctcctaggcagggggaactgctcatggaaaggcgcattggacttttaagcacatcactgatggcccaagaaacctcggccttggctccaatgcaccaaactttttatgaagcccgctgatttggtacattttcagatctctttgtttgaaagcaacagaacatctgaacagcaagaaatggtgccagttactattacaaagggtagataacaaaaccaaaataaaaaacagccacatacaaacatcccaaataccacgcaccagcaattgcaagtacacccttgggcctgccaagagttccgagagagacactggcaccaaaaacactgagctccctgtgggcagctgcccaatgacagaggcaagggtccctgggctcatctgtccacgctgggacatccaatctagagaaacttattttttcataatattcctatttctcagggtaaactctactctgcttaaaaagagacagacagacagacccaaagacaggaaataccaccagattccttttcctgtgatggtgttttccaagagaagataggaaattggggcacttaataagtcagagccagagagacagaaggaaaacaggctctggattcagaaaggcttgagtttcaatcttgaattagctatgtgacctaagccagggaattgactttcctgattctcagcgtcttctttcttaaaagacagaaaaggtactggccacctcccaggttcattgtgagggacaaataaaattcatataaagtgattcaaatatagcaggtggcactagagagcttcaagactgagaccataactcagaccgttctgggccaatgccagcctctgccaatcatgcactgatgtcatattgaaaaaaagaaatatgacccatgacttgggcccacctactgcacatctgtgtctgatgtttgcacacagagaatgcagtggtctcaagctgggatgggcctaccgtaaagtcaagagagacactgccatgtctctttcccatggttttcctttcaaattcccacagattttgcattctactccataatattctcaggagccgcagtacttacacatttaactttcctgaattcaactatatgaactgagcgaaaagagaaggtggatccgaatgtgaccttacttggaatatgattgctgcagatgtaattagttaagatgaggtcatactgaagtggggtgggaccctaatccaatatgactggtgtctgtaaaaaggggaaattgggacatagacaaacacatagaaagaccaccacagggagatgaaggcagagatcgaggcaacgctcctacaagtcaaggaatggcaaacattgccagcccctgccaggaggtaggagaagggcctgaaacattctccctcacagctttctgaaagagtccactctgctgacacctttgtcttggacttcttggctctagaagcaaaagatgacaaatttctggtgttaaagccagaggcagggggacaataatttacgtagtaagctatgtgtttcctcagtggggatgggccccactgctgaagttgtaataaacagtaaccctttatttttaagctattaaggctttctctcttaagacaaattgtacgtatttcagacttagataaagaaggagcagccaagatgccaatatattgttttgaataatacattcaaaacagtagcaagagccacttaatttttcttcatgagtattttattttgcggtgacatcccgagtcaccttagggggcattctaaattcactgtttgcctcctttcctaattgtgtattttcctttgttttttttctagctgtacttttccacatatgcatttgtagaaaatccattgtgtgaatgggtaaaagtgagataaggcatggatacagttttaggaggccctaacatgactcacagggccctaaaatgaattcagatgtgactgaattcacctttcaagtttaactccttctctcacccccattttataattctgctaaactcgagggagggcagagcagccgggatcacccacaaagcaaagagatgtgtagcaggcttggattacttgactcatcacggagatgagggaatgtgtccatgtaactactggaaaaaacaatgtatgttaccagccgacagacagaaacccaaaataacaccatgccatgaaataaaaaagggtaaaaaacaagaaacaacctcaattcagtgagtgacgggacagacacttttccagaaggcacagcaaacacatttgtttcttgctgaatggccccaacaaatgtttaaaagaaagaatgaatgagcctggccaacatggcaaaacccgtctctagtaaaaatacaaaattcagccgggcatggtggtgtacgcctataatcccagctactagggaggctgaggcaggagaatcacttgaatcaggaagcagaggttgcagtgagccaagatcaagctactgcactccaacgtgggtgccatagtgagactgtctcaaaaaaacaaacaaagaaaaaataaatgaataaaaataaagaatgaatgcaccttccaaaaactcaatcaagttttaagtctagcagaaccagaggggcctggaatgctctgtcctcactttgttgctgggtttctacaggagttaattttaacttgctagcaaatgcaaataaatcttaaaaaaaaaaaaaaaaaagcaagccaattaagacacaagtgtttaaagacacaaggagtaattacaaatgtattattcatacctaatttacaagatgaacttctttctgtaaaatattaaactgtttacatgcaggctaggaagacaattttcaaattgttcatgttccgctacaaagcaacgactattaacaatgcaacagcttctggtcgacttacagtgtggactaggcagtaatcagaaaatgtttgacctcaagatatctacttgaccccacagaaatgcagacttgcctgctataaaatcctaaacaatggggcagacaaggtcacagggtcaaagggagtattaacaggtcaccgtgcggcccacttgggagcaattacttccagtcatggctaagtggacacttgattgaataccactaagacagctcacatcccacggataacaatcctcacagcgattaagaattaaagcccccatgattcaggctttattactcaaatgaacctaactcttccataaaaaactcttggtatatgcctgatgcagggtccaaattgaaatgccacctcattaaacaataatatctaattttatctaaatgaattttcatgaaagtgcgccacacagctcaggaatttttaaaatgaattatcacaagtgatacataatttcaccaaaactagggtggataaaaaaattagctttaggaataaaaggaaacacagtgttgaatgaaacgcctattcctccaggtctaaagacagcaacgaaaattatgggctgctacaaaatatgtgaatctatttttaagaaattccctaattttcactaatttcagacgaaaaaaaggcagtggtttcactggctgggcaatcgctgagagaactttaaaaaacatacacagatttcaagtcctttttcagaatcaactggatttgtggccctaggaagtcaaattgttttaaaactctcaagtgattctcatagatcaccacctttgagagctctggtctacaccctgaacgaaggtctgcacagggttgtgaaaccacagggagaataagaaagacctcaccatcttccttcttctttagccttcccttatttcataatcttgctgaggcctttatatttatttatttttatcatcaccttcttctactggcaagtgattttctaattacaataatccatagaaagtttctttttggtgtaagatgattcacgtttttttttaaaaaatcaggtaatataaaaaatttattcatttaaatataggagtactggccgggtgcagtggctcacgcttgtaatcctaacactttgggaggctgagacaggcagatcacttgacgtcaggagttcgagaccagcctggccaacatggtaaaaccccatctctactaaaaatacaaaaacaaaatgagccaggcatggtggtgggcgcctgtaatcccaactacttgggaggctaaggaaggacaactgcttgaatccaggagacagaatttgcagtgagccaagatcgcaccactgcactccagactggatgacagagggagactctgtctctaaatatataaataaataaacaaacaaacaaacaaacaaacaaacaagagtaccggtggtactatgatgtcggtgaacacaatgaccaaaattatggccacactgatacatgatgagctaaaaactccagggccagccccttccttctgcctcaccttcagatcccaggaatatgcacatgcagtaagaatccagagttcaggcccaaatctgtgcctcagccgacaaagtggaccttctctgccagggaaatctttaaaactaccttaacagatacaaacaatccctgctgaaaggtacagtcagtaatagtctaaacacaaactacacatcatatagaaacctgcaaggaataaaaactgggacaaacattaatatagtaagggaattccatccaaagcagaaacggggctctaagaagcaaatgagtcattttagggtcttacattttaatcagtgtttattaaaaatcttctttgaatgtagcactgtgggagtgtactgcatcactgccaagcctcagccatcccacccatgcatttgtgtgaactagaaaaacattcccagccaggcacggtggctcacgcctataatcccagcactttgggaggccgaggtgggcggatcacccaaggtcgggagttagagacctgcctgaccaacatggagaaaccccatctctactaaaaatacaaaattagtcgggcgtggtggcgcatgcctgtaatcccagctacttgggaggctggggcaggagaattgcttaaacctgggaggcagaggtcgcggtgagccaagatcacgccattgcactccagcctgggcaacaagagtataactccaactcaaaaaaaaaaaaaaaaaaagttcccctctgcagggaggtagccctacatggcttggtgagcagagggcactactgtatatgcaagacaaaattgtaaagactcttcttcctctaggctgatgcagacaaggcccagagcctaagaagaagaacacaggcaaggtatcagctcctacttgccccctcagccaggcaagcttgtacagtgaacaatcccaatttcacaccagagcagccagtcaaaacagtaacaggtgatctgtgactgtcaggcaactccagagcaaggagcagcaaagaataattaagttaacaatgcctaatgattctctcaagcatcaacagcaagatcaaggagttcaaaatcaagacagacagagccctgccttccagatgctcactctctcacccagtagactggaaggggtcctgtgatgagatctgctcccaagctaagtgaccctcacaaagtccttaactgatcactacttcaatgtccacatccaagctggaggtttgatgagacgatctctcacccaaaaagctcagattatgctaaaagctataaacacagcacaaatgctcaaggtctacatagacctagcttcaagtccaactccatccactaccatccatgactaaaaggagaggtgcagagtgtaaccagcatctggtcacctgctccttacagtgtaattaagtattagaatttttcatctgtgtttcccccgacaatctgtacaataggggggaaaaaacaaagagaaaaaaaatatatgtttgtgtgatgctgggccatgctttacaaaggtttcaaaatgggacgccaaagggaagcctgttgtttaagaatcaaaaattgcccttttaaacagttcatcctgtcctgtctacatatactttgatttcaaataaactggtttccttttaaattacactttgccatatttatttgctcactatcccatgttttaattttcagacagcaattctgcagtaatgatacagactttgggtcattcaaagagaaagaccacggtgtctacaggacatcaagatgccaggaaaaaagcaaagagactttgtgtatagatggtttattgtttttttaagaaatactcacacacctaaaaatgcagatccccaacaatgcagtcactattgtggtttcttcttggttctctttatgaaaacatgtttgtgcttacacctcccggcatttgttcagtgttaaacaaaaacaactctagtaaattgctgacaaacaggtaatacaagtagaaagaattccctaactttcaaactctcagctcggggaaaagctgaagtaaaagatgtccccaaagtcatctggtaaacatgccttccaaagagaatgtgaaatgcatagcaaaacaggcacttaactaattttaaacgcctaattatataccgcctaaacagaattatcaagagacttgattgacttccacagagctgtgattgccatcaagcaaactcaaagaaataataaataatgtttgaccttctaatgtcctcaaaacttactcacagtatcaaaggatatggactgctggcgttccactcctgtattgtcatggaacacagaggtcacagatcaatttgaagttagtgatgcggagtcatttaccctgatttatgtagagggtacattctgaagaaacacttgacttggataaacaaaattaataagggggctggactacttgaacaagaaaaagagaggaatatgggaagaaggcatacaaaacatgtgacatttaagatagtttaccccaaacaagtaagaatggataatgtcactcagaacttcaaagacacagctttggcctgaaggtgggggttaggtatgaaagaaggaaaacaaaggggtattctttactagctgatttgtaagacagtcttgaagtatgaagtatcttcaaggaatagcgatcatgaatgtttaacttagtaatgctaaactaagaagcatctctggttttgaaagagattgccatataaggcaaaactttgcaccagctaactggtgtactctatctataaggctcaccttagaattcaatacaggaggcttttctgtgatgaataaaaagaaaaccaaaagtcaaacctcctgacatccgactctgtaactcagctaggatgaaaaagcacactcctgcccattgatctaatgatttagttttcctgctgatgtgacttgacaaaaagttttcagtttgttagtatgtctcaatacttcacatgcatattagccacaacaatattctcttcatgttgatagttcaatttgagtcaaaatttgaaagaaagtactagtgtgttatcttacccaagtctctttgccctctttggaaaattgcatcaaactccttatgacataataagaaataaatatttggtctctgcccttgtttcttggcacatagtccttaaaaactttggaaaccccaaagtgataattgtctttttgtatgccatggctgggcactgcagcaaggcctcaggatgggggagccagttgccagggaaaccagccacatgattgcagagtgggaactttcagctccagcctctgacctccaagttctgacttccagagaggggagagggactgaaggttaagttgatcaccaatagccaatgatttcatcaatcatgcctacataacgaagcctccatagaaactcagaaggatgggatttggagagcttctgaatgctgaacatgtcgaggttcctggggttgccacctccagagaaggcatggcatctccttgccccttcctacataccttgtcctgcgactgtcttccatttggctgttcatcagtatccttgatgtaataccacaatactgtttccaataaaccagtaaacctaagtgtttcctagagttgtgtaagctattctaattagtgactgaacccaaggaggggtcaaggaaacttctaatttctagccggtgggtcagaagcataggtgacaacatggcacctgtgtccaaagcaggggcagtctagtggggccgagcccttaacctgtgggatctgatgccatctccaggtagatggtgtcagaactgaattgaatgacaggacacccagctggtgttggagaactggttagtgctatggtttgaatgcatctccctaagtttatgcgtagaatcttaatccccagtgcaacagtgttgagagatgggaccttttaagaggtgattaggtcatcaggcctctgcccccatgaatggattaatgttgtcacctcgggagtgggttcattactgagagtgggattgctacagaagcaagctcagccctcttttgctctcatgcacaccctcccgccacgtgataacccaaaaggccctcgacaggtgcagcccctcaatcttgaacttcccagcctccagaactgaaataactaataataataaatttctttcctttattaatgatccagtctgtggattctgttatagcaacacaaagtggaccaagacagttggtgtgaaagaaaccccctacacattgtggtgaccgtaagtgttctgtatggagagtatagcaggaggaaggagtttttctattgttcactccctatctgaaggggaactgacatatcagaggtaatctcaaaggtcatttctcacaaaatcagtaattatgttgcacatactgtgttaagccctttctaagcactgtctcatttaacgttcatgacaacaaggtaggtgtgattgttccagttttacaaccagaaaacgaagagtgggcaatttagctgagatgtgccgtacactaacaaaattaggatttgaacccagggccatgtgactacagcctgtatggaggggtcaatgaaaacctgaagaaaactaccccccaaccccatccaggaatggcgaaggaaaaagactgagctaatttgtactaactttcccattctgcccccaaatgggcccccaccatggaaatggaagtagatcataattttataaatcaagattcttcctacagcaccatctaaatagcacagctattaataaaacttgtttctcacttccttatgtttaaatctgcgttcaggtgtgaataaaacctttgttccttatttccactatctccacctctgaggagggacgcacataaataaatataatttcttccgggcccagggctcagtgcaatgctcaggcaaagtaggagatatcggttcaaatccgggcttaggattcaatccctggaccctgatgagatgggatttacaaaggtaacgctgcccaaggtcactcagaaggggcctgccatttccactagcacaggcagctgcccggcagcagctcacagcaagaagccactcagctatcggcctggctccagttacagctgtaaactactgctattctacgggaagaaactggggccctcaacaggaaaagacctcagagcactatattgccagtccaccctggtttaaatagaggagctctacttgaggaacaaattggacaaaaaaaaagaaggaaggaaacaaacaaataagtgaggaaacaaagaaagcacactgccttgttaggagtaagaagaaaatacacaacagccaatgttctcatgaccatcttttttttgttttgcttccctgactgcacagttatctccagtgtgatcatttaggagaggaatgatttatcatttctgactaggtaaaggtaaccatcttcaagccaaagatgtttgggatgggccaacaagttgaaacctacatggaaaaggcttaactgggaacgtttgtgtgttcaggtagacagatccttcaactacagcgttctagacccaagattttgtatcttcctaccttactatgtaggtaagtggaggacgcatgaaatttatagcccaactatatgtgttgtgtaccccaccatttcagaatactctgaaaaaaccgaatgtcatttatgcgacttccacatgctcaattctacaattccttttacttatttcaatgaaatctcaagtcctacaggcttccattgacttaataggcagtcttcttttttatctctcttgcaaaagttcctccatcacctggcacagcaaagaaaaaaaattcttttgttttgagacagggtctcactgtgttgcccagactggtgtgcagtggcgtgatcttggctaactgcaacctccacctcctgggctcaagcaatcctcccgcctcagcctcctgagtagctggaactacagatgtgtgccaccacacccaaatttttgtattttttgtagagacggggttttgccgtattgcccaggctggtctccaactcctgagctcaagcgatctgcctacttcggcctcccaaagtgctgagattacaggcatgagccaccacggccggcacaaagaaactattaatgaagttactcaaacacccaaaagtggatggtcccacaaaccaaatacactccctggatggctgtcatcttaccttcagtgttttacccaaaactgttggcaagacaggtcctagtggaatgattttttaaaaaaattaatttggtgtcagtgtgagtttccttaaggtaggaaatttttaaaataacttattaaaactcacagtgttggcaagatctcctcccaatccatgcccaactgtgcagacaggagatgaagacaaggtggggcctccctcttttttttctttttttactaaatttggcaggaaaagcaaagggaagctgcttcttccagttccccacctgccccgcccttctgttccacagagaacagaaagtgccgtaagcaacaactaagtttacactggccactccaaccacatatctagcaataacttcataatttgtttttaagcatacattttcaggaggcgaggcgggggacaggatctactgaggtatacacacttcatccttgaaggaaataaacatgagtcatattcaaacattccaaatcaaagcataggaccctggttgatacatcttgctcctgcaatcagaaagaaagagtttagaatctaccagaaggtaaagttaccatacaagttttaacaaatacttctgcagcggccagtgagaactcaactgctacaaaaatatttttgactttcttaatatgaaataaaaataccacataactccaacatttcacaactgttaattaggcaagatgcattatcatggtatgtacagttgagccttgaacaacctgggttggaagtgcacaggcccacttatgagaggattttcttccacccctgccagccctgcacaagcaagaccaacccctccctttcctccaccttctcagcctactcaatgtaaagaacgatgatgagtcatttccacttaatgaagagtaaatatattttgtcttccttatgatattcttaataacatttcatttcctctagcttactttattgtcagaatacagcaatatattatatatggaacatacaaaatatgtgttaattgactgtttatgttaccaggaaagcttctgttctacagtaagctctggtagttatgttttggggaatcataagttacacccagattttcgactgtgtggaaaattggcgtccccaaccccattattgttctgtgaacaatttcaaatccttcccctcactctttaattctgcagaattatttttcgggtgttttaaagggggcaatagcaaagattgggatgacatgcaaaacatcctccagacaaattttagtctccatcttattcttttgttgaatgaataattaaagtcttcagccattatgatgcaatcctccagagagctacaagaaatacaaggaaaaataacagaactcaacatttctttggaatccaccttcctcaaaaatgggtttaaggtgattgtaacccaaaatgaatacagaaaaagccctaagccttggtgtcacgggaagcccaattgttcaaaaaagagaaggagcataatcacagttgtccgtctgtatattgggggactggttcagaacccgtaagtagaccaaaatccgtgcatactcaagtcctgcagtcagccctgcaaaaccctcaaaggcagctgtgcgcggtggcaaacgcctgtaatctcagcaatttgggaggccaaggcaggcggatgacctgaggtcaggagttcgagaccagcctggccaacacagtgaaaccctgtctctactaaaaatacaaaattagccaggtgtggtggcgtacgcctgtaatcccagctactcaggaggccaaggcaggagaatcgcttggacctgggggggtggaggttgcagtgagtggagatcacgccattgcactccagcctaggcaaaaactctgtcaaaaacaacaacaacaacaacaacaaaaaaccctaaggctctccctatacactggtttcccattcaccaacactgagttttcactctgcatgtggtcgaaaaaaaatccacgtatgagtagacacccccagttcaaaggtcaactccacttctcactagaattaaaaagctttactccaaatgtagttaaaacagcccaatatcttcctcttataagcagtaattaaactttagtgtggataagattcatctggtttgcttacttgaaaatgcagatctttggctcaacctctagaagatgggacagagccagagtggggttggatggggttgagaaatctgcatttcaacagtagtccacaggtgactctatgcagaccctggaaaacactctatttaagggctcaccacagccagggaccatattccaactgtcacttttctaggtctcattctcattatttgttccaagactctctcttatttttgcaaatttaatttaaaagtatgagcatttcctgaatgtaaccagccactctaagccagagctgacctatgagggacacatacgtggccaaggctagaccaaccagaacctctatattcttcacactgaacttgaaattgggagtgtgatctagtgaaatcacaatgtactcaagcttaactagcacaaagacatgtaccaatgcttggagaaggagcagggaagggaagagcatttagtaatagtgcaaatgatgagcaaatgcccgggagcaaaaggagctgaaaatcctgtgttcctttagtgggtctttgatcccacatgccccacaaaccaggtgcatctggccctgcttactggtgacttccaaggctctgaaaggatattttaaccataagcaattttcatctcatatgctaacttcagaacctgaccttcaggtaagatgttatttcactggaggagaacttaataggtccactcagaattcatggcaagcaggtcatggcctgagaagcagaggggcgagtctgctgagagccagtggcaaagcagagatatgcagcgagaaacagggatgaggccaggcacagtggctcatgcctggaatcctagcactttgggaggccaaggcaggtggatcacttgaggccaggagttcgagaccagcctgagcaatatgacaaaaacccatctctaacaacaacaacaacaacaacaacaaaaacacaaaatgttagcttggacgtggtggcgtgcacctgtggtcccagctacttgggaggctgaggtaggatctttgagcctgggaggtgaaggctgcagtaagctgcagtcgcaccactacactccagactgggtgacagagggagactctgtctcaaaagaagagaaagaaacagggatgagaaattagagaactctgttcaggctcctggtgattcccattcctggttctgccccactctgagatatggcggcatcccagagtcctaaagatatcccaagatccttctaatacacacaacgcctccccgtgccctccaccctggcttgcctgttagctacctacaacaccaaggctcctaacaagaacactaagtattcagacagaataatatgacagaattctgaaagccttagagatcaagggtgacccttgggggcagtcctgagaggccatttgcagactaacagttgccttgaggtagtctgcagggagggagagcaaaataaagcacagtcaaaacacaacgagacacaagaagagtgacacagagagaaggtgcctcatgtcctgaaggattccagttttcaatttcaccatgggttccatgatcccactctaaatcatccctaaaaattccctctgttacttataaccaaagacaccctacaaggagtactttttaaatattttaggccaaagaagaagtttctgaactctcaataatttacttgtgacccacgaattgcagaacaatgcaattcgcttaccctacgcatcccctacccaaatgctcagagggtctatgtcttcacctccacaccccagtcaccctagtcagcaactggcaggatcatttttgcacagaatcggaattttagcacttcacacagtccaaactactaggaatggagactgtactaaagtcgaaggactcttaaccacattatgagtcataaataaagagcttgcatttatcacttaaacacttctaaaccatgtctcttttttttttttttttttggtagttgttgctctgtcttggaaaagcagcacagataacacagctttcagaataaaatcctcgcatataaagggcaaaaatgtatgggtgtttgagcaatgaactggatcctagcagaggcattacaaaggactctgtgggaaaggttccatagtatccacagtcccactgaacacattctcaatgtgccatgatgcaaatccaacatgatgatcgtttggtgtgggttctcccacccccacagagtgtggtgggagaagacaccctctatatagtgtcccattttccccagtggcaacacatgtgcagaatagcagcgatgacggccacgcagagatgtagaagtgacttaacacccctgctgactctgcctcctgcccacctgagccatggagggaaggtctgccaactgtcccaggatgtcaggtggacgtgggaaaggcgagtagaagactgaggccaagcgagccagcgatccctaaataaaaggtgccactggggttttaacttcctttaaggtcctaaccaaggcctgggtactaaatgaaacaaagaggctctaaaaaacttgtcactgcagacggttgaaatgatgcacagccaatctgcctcccgaaagacagatgatcaaggcagagcccagcagccagcaaggcgaactcagttccagctggatttagggtcaaaaggtggccgaggcattgccttcccagaaggagtgagtcacgaggaaagactgaaagcgaggcaaggtggtggatttgtttttcccccagctcagtgtgggtattggctcagcagtatggaaaagtgtactagaagggagtgaaggaagtgtgcattccagaatgaatggaagatgcaggataatgaatggcaccaggcaggcgcagaggccaagtcggagaagcatgcagtgacctgcacagctagaaggggctgggctgccttgactgacccagatgggtcagacagaaagacggtgtttttttggcacaggttctggaactcaacagagtcaaggaccagccctggcagccaatatctgggtgacttgcctcagcctctggaattctcaactgcttcatctttgaaatagggacaagaataatacctcctctaatgaagctgctaacatgtatttaaagctttttgtagcaacagcacagaggttggcaaactactagcctgtaggccaaatctttctgaccacctgctttttacaggccatgagctgagagtgatttttacatttttatatggttgaagaagacaatgaaaatactatttggtgacacatgaacacgatgtgaaattgaaatttcggtattcataaataaagttttattggaacacaaccacacccagtcacttacagattgtctatggctgcttttgcactacaatggcaaaactaagagagctgagagactgtatggcctgcaaagcctaatggatttactatctggccctttacagaaatttgctgacccctgcattagccaaaagagagcacaatcagcagtgcctcattctacaagtaaagaaatgcagacagatcgtgaaatctttttattaagatacaattcacatgccataaaattcacccttttaaacaatagaactgaatggattttagtatattcaacggttgtgaaaccatcaccacaatataagttagaagatcaccacccccaaaagagatcctatacccattagcagtctctccccattcctctctctccagctccctgcaactacaaatctactttgtgtcttaatggatttgccagttctggatctttcttataaatggaattgaatatgcggtcccttggtgtctggcttcttttagttagcacaatgtttgcaaagttcatcaatggtgcagcaggagtacttcattcctttttgtggctgaaaaacactgcattgcaaacattcatcacattttgttgatccaccagttgatagacatctgagttgtctccactctttggctattataaatcattctcctatgaacatttatgtacaagcttttctgtagatagacaatttcattcctcttgggttcatatgcaggagtagaaatgctaggtcccagtttatctatttgttctttgttgcgtgtggtttggtttcacatctaagaaaccactgccttatccatggtcatgaagaagatttattcctataatttcttctaagagttttctatatttaggtcttaatactttcgggtcttcgatgtgtatgttgtaaagtagaggtccaactacattcttttgcacgtgaatatactgtttttctcagcatcatctgttaagaagactattctttctccactgaattggcttggcacccttgttgacaatcagctgaccataaatgtaagggtttatttcttgactctcaattctattccattgatctgtatctccatacttattctcgtaccatactttcttgattattgtagctttgttttaggtttttttattttttatttttttgtttttattttttttttgtttgagatggggtctcgctctgtcgcccaggctggggtgcagtggcgcaatcttggctcactgcaagctccgcctcccgggttcacgccattctcctgcctcagcctccctagtagctgggactacaggcacctgccaccatgcccagctaatttttttttttttttttgtatgttagtagagatggggtttcaccgtgttagccaggatggtctcgatctcctgacctcgtgatccacctgcctcagccttccaaagtgctgggattacaggcgtgagccgccgcgctcggtcatctctgttctttttcaagtgttttggctattctggcttcctggcatttccatatgacttttagcatcaatctatcgatttctgccaaaaaaaaaaaaatacctgggattttggtagggactgcaattaaatctgtagatcaacatggagagtgccaccttgataacaataagtcttccagtctatgaacatatgatatctttccatttacttaggtctttaacttctttcaagaatattttgtagttttcagtgtatgagttttatacttcttttattatatctattcctaagtatttttgatgctattgtaaatacaatagcttgaaatcttttttattagcataaattttaagttggaattgtagaaagtcaatcagtagatgtacaagaaacaaggaccaaagcctaacagaaatcgaaggtaaaactaaagctggatttcagggagatactatatgtcaagattcatgtcaggctttttaagcttcatgagagcacaaatagtgtctgtcttgcttatcctgcacacctagcacatagtagacatctaaataaacacctgttgaatgaacaaagtttatcagtagcagaaaacacttaaaatctgtattttctaatctaggcaataaatatgcccttaaatattcatttcttcaagccctaggttggtcttaatggtgtgcattgaagatattactgacgataatgaggcaaaatattctcaagcatgacacaagtttggtgagggcccctgccaggtgacaaatcccctttagtctttcccagctagaaagttcaagacaatgtcactagacaaggaagagaataagagtaagcaggagaggaagcacctgagctttttgcaaacagcactggtccgccagacaatgatgtaaacaacgtctaatgacacccaaaggtaaaacaagaaatgctgcagaaggtgctagaaaagaaagagtgaaggggggacaagaagggtgagaaacacaaaccaatctacaggagaaaaatgttgaaactcaaggctaaatatggcatttatcactactttcctttgttgtcaagggtaacagataatcaattaaaataataaactttcgttaaggacaagaatactgtatgtgctgcaggggcaccatgctaagtgtctcatgtacataatctcattaacttcttgggacaaccttaaggcaagtattattatcatcacgattctagagcagggacaacagagacctggagatgtcagggtaattcacctaaggcctcgcttctccaaactgccaccgttggcatttaaacccaggtctcctgactccaaatgtgtgcactatgctgaatatgtatgaatacagacatacacgcatattgtgtacacttacaagtgtagcaaatatccagtgccctaatatggtggtgaatatgtttagttactaatgtgaatccaaacaccaatgaaagattagaaggaaacaaggtttttaggaccacaagttaaagaggtaggagaacattaacaaaaaggttacaaatatcttgccattaaaaccccacaaaccatgaagcctgagattccattgtttcctgcagccactgaggcaatgctggctttgagtcctgaatctgtctcaaccgtggtatgtaactttggacaagtcccttcttttagcaaactgcactgccctaatttataaggccattgccaagtctaggattctaccaattcatgctttttccaagctttcaattattaggtaatcaactttcatcgcacacctatttacacctttaccaaactcactggtcaattataattctcagtccctgttaaaagagaagaataatatttgggcatatgtagacataccctagaagagaaaagcattttttaatgaaaataaaaaaagaagggtatgggagttgggtggagagatttactctgataaagtacatcttgagccctttctttcctggctggtccatatttctaaatcatttccttgctttcacatagtaaattttctgctagatgtctagatatgctggagatcaggttacagtgtgaaggacaaaagataaaaacaatctgcatacttccatctggctcttcagaacaaagtctagagacttgaaatgtgaggagagaagcatgctactctagctgcacaacagatacagcaaaatgtcacagaaacaaatctttcaagagaatccgagatgctggaatgcgtatttcaccagaatttactccgagagcattaaaaaaaaaaagttaaggctcagatactgaacacaatgttgcctctgttacaagaagatgaaaagttgaaacagaccaatgcattagaaagtccatactgtactgcagagatgctattcttattgctgtcaaaagactcctggttttaaaacaaacaaaaaaacaccttctagattatttattcagacggtcttgcctagtttttaggactcaaaagtcaacactcgaggtttgactctggtcaaactactcctttgccacatggcatcacgccgcgcgagacagattttcagtatgaaagaaaccagcagtttccaatacaaacatgggctttccaatatataaaatttaagaaaagccagggtctgtatagaaaacattaaactggcttatatatcaaaatcatgaggtttaagcagaaatgcagcattaaaataatttacaaaatggctcaacaatgaacattttcctctgtgaaaaaaacaacacccttaatgtttttcatatggcacataaattttacaatacctgcaggaatattttcattggttaaaccaacaccataggtctttttagctcttaagcatattacgattcttgcctttttatggcatttttgttgttgtttgcacccaatgtaataagcttttgagaacaagaaacaaaccacaataaaaagaaaaaagaactacccctttgtaactgcaactttcacaagaggggtgggggagcagagcgatcgaaatctcgtttttatagctgctatcttgatgcaattagtgtaaaataattgtctgcacaggccaaagtagaggctaagttgaggcacttgagtgcattcccgaaaatgatttccctgcctcttccttcagcctgctgcagcagatgttggctgttaagccgcacagacgacacagttcatgacttttctaagacggctgtgtgccacatctgcagttgatgaaatggagagcagaagtgtggcagacacacagaggagagtgtgagcgaggcaggcaggcgcaggctgggccaaaggaactgtcttgaaggctggcctaaaaatagacacatactcacactcctccctccgcagccagctcataaaacccggcctgcctgtcctattatggagtcagcctatggcagacacttcctgcatccagcttgggctgcagataacacaaaagcatggaggcaagagtggaggggagcaggcggtgtagcatcctcaaactgcagcttcgctctccgagcctcggtataactgggctgtggtccaagttcagctgggcccccagagaaaggcaatgcttgtgtttagcccgcacaatactgacataacattaacagatttacatatgcaaaactgtgaagcaacaggcattccccctcaattgacccacagcttgtagtgtctgccgagttattccccgcttcggctctgtaaccaagtgggcggcatgcgaataccatctgggtaccacttattgaaaactggcagtcgctctgtaataggcaagctggcaataagagggaagggaataaattgcatcatttagttaacatccacttgctttgcggctgttaaaaaaccatgactgaataataatttggttatttcttttgccagaaactgctgtcagccaaattgtactacgcacgctgcagaagtcgacttgcaaaatttccacttgagaagggactgaggaggattggggcaaaatgggcaccaacctctggctgttagcagtggcgactcctgctgcacagtggctctgtgtcctccaagtgtcatcatcccaaatgtagttgacaccaagccctggttagccacctggccatgctgagccccagcaccaagctgtgatgtgtggtaacaccctcaagcagctcagatccaagggtgtatgtgacaagtggcatctacgtgactctcagctagccgtggaggcacatgtggccaagcaaagcttgagctgacatcccccagtttctgcctcaaaacagagtggggaagcaggtccacagaaagcctgagagctgcaggcctatatccctctacttctgtgcctggagcaggcagactgaatcatttctttctggtttactcacctgctttcaaatacaactaacaaagaaagtgacagaaaccttagaccaccacataaaggtagaagtgatcttcattcagtaaaacccatgtgtttgaagtggttctcttttgaatatatttgtaaagatatgaaattctcttatttactatatgctgtgcctgtgtgtgtttacacactatatatacacatatacacacatgtatgtgtgtatacacacatatacacacatatacacacatatatgtgtgtatacacatacatatacacacatatatgtgtgtatttctattactttcctttactatgtcttttaggaaaatcagagccgaatacatacaagtgaccaatgccgtagcagtattaaaaagatataagtacttaaaagatataaataaaaatatataaatccttctataaaggttagaaatattttatgatataaatccagttataaaatatgtatttatttcttttaataatttatatcatctataaactgctatagcattggtcaattacatatatttccactttgactttttaaaaagatgtatcaaaggaaagtaaagaaatggaaaaaaaaaaaaaggaaaatttggaacaaaaaaaaggaaaaagcaggaaagactagacagactctgctgatcgtggaagtactacaagtgaacaaagtttgatcaaattcaaagaaaaaaggaagatgagaacatttgcagtgacaccaatggcaaaaacatacgtttccaaaatccaaacctgaagcacttgggaaggaatggctaaacaatctttcaaagcccaagacatttaaagaccactccattttatatgtggggtggtctttctgaaaaataacacagttggctggtcatgcattaaaataagcagaatatgatcacaaagaggtaagagagacaaaggagacaagaccaaatcgtcatgtattttacaaatcacaactgttgtaagttaccatatgattaagtgaaacttggataatagttcttttccaggcaatgagggtagtcaagaaagataatagggctttttttttccagattcagcttatgattgtaatctcaccttgctctaaacagcttagaaggcaaagaaaagacaaagtcaattctgtatctagagacataaaaaaatgttaagactgtaaagcaatacgctgaatttgcttcttgaaaggatgagaaagaaaatgatatttccaagtcaccacgcttgcagtctgttaaaaggaagcaaaatagcgattttaaccaggaccatgggtggtaaaacaattttttttttattaaaaataaccattttatttacacatgtacatgcgcgcatatgctccctgaaaaaaatcagcatgctgtcatggaaataccactggtctgagggagagaaggactggttttcaccaaagctcagccactttctagttgagtaagtgaccttgggtaagtcacagtttgtctgggcctaattttcttttctttgggaaatagtgatatgtaacaaagcagtgttagaatttcccaaatctgagagaaataatggttttcctaatagctctttattgcacatttatcattccaaaatgtaaatccatcctatgaaaataaatgaatcagagttacacaagatttcaaaattactctcattttactttgcaaattacacttagggtaaatattgatggggttttgtttgtttttaaaaatacacatgctgaaggactgaactgccttatgcaaatatttatcttctagaacattatatgctccttaatgtttgtttaaaatcctaaaagttttcagtaactgcaagatttctatttaatatgcaattccataataaatagctataatataaatttaacctatatatatcgttttcgcaataggtaggaaccaaaagtaaaagtctgaagaacctacaacccaaatatgatgtaagccagcttaagattttggaaaatattacattcctagaaaacagatttttaagctattgccatgtcccttttgttgctgcatatttaaaagtaatcacactctccctggttttcactgttttattcatcttaagctcctctaccagtgaaccatgggcacaggtttccagaaatcactttaaatgttgcatatatcctggcaaaagtccaaaattctagccaacatcagtattttcgagttaaccttaatcaactctattgcctttcaaaagtggagacaatgcacttgacccttgttccatggagtatgtgtgtgtggcttttccccaggaggggtcatggatttgcattaatccatacaacaccttcccccacccacctccccacactccaacatccaactgcagacattcacaagccagctggcgagggttagtggtcggtggccaggtaagagagtgaaggtaactggtccacaagaggcaggaattcccactttggcctcattagcagcagggccaagcagccaaggctaaagttaacattcacgaaatacacctggctaatcttgtaaagaataaagatttgctcattaactgagcttagagaaaggtgtgacccacaaaaccgaagagctattttcaggtccttaatggtccaaatttcgtgatcaagttacaaattccatgtggttcttcataaggtccctttaagaaacttttcgatgatggaacagtggagcctctggccatgtcattcatatacacacagagatgcacaaacacctacccaccacttctatgatgcagggttgaataaagcttaatggaagttaaccttctagcctgggtgcaagatacccaaccaccgagatgctgttcatcaggtaccccaatgcagcgaagcacacctccaaagccttgctgaatggcactagcaccagtgccactccttgctcatttctaagaggctcctggacagtgaagtcagggagctgcctagcctctgcagcccactctaaacggacgatgatttgctgatggtgatttctcctgcaaggactacccagagccactaatggaggcaagcgctggcttgttgcttgagctttcatctgaaaataaaactgaagggtcaattttcatcatgagcttgagaaaagaaggaaattgcaaagaaaggaaggggagagagacagagacacagagaggaagagagaaaggaaggaaggcaattgcttgctacgaagacaaaacaaattgtgaaatctagaaataaatactcagggctgaattctaacacaactgtcactgctgtcagttttaggaaataaaactcttatgaaatacaaaaaggttcaagggggaattcaatctatctgagttttacataaactaaaaattacaggtttctgaaacagttgggattagcattcttcttaggtagtttaggaaaggttaccctttcctccccttcattttaacactgtgaggggtctgcctgcctaccaaaatgcaaccagtgcagccccaaccaccagatcaaggaacaaacagtgcaggactagacagcaggtttgtggaaacccagcaagaacgctcttctttgaggaaaggagggcttggcaggtaaacaaccatatcaggccttatccaaaaagaaggtagaggtggggcctctagggcgaggcccagatggtctccacggattgctgtgctcctttgggccccgtttgacctctttttaaagggctctgaataccactagggaaccaatgtcacccagcaagggccactcagagccacacttaaggggcaatgcatgtattttcttccttctatgacattagaaggcaacttgctgttcttggggcccaaggcagagaagaatgtgaacacacaaagttcttgtagagaattagtcctggcacaattacctaatggcctcttcaaccaaacacctggttggctacttatcagtagcaaccctataagcaacccattccagcaaggtccagagagaagagaggacagctgtgactattcaatcctttggtggtcatcatcacctcccatatttatgaggccttttggccacaatggtctgagctcttgttgtgtacatctttattagttggaagaaaaggtctaaggtttctttcccaactcagagaagtcctcttaaaccaaactgacttagccagccccaggtcagtacaaacagtcaatttcataagaggacaaagggctttggaaaagaagtgaacagagagagaggatgaggcaatctgcagttcctctttggctggggcctctcaatggggcctcattctttgtctcaaagatagacaggaattccagcatggacaacacccccaagtttaaatatacctttgaaaatgtgggtgactggcagattattgtaaaccactgatcatcaccattaatgtgggtgttttaaaaagttggccctatgaatggaggttgaatgcaagatccagctctagtttaaaactaaacacacacatacacaaatacacacacacacaaatagcgtaagtttatatgttggttatttttctcccaaacagcctcataacagtctagcataattcaacgtatttcctgtcccccttcctcaactgtttttgtttttgtttttattttaagacagggtcttgtaccgtcacccaggctggagtgcagtggcactctcacggcttgatgcaacctcaaccgtcaggactcaagcaatcctcctgcctcagcctcccaagtactataggtgtgagccaccacacccagctaattgttgtatttttggtagagatggggtttcaccatgttgcccaggctggtctcaaactcctgagctcagacactcctcctgccttggccttccaaggtgctgagattacaggtgtgagtcaccgcacacaaccccatttcttttttatttattccttcctctctattccccagccccctgaaaccagacttggcctttacccccccaaaagaaatgagatgaagtcaaaataaaaagacaaagctaatactaataagaatcactaatatttcatcagcatgtgctatgtaaaaagtagtcagcattttgtttatactgtattgactcatttagtcaaagcaggaccatgatgaggtaaatattgccattttacagatttaggaactaaggcggtgtgtttaaataacatatccaaggttaataagaggcagagctgggattcaaactcaggaacgttaaccactgcacaacactgcctcaaaggtgtattaacccaaagaagttaattgttgacttctgagctgctaagggcccaccagttggttatatattgggttttcaaggttaatattaacttaatgagacttatgcactgactctatatatgatgcaactcaactcttagcaacatactgagcatacaccacttagaactaacacaaccgaaagaatgataaattaaataaccttctcccctacctagtgtttctttcatggcaacagttcagtcgctggggttttccctcatctctaacttctctactgagtaaaggcacatgtttttagactccaaaatacatatactttattatttaaaaaaattttttgagatggagtcacactctgttgcccaggctggaatacagtggcacaatctcggctcactgcaacctccacctcccaggttcaagcgattctcctgcctcagcctcccaggcagctgggatcacaggcatacaccatcacacctggataatttttgtgtttttagtagagatgggatttcaccatgttgcacaggctggtcttgaacttctggcctcaggcgatccacccacctaggcctcccaaagtactgggattacaggcatgagccaccacacctagcccaaaacatatatattttaataaaacatatctcaaatatttcagttcacaggttagatataatgggaacaaaactgtctcaatttcaactgtaacatcaaatcatcacatgaactgagacttgctgaaagcccttgaggatggaagaaatggtaaattatattacagaatactctaatgctgggagtaaaaaaaaaaaaaaaaaaaaaaaaaacgctctctggtaaacttttaatttttttaggcctctttatatttagaacatgcctttctaaaatttgaagctaagcatatgtcaaaaaattttttttcaaagaaccttatttttaaaactataactacaaatgtcagacaagttcattgtataaaagtactgcaaacagtatagcataaataaatcaaaagcaagtgtgtgccccactcaccctcccgcctccagccctaacacagtttattcttcagaagtagccacatcattggagttggcgatggtacaaagcggggagaggaggaagcctgtggagacttagctctctcatctccatgatccccacctgcccccaagtaaaacgattataaatcacatagcaaagctggttgagagcacaaacccttcaacaaaaccacgtaggtctcaatcctacctattccacttatccgctgttgaccgtgagctaatatgttatataaccgctccgtgcctcagtttccacatctgcaaaatgaggataacaggagttcttatctcactgaggcctggtgacagataaattacacaaactaatatttataaaaacaattaaaatcatactgccacagaagttttatttagttatctattgaatatatttttaaactaaattaacatccagtgaatagaaagcaaagccatggaagcatgtgctgaaagtgaccaatttaacttgtaaagaaaagaaaactactggaaaaagaagaaaatagattatgtttcaataaacccataaggataccacttatgtgaacaaagcctccatttttattaattcaacttggtttgtggttcaaacccttaagatcagtccattagacaccagctcatatattcgggtaaaaaaagagaatttctttagctatttacatttatcatatttataccactccgcagcatacagctgaggtaaaaagcagcaggcttgccatgccattgccgcttccgagaggcccccttcaaacagaaggcactctctgcggctcctcctcagacacgatgaagccgccattgttgccagggtttccttccagacttcacggagttgggtttcacttaggagacaaattatataactagagacacaaaaattcatgctcacttcaataatattaccaggaaacactgagaaaactggtttttatctaatatttatgcacttctgaatgagattctgaggcaaataatgcctggaatggatagctttagtgttgagtttggtgttcgtgttctggcttaaatgttcaaaggggtaaatacaaatttttccaaaggaaacaattcctacagcataaaactatcaaggttccatccacaaaaacattctataaaatgtcaagacatttataaaagtgtgctataaaacaaaatgacataaattacaggatatttctacttgttgattctgaacacaacaatatttaactatcttttccccaaaatactccagggattactcaaacgcaagggtaaggcatagaaaactacttttctgtttggtgaatggcatttccttggtcaaaagaaaaccttagaagcataccaaaaaccaaagtaataaatgtggcaatggcctggacagacagattacaaagatgatagccatgattcacatgcataacgtttcctggttcctcaagttatagtttatgttcaatacataaacttctggcatatgaaacaaacattctatctttagttatttgtttaaatggaactttgcatttctattcaaaaaccaattttaactgttttgaatagataacataaaaatagagacaggatcattgccacataggtgggagtggttataactgtgatacaacaaaactgcctcagatataaaacatttgaatcttttgatctctaccatctatgatcgggcttctagtataattcacatggaaagaatttaaaggatggaatatactattaaagcaaattcccttaagtttttcatattatttaatttcatcaaatgcatcaatcacctctaaaccattccctccaggaagtgttgaaatactcagcatttagtgcctttattttatcctaattttctgcaacaatattcaaccaagcatgccattcatcctttactaagtgcctgtctttgtgcaaagattccacaaagacacacagataacaaaacaaaatccaccttcaacagaattaagtctagcttgaaagagaactgtataaagaactaactgctaccagtattactgaacattattctgtaaggcagaaccaatgcaataaagcaggagaaagaaatatgggaaaaggtgctgatattgctacctatcagatgtcaaatttcttagtttttggaaatataacaaaaacacagccctaatgaaatttcaaaaagataatcaaatataaaatgtacaaaaaacagaactatgtacatattaaaaataaccagtaagaaaatataaatatttctttattttctaggttcagacacataactacaaaattttcatgagaaataaaaaggaatacttgaataaataattatattagtttcctggatgagcagatgtaatacagaaaagataaatttttctgaggtaattaaatatttagtattacaatcaaaataaaaaaggaaattatttttaacaaaaaattccaaaggtcatttagaaaaactaaaaaataaaagcaaataaaaagttttaaagtcaaatagggactatgaaatatttgatattaaacatattataaagtacaataattcagacagtatggaactggcaaagaactaggcaaaatataataataatattgatggtattataatgacagcaagtatttgcgtagttacttaaatgccaggtgctttgtatttacagttaccaaataatttatcatcctaagatagactattagattcttttgaaattggtatttgaacaccaacaataatataagcagaataatcttcttagtacatacacctgtacttcaatcagtttcttggctgtacttgtctcttaccacatcaccagtaagtttctagaagaatgtcaggaaaaatgtcagtctttattatttttattattttcataaaattgcctacagtatccttcaaagttgtattttatagttaataaatacaatttatttaattataccttcaaatgtcagtatttctggcccataatattaactgagaaaatattcgttccacaggtactagagttacctgttagcataccaaatttccctaaattgaggatattctcaattctactatgtggtattgaagtccctaaatataacagcccaaatattttataggtcatcatttaaactctattctgaatatctttgacaaatatttttacaagatgaaattcatcaaataaataaacttgctttataattgcttgaaatgtttggccaaatttggatgctgcaaaattgtaggcctcatcaatttcatttctatacggaattcacattatctgatttaaaataggagttccatcaaaagcttcttcccactggtgagaggcttccaaatacagttacagaatttcagaattaaaaaatgttcactttttgagctcacatttaacttgttcggttcttcactggttttttcagggataaaaatggtaatattgtcctgtttgcaatcttttttttaccaacaactgaaatttgctaacagtctcaaaagaaattgtgtacatatgtatgttcattctttgagttattaaaatttccaacagagtctgaacaacatgtaactacaatttagagtgcacatttacaaaagtttaataacatcaatggaacacttacactgatttacaaaatagtttctcaaagtctcaaacatttctaaaacctaactgatagctcaagtacttatttgtattcaacattagtctcaaaacagaaactttgtagtttggttatctacgtatatataaaattatttataaatgttggtagttagctacagtttctattcaagtgatatatattgcagtttggatgcaattataaaatatatggtcactataatcacttccaagtatggtacatatttgctccatgggtttctgaatctagtaaaaccagtttttaccacaatatgttctccaccaaaattcaaatttaggctggatacagcggctcacacctataatcccaaccttttgggagtctcagacaggaagattacttgagaccaagagttcaaaatcaacctgggtaacatagcaagaccctgtctccacaaaaagttttaaaaaagaaattaggcaggcatggtggtgcacacttgtggtcccagctactcggaaatctgaggcaagaggatagcttgagaccacgagtcaaggctgcagtgagctatgatcataacactacattccagcctgggtgacagagggggactctgtctctttaacaaatttttttaaaaattaaaaattcaaatgtgtttaatcaccacaaaatcaaataactttatgttcaatgttaaactttttaatggaattcataattatttcaaataatgttagatgctttaccttcaacagaatgaaattctgttgacttaatttgttgtttgattccgtgtactggatggaaaaaatcaaactattattggtattaccttaactgagtttctatttgaaacatccaatggtattaatgtgaagctggcaccatttattgtctataaagaagttctgtaaacagtgcaatacattaaaagttatcaatcctctttttgaatgtgttttaaaaatgttagaatccaacgtaagtgaaattaatttagaaaaattcaatctaaatgaaaagtcatgcttcacaggataaaatgtaaacacattttctttcactttgtgtggacacagtctcctgaaaatatgtactaattctgaaacagatgcagtaccttctttagcaaatgggtcccctgatttgtatatgcttggtgatttcattatgtccccaagagtagatagtaaatgtcaaaaatattttatagaagttaatgtttatggtcaacttccttgaaaaatagggggaaattatgtaatatttcagtaaacaagctcagttatttttaagctcatagctgccaaaatggtttcttacaatgtatatattttttaaactttaccaaatgataaaaataaatatttgtgagtttacagtattcaaaaatgacaaaaccataaaacctactttattaagaacactcagactgcttctttacactctgcagcgggacttctcagcctttatttcagataaatttcatgaaaactaacctaaagtttcctatccgtccccaaccctactgaccaaattgaattactggtccctagccacttacaccagagcacacattccctgaaacagaggtgttcataatggtgtgcacagaaagggttaggagaaaagggattgctggtcatctttcacagagcaccatataagcatctcacacactacaagagaagaccatgaagaaataggaactgcacatagtctccttgtaataatactttagcataaaatgaaaaatctgagacaatgctaacccaggagtcactgtcccagataaactgacataaatagtcacttctttatataattatctcatttactgcccatggcacccccattagatggttctactataatccacattttcatgtaagaaaatgttgcctttagatgtttacagtgggtggaacgtgttccagggtccatgcatataatcaacacttaatattgcttctcagtgaaaccgaaaaaagtgcatggaaataagccctacattaaaatttagcgtatactacagcttttaaaatccattatagagaagtattatttaataattctagaactgcgattttttaataatcaaatcaaactcttacctcataccatacactgaaatacaattaagatagagttaaatactaaaaaaggaaaaagaaaaaagaggaggaagagaaagaagaggaggaggaagagaaggaagaaaaggaaaaaaaattaaacaattataagaaaataaatgggatgggtagaaaaatctgtcttacagaatgttataaggcataaatgaaaggaaggaaaacataaaaattggggtaattttccgcaaacacactatatatgtaatatgtattaaagtctataacgtaaaaagacttctaataaatcaaacatcacatataaaaaccctgtatataatacaaataggtaaatcacaaaagcactgcaaatggccagaaaccaaagggtgtgaaaaggacaatttcattagttattaaagaaagcacatttccagaattctataccatctttcaccttgaaaactgtcaaaaataaaaagctcacgcctgtaatcccagcactttgggaggccgacgtgagcagatcacgaggtcaggagatcgagaccatcctggctaacatggtgaaactctgtctctactaaaaacacaaaaaattagccgggcgtggtggcaggtgcctgtagttccagctactcgggaggctgaggcaggagaatcgcttgaactcgggaggtggaggttgcagtgagccgagattgtgccactgcactccaggctgggcgacagagcgagactccgtctcaaaaaaaaaaaaaaaaaaaaaaaaaaatctagaaaggttagtttactcaatgttggccaaactgcaatgaagtggaaactgccatagtcttttttttttttaaggttttattgtaactcttcttactagcattccccaaaccataacaaataggtgacatagtcaagagaatatcaatgttcaccaccctttgacctagtaaattcacttacaaaatttatcctaagaaaatcatcagagatgctaataaatgtatgtactacaatgttcactgcaatattatttatttcagcaaaagactggaaacaatgtaaacatccaacagaaagagaaagattaaaatcatggtccactgtagattgactggaagtgcagcaatctttaaaaatcatgcttacagagaatattcaatgactaaaaaaaaagtgttcatgatataatgttaagtgaaaatgagcaggaaacaaaactgtttaagatcatttgtaggggtttgttcataaaaacattttaaattagattgaaatacacaaaaatgtcaatagctgttttcttatggcagagagacatactaggaattttacagcatcaaaattctaaaagttgggtatatcatacaggtatctttctgaactgggaaatgactagcttgctacacggatgagagaagaaaaatattgaaatgagtaagatatatgtttggatgaaaatgattaaatgttggcattatctccatattatcttccacagctcaaatggtcaatttatatctttctctgaaaaaaaaatcctgcttatttaaaaaaagtaaaaaaaaaaaaaaaatccattgtgtaccccagctatggcacacagcacaaaatactgaccaccctgagaaaatgtcctccaaaactccttcacctcatggtggtcaacccaagccaagaactacgaaaaagaaaaggtgcccttctgtgtgtctgcttctgcagtgagacacaagaggaaggcagctctgaggcctggcagtcacattcaactgtctgtcccaccttcacggaagagtgaggtgaggtaatagaaagactgccagtcctgcctccgactttctgctcttcaagtactttattcaaacgatgaaagggaagaatgaccaagatgctgcattctaccttacatgccacattaggagagaatggctttgcccatgcttccccacccacagggcctccctgcaaacctgtattttttatttttgtttgtttatttattttttgaaactgagtctgactctgttgcccaggctggagtacagtggtgtggtctcagctcactgcaacctctgcctcccaggttcacgtgattctcctgcctcagcctcctaagtagctggaattataggcatgagccaccacatctggctgatttttgtatttttagtagagacggggtttcactatgtcggccgggctggtgacccgcccacctaggcctcccaaagtgctgggattacaggcgtgagccaccacacccagcaaacctgtatttctttaagacagtgtatgcacagcctcctcagagaatcttccttccctccccatgactgatgttggcctctcatcattcttttccatatgtgggcactgccagctgaactgccagcctcccttcctatcttcctccttctgaaggaaaccttcctctgactcggacgtgccccttccctaacaggggccattaacctcagggaaagctggctctacccacccccagaggtggaccagactggctgtcgtgactggttaagccaatcagggaatgacttctatctactcacaggaataagcaattcgggctaagatggcagaaagttttctaggaggctgatgaggaaggaagattctcgttctttttcttgtttttgttttttgtttttttggattttttttttttttgagatggagtctcactctgtcgccatgctggagtgcagtagggtgatctcagctcactgcaacctccgcctccgggattcaagcgattctcctgcctcagcctcacaagtagctgggaccacaggcatgggccaccacgcccagctaatttttgtatttttagtagagacggggtttcactatgttggccaggatgatctccacctcttgacctcatgatccgcccgcctcggcctcccaaaatgctgggaatcataggcatgagccaccacacccagccgattctcacttttttttttttttttttgaggcagagtctcgctctttcgcccaggctggagtgcactggtgcgatcttggctcactgcaacctctgcctcccgggttcaagcaattctcctgcctcagcctcccaagtagctggaactacaggtgcctgccaccacacccagctaaatttttttgtatttttagtagagacggggtttcaccgtgttagccaggatggtctcaatctcctgaccttgtgatccgcccgccttggcctcacaaagtgccattctcactcttaagagatggcaactggaccagccagcttctctcttcctctggctgttaatggcaggcagaaattgctgcagccattttgcctccagtgcaatgacaggaatcactgagaactcaatcaccagatttggctatgccccagggctacccccactctgaactgccagtgaaatgaactaaggcattcgcttactatttaagcctgtttggtaagaatttctgtaacatgggaatgaaaactgatagaatggacaactgctatttttaccagacaaacatagtttcttattcttctataaacagaaccttcattttctctttgggaatcacccctcacccattctcagttcctgcagtctagataaaagtgatctcccctcacccgctaatctaactccagggtaggcaataaagcaagaatggccaaccagagcactggctctaactggttggaaggctgttacgttacctactggaccagggctggggatggtggctcatacttgtaatcccaacactttgggaggctgaagcagggacagatcacttgagcctagaagtctgagaccaacctgggcaaaactgtgaaatctcatctttataaaaacttaaaaaaattagctgggcatggtggcacgtgcctgtagtcccagctactcagagggctgaggtgggaggatcacttgagcctgggaggtcaaggctgcagtgagccgtgattgcatcactgcattccagcctgggtgacagaaggaaaccttgtctgggggctgctgggggttgcgggggggacctactaggccaatgacagacctacataagccagctagaactatggggaaggaaaaacttctattctgctggaaatgcttacatggcagaacataaacctagatctgctagtagccatcttcctacaaagagaaatgagagagctaagaatgaaggagacaatgagaaagcaagacaagagatggaaagaggcagccaccccctgacaacactgttttagcacctggctccatctgtacctgaagctaatcaccaccatacttttcagttacgtgagtcactaaattatcttctgtttcttcaagaagaaaaaataacggtgctccataatgttttcgcatcattattgtcaccaccactgtgtaatgtgactacgattgactcttccacagacagtgaactcctgcaataaagattatgttatcatcctcacatcttccaggcctagaaagaacctggctcacacaaccaggtatggcactggaagcaagtcattaataccttaccaagctcagtttcctaatttcaaaaacaaaagtagtgaggatgtggagacactggaacccttatatactgctcatgggaatataaaatagttcagccactttgggaaactgtttggcagttcctctaaaggttaaacatagaaggtagcatatggcccagtcactccacttctaggtacgtaccaaagaaaactgaaaacatacgaaaacacaaaaatatgtatataaatgttcagagtagtattaaccaaaacagccaaaagtggaaataagccaagtgtccaccaacagatgaatggataaacaaaatgtggtatatctatacaatgaaatattattcagccataaaaagaatgaagtactgattcgtgttacaacataggtaatccttgaaaatatcctgactgaaagcagacagacacaaaaggccacagagagtttcattccattcatatgaaacatccagaataggcaaacctatagaaacagaaagtcgattagtggttgcctggagctgagggagttggaaggaaatggggtggagagaggatgagtgctaaaggtaatcatcagctaaagggtttcttctgtgggacataaaaatgttctaaaattgactgtgatgatgttatacaactatgtgaatatactaaaaaccactgttgaattgtgtacttttttgtttgtttgtcttctgagacagagtgtcactctgtcacccaggctggattgtagtggcacgatctcggctcactgcaacctccgactcccaggttcaagtgattctggtgcctcagcctcctgagtagctgggattacaggcatgcaccaccacgcccggctcattttgtatttttagtagagacgggatttcaccttgttggccaggctggtctcgaactcctgacctcaggtgatctgcccaccaaagtgctaggattataggcgtgaactaccacacccagcctgaactgtatacttaaaattggtgagtttatgtatatgaattctatctcaataaagctggccaaaaaaaaaaaaaaaaaaagccagctggaccagactatggccaaggtccctagtcaccacgacccgttgtgattacagtattttagatgaaataggaaaagatcgaactatgtgactgagtaagctcttaacctctctggaactcagttttctcatctataaaatggagatgcaagtctcttccctgtaaggttgctgtcaggatagaatgaattacacatataaaacattacaacagcgctggcactcactaagcattttgaatgccgtggtggttgcagagctggcatttgctgactagtcccttatatatgatcctagacagaatcactgcaaatcaaattctatcccatgaaaatcatcatcgagcaccagtatatttctttgcacagtattttcattcactattccactaacttaggaaattccaaagatgcattcccaccttcagtttctttttttctttctcttgggggatatggaaagaaagaaagaaaatgcaagtaagtatagcaaacagcaagtaaacatttttcatcttctacttgcaaagccaagggctgattctagaccactacaaagtacttccatatgtctccatcctagacaaaaaggaaaaagggccaagcatggaggcctgatgataggagtttgggtttaaaaccaagactctccaaccaagtctcagtcttgggcttctatcctccgagctgtcaagaaatggagggatatgaaagaactctacatgagtcctcccaatggttgtttctgcctggacagggagcaatgataatcactgtgggcataataagggcaaccacagtagtgcctatgatttattgagggctccttatgttctaggccttctgccctgttccaagtaaattacatacattaacttacctaatcttcaccaccagccttacgcagcaggtgctatcataccattttgtgggtaagaaaactgaagcacagaaatgttaatagcttgtctaagggtcatgcggcttgtcagtggccaggctggggatgtgaaccagactctggctcagtatctactgaactatgtgttgggctggattcttgactaggcacaatgaactactgcctttaaccaacagagtcataagcgctaatattattgacctttcactgagggcttaggatatgacagacactgggcatcatgtgaattatccttacaacaacccagacaggtacctattatcaacaacaaaatcattttacagaagagtaaactgaggctaagaaattgacccaaggtcacccaaatactaagggaccacactgaggctcagttctattttgtctgcttcagagatgatacatgtcaggaatagaataatttggtttttctattagtggaactggatctttcttgggtcttactcaaataagaagttgagcaaagacttctgggcccaacagatacataatctggacttcctgggcccattcctttgtctctattttatttggtattccctcccactcatgcaatcgctccctgttctcatcccttcctttaagagcaatgggaagagaagcattgtgcccctagcaagtgcccttccaggaaaatacagaatgtgagcctgctgaggttggagagatgaatgaggagccaggctggccatgcaaggcaaagtgggagcaaactgcagaggggtgtgtgtatgtgtatgtgtgtgactgtggccagggagtggctggggaggagcaagctgaaggaaaaggaacaacatcctggctcagtggagccctaggggagagatgcaaaagctctggctactctatggggtgcagtaggttgtttcagatgctttcttactaaaagcaagacatagatgggcatcttgtacatatgacccacttctgagtttaacaaaaaagggcacatggagaggccccctaggatggcagaccaagctgggcaaattttattcaactcaatgcatgtctaagggctcagtgcatgcaaagatcggcaactggctgagaacagagtcaccttacctaccgcaaaggcaaagcaactgtgggttctctctaaatccttcaggacaaagaaccaaagtaagtcttaaggacaatgctttatttagatataaccaccgggctgtgagaatatttaaacatttggaaaactttgtattgtagccatgaaaatgtggtattctagtcttgggtcttcaatatgtaaatttttctacatttcagaatatgaggatatatgtaacacagtctcaaacccagaggagactttgtaactctataaacagggtgtgaattcacttattaaagatattttccttgcacccaaggtggaacgtcaaagacaatgtgaccaaatgacaactgcaatcctgtgccactcgacaagtaaaaccgtgttttcaacactgtctcaaaaaatgagggctttcctctctctcacctttcctaaggagctgggcaagctggtgccaaactgccgtatgacttcatctctgaaatctgaatggcacgtgtgaatacccacagtatgccagattatcagtaaggtgataatgcttgtatattatacctgcttggcaccatttgaatgaggttccctcaggccacttaaggtttcacttcctgttacttgcacctgcactaatttcagaagcaaataaaaaacccagcaaaaccgtattttaggaccttattcaaaagcaaacagacaaaaaccaaagcaagtcaacacaaaccccaaaacacagcaataaggtaattaacctgatgttccaaagctcatgccacatatacaaggtaggcttccttcagttttttcgtaatctttgcaaagttctcatccgttatctgccttggctatttaatgtgacttttaaccaataacgatacaatagtaataatcagaaaagctaacatatataaagctcctgtatttgccaggcaccctgtgtcacattccacatggattatctcatttaatccaccgaacaaattgatgaggtaagttctttattctgtccttttaaacccacacaaacatacacacacatttatggaagatcaaggtaaatcagaaaggttaataagctttgagtcacccaacaagtgttaaaagtctctggttggccgaccttgagtcgctgcccgtaactaccacgttgcagtgtgactgacacacatgaccacattggatgaggatttggttacacccttggccagtgatgcaggctgagattagcaacactctttatccctggagttaaatgtcaattacagagttttcttaaaaattatttgtaagtgggaatttatatttcagtggacgggcagacaatcattttggggaagttatttccataacatttttggaggatggaaattgaaaagagaaagaaaataaatcaaatcattacaggcagtggctcaggcctgtaatctcagcactttgggaggctgaggtgggtggatcacctgaggtcaggagttcaagaccagccaggccaacatgctgaaattccgtctctattaaaaatacaaaaattagcagggcgtggtggtacacgcctgtagtctcagaggcaggagaatctcttgaacccgggaggcgaggttgcagggagccgagatcgcaccactgcactccagcctgggcgacagagcaagactttgtctcaaagaaaaaagaaaaatgaaagaagtcaaatcatccactgaggagttaggggctatacagataccaatgtcttctgtcaatttgtccatagtggagtgttaggggttaaaaaaaggatgagaaatgatggcttcacgggcttcagactaccagaccacattaacccacgggcaggccttctatagggataccaggcacactgcagcaggaaggcaacattccttattggtacctttgaaacagtactttattgttaggatattttattttggttgttaccaattcgttgtgtaaaactcgttgggtaagagagagtctctgctaaatacacatatttggtggcagtgatggggggggagctaaacagactcttaataagaaattcaaatcaagaattactcaagacgacacctgccttctggcctaatggaaaaatcaatctgtcaggtcttaattaagtgctcaggctagaaagaaaaagcggcagcttatacttggtatagtacctagtatattttcggtagtcaaaatgtaactaaaagccgtatttgttgcagaaatggtaactatgcataaagatggcccatttgatcctgggcggccatctatttagtaaataaaaggttgaagcagatgaatctcataagcttgttgacaaagatctctacgcataatgatgttgggtttggatgtttaaatgatgtttgtattagaatgcccaactgaggatgtccaaaaataaggtagggggtaacgctgggtgatcacagagcaatactttctgccccagaagtcatttggggtcgataaaggagtacatgagagaagaggtgaacaaatgagatataaataaatcaacgagtgaatcagtcaataaatgaacacagatccatgtgttacttccacaatggccaaggaaacaaccaattctccactctattgtgtataatctcccaaaagcgcacaggtatatgaacatccacatctctcactgaccaccatgacagcagttaaagattctgcccgagccgctcctcatgcactcagcacagatgtggctgaatgtgcgtctcacgggggttatgatcacggtagggagtgacagttggcaaatgtgaggtccctcttcccaacctgcaaagcagcacagccagtttattctccaactgccctgacagaggtggggaaatagagacattgaaaacggtgagtggattacaagttaataactggtttgcaaatggtgagctgtcctgagccacattctcgttccccaaggaactcaacaccagacaccttgccagggaaaaataatacagacagactacgtaaacacattcaaatcccaaacctgactataaaacccttgtgtagtctaatgtttgacccaactaaagtatcatttccagtccctgtagtgtgaaaattaaggttgttgtgaaaaggcaatccaacgggcaatttggaaaatagataggaatgctctgacgttcaaaatctatgactgtgagggagagaagcccaacaggggatcacgcatttttccttccttcaacttatttttccttcctttccttattatgtaccagacccatgggtggggaagtcaatgctgttctctggaaaaaaagcactgtgccctccattgattttgaaagagcaccctcctgaaggcgctgggctgacaccagtgcccacctgctctgctcatcttcagcttcaaaaggccacagggacatgagaagtgtctccttgagcctgggccctgggtgctcctaataatctcatcacaccccatcccctgaaacacacacacacccatcttctccctgggctctcagaatcagtctctccctcacctcacaaagcactccctcccaacattcacagcccccacaaaactgctgcataccattgtgtcaggaggagctattgtgctggaatgatgaggataggaaaaaagaggctgatggcccaaacaatgtgggcaaagtgggaacaaagcaaaaaagcacaggagataagatttttaaacttccccatttccatcatcaaacattctaaagaaaaatgagaaagtggacggtcaatacattgtttccataaaacacaacttcaggtaacagaaacaattctcattattaataaacagccaagaatcaagtgtttaccatgagccaacactgttaggggctttgcacacatttgctcatttatgtctcccatcaatcctaacatcaggttccatcactgccaccgagataaaccgaaacgcagagactccgtcatttgctcaggatgccaaagctactaagtggcagataatcagtgcatattaaaggagagaattcaagctacttagtctaaggtgaaacattccagaatgatctaattatcttaagattctaaaatgtggtactaccaaaaaatccactcttggcttcaaaccagttggacttatacccttagggaagctgttagctttattagtgagggagccccaactgtccaatgcagtggtaccgcacgtccataaaatgacttttgcattctgtaagccttgggtcaaccacatctctacttgatggggctcgattagcttgcaattcctgaaagcagtgaaacaaatagtgcacttccggaaagaatctccttatttaacaactaacactttgggataaaagaaagaaaagagtggacgttctttcctgaggctgccttcaggttgtaggccctgcaggcctcttccagaatgaagcaggtcacaatgaagggcaggtgacaatgaagaagggcagggaaggtgactgagatggaagatacagtcaaaatggtaaaatcctgggagaagggctatagaagaaaagaaagaaaatgaaagaaaggaagggaggaagggaggaagggaggaaggaaggaaggaaggaaaggagggaaggggaggggaggggaggggaggggaagagggggggaggagaggggaggggaaattaaaaaaagaaagaaaaggaagggaaggggagggaaggaaagaaactcgagcaggattcgcctccctcatgggaccttgcagaaggcctgcagagaatacccagtcctggaaatggctaagatgttgtactcaatgcatatctaggagaaggtatgtgcttcctgaggaatttgaacccaatttgattcagcaatagagtacacttagatggatgagtgcaagctgtacaggagggcctcaggctgctatgcctgtcccaacctggtcctcctgttctacagaggaagaacccttggtgcagagaaacaaagcccttcaagacagtttctgaatctcaggcagagctggtttcatggacatgtgacctgtgcagtcccacagggccccacatacagaaaagccccaagctcagaagagccccacccttggtttaatgctctgccatcaccttcttgaaatacttactactttttaaatagggaccccaaattttaatttttcaatgggccagcagattatacagctggtcttctgctttttgtttgttccctgaattttttttctttttttttttctgagacagtctcactctgtcacccaggctggagtgaagtggcgtgatctcagctcactgcaacctctgcctccccggttcaagcaattctcctgcctcagcctcccaagtagctgggattacaggcatgagccaccacgcccggctaatttttgtatttttagtagagacgagttttcaccatgttggccaggctgatcttgaactcctgacctcaggtgatccacccgccttggcctgccaaagtgctaggattacaggcgtgagccactgtgcccagcctgttctctgaattttcaaatgcctcataagacttggatttttataccacatttttacagacaacttgtttcatgggctatttacactctatgagacctggttgtcctagattctcaaaaatttttatttaatgcagagaacagcatttttttcacttcatccctaatacatgctccaagctgcaaaccaaaatgtgttaagtatgactgtcagagctcaagaaaaagcaagacacagatgtcactaatgggcagaataggggtatgaagggacaggatacattttctacctcaaggagctgagagtctgaactacttatgaaagagcagttccgtttaccaaatatgcacatgtgtacacaagtgcatgcagacgtacagcacacatatccacagaaaacacttgcaactccacaggcccattacggccttattcccatctcatgtaatgtaaattacaaatgcagagaccatttggtccttatagtgctgccctcaaagaaagaaggaaaaccaaatataaatgcatacaatggaagagcaagtacttattaagaatcatatagaagacagttgtattatactggaaaatactctgctacagagtgaaagaacagcatgtaacaaaacagtataaggaacatcatctatatattttatatttttaaatatgagtagtatattcatatatatacatatacacacatacacatagagagagagaaagacacatatgtgccaacgtaggtatctacattcacaagtgtatgtaaatacagttatggatatcattacgatcctaatggctatgtgactcagtgaaaatcagtctccactttctttttttttttttttgagacggagtctcgctctgtcgcccaggctggagtccagtggcgcgatctcagctcactgcaagctctgcctcctgggttcaggccattctcctgcctcagcctcccgagtagctgggactacaggcgccagccaccacgcccggctaattttttaaagacagggtttcactgtattagccaggataggatggtctggatctcctgacctcgtgatccacccgcctcggcctcagtctccactttcaaccccattctcttcatggacaaaggcgtggctcagctctgactgtaccttaggtcttctggagctctgacaagtccctacctgaggggtcagggcactcccagtaatactgggactccaagtctcaaaagcaaagtggcccccactgcctcctcattatgacaggaagctttagtgctcacttggcctgggtaaagaaacactttgtttcttgttttctacttttctttttttttttttaaagatatggctatggataatggtcgtagatatcttacaatctaggattattttgaaaacttttttctgagttattcattgtaagactctccccaatccaagggtgaaggatacttggacacaacacaatgccagttcaagttcaagggaagtgttccatcctctttcagcctccactcagctccctgacacacggtgcatggtccagctccctgggattttcccattcggaaagggaagccgtttgtcgagccagcctctgtgaccactcatgatctgaattacccacaggtgttcgaaaatacagagggatccagcataattaagagcattaagcaatcatctcagcccaaggaggcagttgaagaaaagaacagagtttgggcaacacttggggaaataaattccacagcctttcaccaagttgaaatcttggctttggacacacataaaaatgagcctggcccaatcttagctctcagtggacatctgccatatcacaagatttgacccaattggcctgccttaccatagagaaggccactgctggagcagcagatggtactgctggtaagagccaacgtggacggacagggctgtggcagggaaatggcagagcacagctggccccagcctgggtaggaggctttgctttgaagagaatcatttttgtgatgcatttttttaaaataacatcgatctgatttccttctctcgtagacttcaatcacttttcatgtcctacagaacattgctaattattcttttattttctctcttgtcaccaggtactgtcatacagtagtaaaacaagtgctaaactctatccacagagaaatgtctgttacagagaattgtgttagaaacgctttgttgacaaggaaggtagaatcagtgttttcccttaaggttttagtaacccaggaaaagattctaagttacaagtattacttctctttaagtaaaccattactaagtatgatcttatttgatatgaaaaactcaattaaaaaaaattaaaactgctgtctaatgggtgataccgactttaatagcccctggttaatgcagactagtcatttaaaaagagcattatccaaacattgcccctttgttatcattttccccattcttcagggaaacactatctacctttatactcattttgtttaacatctctagtcatttatgctatttactgagtatctgatattcttaataaaatgtcagtacaaataagcaagttgtctaggaggaaaaaaaattaagtttttccaatcttccctggctggtcaaggtaaacatttctagatggcccaagtcagttagccaggctgacaaaaatgccttttctctttcctcttaaattacaaaagatgatcattttactcagcaatgagcctgactaaaatgaaactctgtacatcagaattaaatatgttctatccactcgaaatgaacagtgtattatttatcactaatacttaatgacaaaaaaactgataactttccccgattataccactgatttcatctagtctcgcatcatcgattcttttggtcattagcataatcacagagcatcaactctggcttatgcagcaagtttgataacagagatgaaagtagacacacactattttaaaaacatgttccgattttcatctaagtatatctttatttatatggctttcttaccataaagatgccagtcctttaaaatatgcagaaatcactttctacactgaagaacaaggtgctatatcataacaaggatacagaagtataaagcgcctgttaattaaacatggctttttaactcgctaccctgcatatgtaactgctaagttccaagccaagtctttaaataagaaagagaaaatggctaggctccttcaaatgaatgctttgcctgttttttcccttaatgtaagagatcagccacttgatagattattttttttaatcaaattccctgataaatggttgaggttttaaagttttttcccccaaaacacagacaaatgaacaaattatgaagttccagtcaggactgatggtttcttatgaatctgaaattttcaatgtacagagtgctactgggttttaggctcaaatttaaagaacttgtcttgaattaatatccagtatttcaaaaggttcacatggaaaaatcaataagctatagctacatgtatccacatggatgaattttactgttgtttattttttaaaaaagcaagttactaaaaaacatatatagtaggatgctatcagaacaaaccttgaacgtgcaaaacaaaatcctgtattttgaggaatcctgtacatgcatacatattaaaaatatgaagaactacacaagatgaaaaccacccagctgcgaacagtggtaaagtaacctctaggaaagaaggacagaggtaagatgaggatgggatattccaggagcctctcctacctgaaccagcagcgtcttctctcttaagccgggctacaggtacatgggtgctcactgatttactctttgttccttttttgtgccttacatatttcacaatgaaaatggaaacatataagcatacagttttaaaataaatagctttgtaaatatcagcctgatttcttttcttaaaaaggtaagttgagttgttctcaactcacagaacaaaatgcttgagaccaaggcatcacactctattcagtaattcggacactggttacaaatactgaaaaacccagcaatccaatataaaatctattcattttcaaaagttcttaggattaccttatatttaaagaatttttaacctcaggagtctgctgcaggaaagtcacttctaacaaagagatactctgtatttagtaaatgtgactgtcctgcttcttaagcaaaacaaaagcaaacacagaaatgagatttctctctaagtatctttttgagttgacataaatacacacacaaggaaaaatatgcaagaagcatactttgtgtgtgatttcaggacaaaaaggtatcagaaaaggtgaactttcgccaggtggagagtccctccgtccccacccccaccccatcctcatcccagaatacttaaaccttttgctgcagttgccataaggatagccagacaaaagggagaagcacccccagtcagcagcaaggaggataacttgcttctacaagtataagaatttgttgtaagcttaccaaagttacggctgcgcgtttactgtcaacatgcatcacactgcaacaaaagccattatttagaaaataagatgaacacatttaagcagctgaacccttcttaaacccagagaaggcatgcaaaacaacagcaggtctgcaacaacatgcctgatggagcccataaaagaaaactggggactgaacgattttctattctaatagaccattttctccaaaattatttaaagttgcttatggacatagatgttatctgaagatgccccacccctccttcccaaggctcaatcaactagcttctttccaaataattaaatggggcaaactttctattagaaaatatctaccatacatcactaaaaaaaggtctgtcattgattccctaatgaaatatcagttaattacttaacctttcttaatgaaatgattaacatttcaacaaacaaggcggaatgacttcgcatcaagctgtagattaccagtgacagtggtaactatgtgtcctctaccattgcgccgtctattctttcaatcagctccatgtttcatcttttatagaaattctttatgcagtagtagagacactctacttttaaaatttggcccataagagttttttttaagtgcctcagggtcagaacagaaattttaaaagtttttattagacgaatatccccaatgctacctaaacctacagaaaagcaaactgtgaagttctaaacgtaaaaacaattgccaactttttggcagctattaaaataaagccacacctaaagccaaaatggaaattaaaaattaggtgtgggcattatggacacattattaccgggtaacttcaaaagccacattattaatacagatgaaaaaatgtctcaacaacttttatttaaataactcttttgatcttagtggttagatctttagttgaagccctgaatatttaaataagcctccttaacattttatcttcctttatttcataatcttgtaggatgccttcttcttaggattctggtttctttatttgtgtggcatcgttggctaggctatttccatcaatattcgtgcatgccccatcacatacgatagagaatttcccaagatgcttgggaaaatcaaaatacttctgccagcagggttaatccaaagagcaaacagttacaattttaaaattaagatggaatactcagaaaaaaaaattctagagagtcatctgacactaattggtagctacagcatgacaacacccattgggaaacatggatgcaggcaagacaaaattcaaaaggaaattatctgatattgacatttggtgaaaaccaccgatgttccaggttgttcctatcacgttattgaactgtgaggctcttgttctgcctctgtttctctaagtctccaaggtttctttttgtgccctcctgaaaaaggagctccgttttcttctcttaggtttcacaatggccaaccaattcaattaaactcttaagaagggttgcaggctttcctccaactctgataattgacaggtccagttttcccactttggtgggcatcaggaccatgtgggatgcgatttaaaaacacagatgctggccccaccccagatacggcacatccaggagtcgtgcaactgtgtctgtgttgggaacaacagctctgctgtgattccaatactcgtgcttggttaaaaaccaccgtttttcattcgtaataaaaatccaaatacattaaaaacaacacaggatgggcctcaaggtaaaatcaaagaaatcatcagtaaaatccaagtgaagatagagatttcagttccacacatctgaaagaataaatcacttgattcacaggtctctagcatgcatcagaattatcaagggaagtttgttataaatgtacgttaccatgtcaatcagcaaaaattctgactcaaggatctgtattttaataacctacacacacacacatacacacacacacacacagatacagaggtaggtgagcgaggacctcactttgaaccaggctgaattaggaccaactgcaacctcccttcacttcagacatgagcattcacttccatctctgtgctcacccccaggaggggaagccaccagtgccactggtcatcaggaggtaggcaccagggcaaaagaaactcaagcaaaactcacatcacaccctcccccaacaaaagctgcggtcactgtcctgagagcaccaagaatatcttttaaaaatgtgagtaataacaaagccctgtatcattggatccctaagctcaaagaacatatgttaaaatattacccctaattcaaaagcagggaacctggagcagagaaagtcacattatgactcaattgcacagctgggagggagaaaggacacctcggaaattcagtttgatgctagaaatattcttcagtgtcctagtaaacaaagtgaatcacaaaattagctaaaatcagagcatctggtaaaatgtggatgtccacctgacttacaagtaataaataaatatatgtccaaacataaaactcagagaaaatgtttgtcctaagcaaatctattctattgaacataaacaaggcccaataatcccacattcagatccatttttccctcagtaaattgtcctataacatgctagcctctgatatcttcaaactgttgaaatcaaacagaatgacatgggctttctattcaatgatcccatttcagctatttatctgaattagcagcagtttgaggaaatacactcatcacaacatgattctgagtatagagaagtaaatagtaaacagaacactggaacacaactgtgtatgtattcatattcctttttaaaaaaaaaactattttattaaaaatacaatttggaaggaaagtgcaattagctttgcacaggcactgctgagatgttcccgaacacagcagacatatgtaaatatttcgtgatatcagttccatttgagtagacctgtcaagatatttacagggcttgacagtacttctgtctttaattaaatttttgcccagatactttaatataatttaaatagattattagttgtcagaatcgaatataaattttgtttacgatttagttactttaagtactcagactgaaggaactaatttaaccctacaactgagcagctttaagcatcaaggccaaaccactagaaagctcccactgccctttgcactctaccaataaccttaaattattacaactgaattgtaaatttcatggcactaaactgagcccccctcccctccttttgaaataaaacagcttggggagggtcatgaggaaacacccatttacacctgttcaggtactaggtaggttctccctttcaggcactcgttctcacagcggctggctagataggaaacatttttttctcactctaagtcccataaaataactaccgaacaaacacctgttgtgtacaaggcagggcatgtattaaagactggcatcagggcattgcaaaaagaaaaacaagccttgcagagacatccacaagccaatctggtcaatagatttcacgactgggtaaaacaacagtgcgtgcgaagaacacagcttctggcacaaccttcttgtgaatggcagctgacttctaaacaaggattgaaaaatgccttagcacaaactgactgtaattaataagaataatttattaaagaaacaaagaacactgtctaattgtctttcctgactgccatgcactttcccccattgtacttcctctttgcagaataccagcctcgtagccctaactgtaagaacattatctatgggatgcaaaaccaaaacacttctagaaatcaaatattccttacaacatttatttttaggttagcgacacaagccaaatctgcttaatttccattaagcacatggtcacatgctcattgaaataaactacaaacgtcccaggaaaaaaaaaaaaggaaaaaaactatcatgcagaagataccccaaatttcgccaggtttgcccgtttcaggaacttgcctcatctcaaggcctgctggcattccagcttttggagcctttatccttaattcatccaagtaccggagaagagaaatatgttgaaaaatcagtttaagatggttccttggatagcatatgtatagcaaagtggcctgcagagtagagtaacaaatgacaagaaagatcattaaaaaaatgcatgggcccaagtgcaaacctacttggcttgctggcttgtctcacaaactcaatgtttgatcacctggtgggactaactaccatcaacttaaaaaaaaaaaatcccctgcaaatagtaaaagtatacattggctcaggtataaagttcacctgtctattcagcagatgcctttcttgaggttattttctttagaaaacaaacccctacctgcttgagaggtttatatactctagattcaaaaaaacacatttaaaaagaaaaaaagaaggccaatattgctggtatagcaaaaatggcatttactatgactgaaatctataaaagaagtgtgacatctgacaggataaggaagaaaggaaaagcccttagcaaaaagaaaaaaaaaattaaaaacaaaaataccacctgtgtaaatctagccatgctctggaaaccctttctcggtcgtggagaagaaacagctcatgctgaatgccttgaagttgcaattaaattgtagtaatttaagattatcgggagagcaaagggcagtaggagctcttcagagggtttccctccccacttaatgctcttcagtcacgggttaaatgagtttctttaatgtaagtaccttaaagtaacagaatcataaacaaaatttatactatgttctgacagcctgcaatctacttcggttttattaacgtatacctaaaattatttttaaaggacaaaattcttgctataccctgtaaatattcttggcattcccactgaaatgtgataggtactgtaacacctaaccttgtctaaatatacatactttttgagatgtggaatcttacaagatagtgtttcaaaactgagtttgagtcataagtaaaacatgaaaatcaaataaatatgcacaataagattggctgcaaagaggaagctgggttcaaaagaagttgtcacatctgctatattccttctctttcttaattttggcactggaccccctgcaatataaatatatttgaaaaatatcacaattcttctgttaatttaaacaactgctgaaaacagacatacccttcaacagagcctaagatgcaaatttacaaggccaggggtatagtctttaaaaaggcaaagaaaaactcagtaacagaaaaccatgcctaggctcaatattaactcagttaacttttgctattataagtataaatggtttaactagaaaatatttatagcgttttcaaaacattacatattgcagaaaattgcctaatagcatccatgtgtatgtttaacccacattgcttaattatacaataaaggtatatctagtaaaaactacagactttgaaacatgttgtgcaccatggttatgaaactctggcttacaaaaaatatataaactgcttactatgtgaccgacacttgttaattaaaaatataatccttaaatgacaattatttttattcttctgtatgtgtttacttatcctgtttcctactttgttctacttaatttaaaataacatttaatttggggatagtttatcccagaaaaaaaaaagtgttacacagtttatactccacgatttaaatataaacacaaaatcttagacatctccagcaatataaaccccttatctgagacagttaatttgaatagttgatgtttctttcattatactttgataaacctgtgaaaacaaaatgctacagtaattactgttactactccctttaaaaatgtaaagtagttaaattttcctagacaacaagcaaggacaagttacagagaacttgaataaaagtagcaacgtggtcatgttgaatgtcaatctaaaaaaagaggttgtctaatctggagactgctctctctcgcctttttaaattccaagagtgggctgacacaaaacttcatcaccagagattttttttttcttttttttcttttttctttttttttttttttttgagcttcacatcagatttaaactctcacatacaaaaccttggcttccctgacaaggcagatcttctaaactcaatgtgagaaaacgttatctaactctagtgtaggagtctaatgttggtaaaaagaattccattgcacagttcttggtagcaagacagtctctggacgacttaatattcctttaatacatttttgggtagcattctcctcataaagaaggatacattaaaaaaaataacttgtttcgcgactcggcatccataaggaactcaaatgctgcccagagaggggctgagtatttccttccaagtgagccttcgcttgcacaacaaagattagcatctgcaatggtccatttctgcataagtgaacatatagccttgctgcttgatcgaatagtccagggttctccgtgtagcagctcctgacaaccacccagcagcagttctgtttgatctctcctgcttccttaatttgggttgtcaaggttcagcagttggaggctgtttactttacttttccaaaaaaaaaaaaaaagtgattttttttttctccctctctctcatacaatgactaatccaaagtctaaggggggtgggggatgcagccagtggcaagatgttaaacctttttttttccctttgcagtgagattttagctgacaccttttgaatggtaactagttgagttccttttttatatttttcttgctctttaattgtgagacgtttcaaatagaaagacagaggggggaaaaaaacagtccaaatttctgaaactgtgagctgagttttcttttcctggacccaaagggatgggtatttccactttgagaatcaaaactccagtggaattctaaaaaagatttgatacatttctctctggaacagaaaaatagcaggaactcctctttctcaattatgtaggctatccctgggtagaaaacacctgaagtcttactatttctttaaaaattctagtttacacatctccctccaaattgattcttgctgtggaaaacgggggtgggggaaaggggatggaatggaaaaattttgcagcgattcttcaatatattttcagtagcagaaaaattcctttaaatatccttgaggtcttctcaactcagctattgtccaagccctaaacccttaagtctacgtacaaccaatggtgaagtgtagacggtttgaatgtacagatgcctttcaaagggaatccagaatgctcctccggcattcctgtttaaagagcagtgacaaaaaagaaaatgctaacttggaaaatacctgtgagcagacatgagcgcaattccagcccctcagaagtggactgcataaggtcaaatgcaaccaaatgaaatgtttatattaatttcattattctgcccaagcctcacagatgagggcttgtggggtggggaggtagggaagaggaagaaataagtttcattttgggtcttctggtagagcaaaaagaaaatgaattaagacgaaagcataggatgagcccagactaaatcaatacactttgtaatcagcccagcaagggtatttggatacaatgacttggaaataattaatagttataagaggggagtggggtgagaaggggggcgaggatgtcaccatattttatcggagcactttacactccacgctaaactttgatctccagattttcagatttaggaaagaaagaggggaaaagggtggaggggaggaagtccagtatttcgaagcacctaccggcctgaggatgggcacattcctcgctcccggtgccttatcgctaggctcgcgccaccccggctggctctttggggacggagaacccctagtgccgcctggggctctccggtgtccctggaccccgcgcccgcggccgcctcgacttacccgcggagtccggggagggagtaggagcgccgccttcacgcccgcggaggaggcgccggcagcaccatggtccccggcgccgctgccgctgcccccggcccgctcgctcgctcgccgcgcgctctcttcctcttacaaactttcgggttctgcagtcgacaagaaaccggggcgaccctcagcaagtcttccccgtgcaggctggggggaactgaaggggacgggacgggtgagtaggccgaggggccaggacagagagggcagcgggctccgaggacccgcgagtgcgcgtggagggaagagaggatgcggctcagggaatccctgcaaggatccagagaccgggaaatcggcccgagccaaagtctcagcaccttccccaggatctcacaaagttgcaacaacaaaaaggaggggggaggaatagggagaagggggtgggatggggatacgatcacgggcgcaaggtttggagttacaactgtttatttagtccttattctcacagggggcgggagctgcgcgggaatggggggctgcaggcagcgatttcgaagcaaacacatgggaggggggcatgcgactttgtttccgggagcggagctccccagagcccgtgtgtgtcactgccagtctcccgggaccaaggcggagctcacaacaggtggggaggggggctcgtcgagggccaaaaagaagaaggaatctaagtttccgagcgcgacgttgtctgaaaaggagggaggcgggaggcgggggcgagggaaggcggaggcagcaaatgaccgcgaccccgcggcaactggcaaactcctcggctcccggcgccgccgccaccgccgtggtccccactcgaagcgcacgccgcctcggctcgctggctccagggagtcgtctcggcgggacaggaatagagcgcagggagctcgggaggaaggctgcgcgcaagcgagggacggagagccatcggccgccaggacagggccggagggacgaggcgacacgcgcgcgacgcaggacaaatcggagcttgggaaatctccccgtcccccaagcttcagaggggggtaaaatcagaaaatgtgtgtgatggtgggagagagatccgggcgcggcgactcctcgcagcgcatccggctcccgcacccacccgtggatctggccacggctgttgcggactcgtctcgggaaagcggaggccgagcgcgcgtaggggtgcgtgtctggctgggggtgcgcaggtgcgtgtttgaattttccgggctccgagggggtggcgggagagcttcctcgccgctgactctcggggtaacgcgcgcgtggcagcggggaagttccccagtgcggggcccagggccaggcaccacagtcagtttgctggggcccgcggggcagctcaagggcaccgagggggcacacacccgcggggaaagaaggggaaaagtttgctccaagtctaaactttgggcctaggaggcgcccggcgcgcgccccctcccgccgcggccaggacccgggaccccgcaccggccccgcgcccgggcggccaccggacgccaacgccggacatcgaaagttgcgccaggcggcctgggcttattgatttctctcccctaggcgatcgtggagagcgcagagagaggcgtgaaggggcctacgggcaggcgatctcgcctcctcacagtcgccaccgcccccgcccccatttgacttatgcaaataaacccaaagggtgcgggcgccgccggagctccctccacccgcgcgccggcccgcagcccccacccatcccagagctgggcctcgacccgggggggagaggaagagaggggagggctgggggagatgcacgtggagcctggaggtggaaagtagttgtttttttttttccattttttttctctttttctttctttctttttttttttttgtgctggttgttgttgttgtttaaagtggcggaaacaagacaggaggcggcttgggaaaaagtggagcagaaatggaaaaatacaaactcacccgctgcaaatggtctctcggtgcaaactaaggtgttttcgggcctttccccgcgcgcgcccactcccgcccgcgcgcgcaccccgcgcacacactcactcgcgcacacacgcgcgcacacacgcactcccgggcgagggccgggccgccgcgagtacagcgtgcaaccgccacacaataaataacaatagattcctccgctccggactagcttcccggagcccagccagcgccggtggcggcggcggcggcggcagaggcgcgggcagcaccggcccgggggcgcaccccggcccgaccctctacctcccgcaggggtcccctctccgcttcacgcaccccgctgggcactccagcggccccccgagcgggagcggctccctctttgccgttcgccggggcgctggcgcccacccccctcctccctcccccctcccccccgacatcccggaacaaataaataaataaggcgcgcgagagaggccaacacgtcgcggagggagatgttgttattttttgctgttgtgcgtccctgacgtcacatccacctgctgggtaaacaaccgggctcccagaaaaaaaaaatcgcaattgccaaagaatgggggggggggttggggggagggatccagggagggggaagtgaggggcgtccaggcaggattggaaagaggagagggaggcagagccccgcggaccagagagaggaagggaacgccagagcagtccctggcaacagagggatctggcaggaaagacctggaaaataaggggcaggggggcggagggggagattcctcaggagatgggaaatggggggcccattcagacagcggaaaaaacgagaagggagagtgttaactagggacgaagatgggaatgcgatggctatttgcttggattctgagctaaaaatatgaaagggaggggagaggacaggctagaatgtgagtttcctccagttaaaagtgaaagtgttttgccatcagtgacagttgaaggagagcggggtgggaggtggtgttttcaaccccctttctccctctctcccgtcctccctcggtctctcctctttctttctgcactttgtccaatgaaagaaggcgagttcgggaggtgaaagttcagcagaaggacaaacccctgtttgcaaggaaacagaaaccccgccagccagcgaggggttttctcccctgtttctcggaatcaggagagtgtgaatgtgggacgagcttctgcccccttgtcagagccactgcaggaatgtgcaatcgagtccactttgggggaaggtggctgcatcaggaactgtgttcttgccacgactcctcttaggaaaacgcctgggggctagcatgtcagtccgttgtttaacacaaattacctgctctcccagtgatcagtcacgtgcaaaaagctttgtccaattctttgaaaaggtgagatttttttttttctttttgcggtttttgaagtttggttgaatttagaaattcgaaggaataaactaagagcctgaattaaatgttttgaaatatacatacataaaacaaaagacactagtatttctttcacttttatcaatacgcatagagaaggaagcagagtatgtgtttccaaaacgtgacttggaaagctgtaagacctctatgtcttgttgttgttgttgttgttgttgttaacagaagtaaattttttcagacccaccaccacagaagtggccagactcccaaaccagcatttccagctactggctggctggtgtacaccaggccaattctttatgagaatatattaaaagtcacccctgtggattcctacaaagtacttccccttgcggggaggggagaggcttactgtccctttggtcttgagaccagcacagttgtagataatatcctgaaaaggttattattaaa

SEQ ID NO: 209 - DNA, 58958 bp, Homo sapiens
  source 1..58958: mol_type = genomic DNA
cctagaaatctaaaacgctccagcaggacctaagtatgcctgtcccacctgcccaaaaaggcaaatacataaaatgtggacctgtgcaggtgtcactaacattgcagaaaagggacagaagtgatgaaaaacaacccaagagggtgcctcctctctgaggtccccttttctttcaaggaccactggaacggccaagaaatcccctccccccaggcaactaagcatcaatccttgcagctccgaccccacacctcaggcttccagctcccactccacaggggctcacatactatgccagcctcttgtccacctgcctgaggatttagggccaggagaggcttcaagagccactgtcttcttgtcctgatcccacaacaggatcctcccttggtcatggggacccggcatcactgagctgggttggggtacttcatgaggacccctgaggcctccttcacttctccccacccccaacacatgcagacagatgggagatgtttccggcgtgtgtggggcggggagggggacgggtattgagatttccacgggactctgagtggtgcgtctgctaacaacacagccctcccccttgggccgtgggcatttcctcacccagacctccccctcccaacccaaacacaccatcgccgccaccaccacaatccctccagtccccctgggcaaaagcgatgttcagagacgcggggttttgtttacaatctaatttgtccggataattgcctcaactttgcacttcactttgcccgcatggctctggccttgggccccttcttcactggttcgcagagcactttacgggaaattccctttccgcagagggaggcagtgcgcgccagggggtgaccgttcacaaagccctgaaggggcctccccaccttctaccctcggctcaggaagcccacccccagcccccacgcagtggggagcaggagggaggccagacagggcccgggcctgacactggctccgtctctgggcccccggccactccccgcgccgagcgcagcccgccgggaaccagtgaaccgtgtgggatcaggacttggccgtaccttcagactccaggggatggccggggtttgcaagcgccccataggattagtccgaggccagggtgaatccctggggtccctccacctaccatctttttcagatctgccgcctcacgtcttctccccacgttcccatttttcctcccctaaagtttggtgcacgtggttttctctcgctctcagcgggctgccaggcggggtgaaagttgctgcacctgctttaggcgaattatggtagcactagaagttggtctcccctccctccgccgcttgctctctcgctccctcctccctcgctctccgcgcgctccctccttccctctccaccctcctcctcccccgccccctcccgccccgcccgcgcgccgcccgctcgcagccactcgcagcccaggctcagtcgcagcccctcggagtccggagcccgccgtccctgcggaccggacagtgcggccggcggccggcggccgggacggagcccccagcccgcgaggagggcgcggcgcaggcggcggcggcgcggcggggaggagcccgggccggaaccagggctgggccgggggcggggacgccggggtccgggagcccgggagccggagcgagctgacgagcgtcgcggaaggaccgggaaggaagagcggagccggagcgagccaagcagcccacaaagtgccatgccccggcggggttgaggcgcgcggcggtcggcccggcgcgctgggaggacgcccgggagctgcgcgacgcggggcggcgcggaagggcagccccggcgggcggcggcgggcccgggctgcgaccggagcgagccccatgccccgcgcgggctgacgggccggagcccgcacggagcggccgggcgggacaggtaggtggcgggtcgggcccagggacgtgggtgggggctgggcgggcgaccagaccaactccctcgctcgcgcactctctcgcccgctcgctggctcactttgtgtttgcaaactgcccgcccgagacgcgctgggcgccgggcgccaggaggagccgggcccgggccggcgcactttgttccagccagggccggccgtggcgcactgaccccgcgcagccgcgacattccgcccctggcccgggccccagcgggccggagctgcctcgggaacaggtgggggctgtggcgcggcgggagtgggggcagccggaggccggggcggggaggggggcggccggagaggccaccgaggcccgcccttccccaagaatctgggccccgccccctccccgccgggcctctgggaatggggtgtacgggggcgcgaccccctccccgccccgagtcagacaaagaatacttcccggcccagactttccagagctgggaagggaagtggctccccccaactctagtcggtaccggactccccaggacgcgccggagacagatgaaaatgggggcaagagagcgggggatcgcggtcctacccgccgtgtcgtctctggtgaagaggggacttgtcttgctgaggtcgcacctcggaagtgccagggccagtcagccccttttccatcgctcggtcagctcggggatagagcggaaaacttcttggggacttgagagcgtctggaaatggcccctgtgatttgtgcgccggaggtggagggtggggaaacgatctggctgacacctctactcacccgctgtggagagagctcccgcttcaccacttaaggggggaagagagggcggccacgggggcccggaggccaccagggaaggagcccggagtgaccgagcaggacccccccccgccccaactgaggagtctggtatctcccctggacaaccccagcacctctctgaccggcggcgcttcagcctcgggctcctcatccacgccaaacaaacttccttgggctgcgtcagagcacagccagtggcgctagaatgcgacctggggtcccggccgcccccataaaggaccgggtaatttcgcggaatgcggattttgagacaggcccagacggcggcggattccctgtgtcccccaactggggcgatctcgtgaacacacctgcgtcccaccccgatcctaggttggggggaaagggtatgggaaccctgagcccagagcgcgccccgctctttcctttgctccccggcttccctggccagccccctcccggctggtttcctcgctcactcggcgcctggcgtttcgggcgtctggagatcaccgcgtgtctggcaccccaacgtctagtctccccgcaggttgaccgcggcgcctggagccgggaataggggtggggagtccggagaaccaaacccgagcctgaagttgccattcgggtgactcccgagaaagcccgggagcattttggccaatgcgggtttttacctgaacttcagcatcttcaccccggtttcggagacctgcctagattcgtcccagcacgcactgtttcgggttcgggattgagggttagggcagcacacacagcttgaggggcaattgttaggactggcccgagtgcccgcagaaagaaagagcagcggggttgtcgtatggcctgtagctgcgggaaggtctgtgccggtcccactgtcgaacccagaagctcactttccacagaaaaccagggctgaagggccccctgaccgccatgccctgcgggcaccgggcattttgagctctcccccaccccctccccctgctgcgaaccagccggtaggtgcaggggccgaaggccaggcccagtggacccagccgcctgaaggggagccacggcctcagaaaacctctgcccgcccccgcggaaaaccgctgtggggaagtctgaaggcctttttttttttttttttttttcaacttgagaaacttttgcctcggggttttggggctctgttacctggtggctggagggaggatactggggctctgctcttggtacctggacagcttgttggctcccatggtgccctttcgatctgaaactcaaaaaactgtgagttgggggagtcactcacactctagtcagtggggcaaggtggcaaggggaagaggtggttttgtggttgccccctctcagcctccacacccagggccagggtgagcgctgaatctctcctgcgggacgggaccctcaggacccactttatcctggctccagccttgctactaagtttgggagaccatgggagccttctctcctggcaccaagggctgggcgcctgggtggagttttctgtccttctccctgtcctggacaggtttcccaggagttacggagttggggaacccctgagccctggagagagaaagacctgaccccagtgctggagaacgccagggccagagcatttgcaaagggtcccacttgcaaagggacctgctcctgtccctttctgtgtagggatcttcctcacacctagacgcccccagcccccttcctctgcctttagagccgaaaacttccgttctggctgtaggcaggtaggtcccttcttgccaggaatgtgcatatcctgctgggcccctaccccaaacatacctcttccttggtgggagggaagcagagggactgggagaggaaggcttgcttttgatccagtaattcccccaaatgtttgctgagcccctactctgcctgggcaggtcccaggctgagtactggggtacccaagcagtgaaggctggggtctgctgtctggacctcagattgttggggtaggagagacagatatcacatggtgggggggagggtggaggggagaagaatgggaacagggtgtctgtttcagaggagagttgtgaggtgcaaggggagggaagggttgtctccccaggaagccttccctgcatcttaacccttcctaccccactgccttggcggtttcctgtctctccagccacagtgcaagccccccagtcccatcctaagcaggcacaatgtctttattttttgaatagcctaaactgtgtgaaataataatttcttccatccaagaaactcctcacagtttcccttctcacagatcttaccacgctccagcttccctagaccaaggcagggcaggtactatttttgacaggactctcaggctccgttggctggaatgacctcctcagatttggttccagaactctggaacccagagcaaggaactgaggcctccccagggcagaacatgtgtcagagtggaaaaggctttggaacttggcattagagatgggactctggagaacttaattaagctcttcgaacctcaattttcttacattgtaaagtaggtcataatacccaccttagagattctgtttgggagttagatgagagagcagatgtcaagtaccttgcacggtgccgggtgcatggtagtactgatcaagggatggcgtttattattaatttgctagcactgccaggccacatgttggttgaatatggaaatactgaagtattaatcttcattttatgggttgggaaaacgaagtccagagagaagaggcaacttgtccaaggttacacagctacatggtagcacagctggaactaaaatatggggccctcgactcccagtataaccagtagggcttgagcgtgtgctgtggtgaagggagaaaggaagggatgggaggagctgccattcctccctccttcctccataagcttggcctaggccgcctgccttctagtgtgaatactttctcttttccctttaagtggagagggggactgtaggtgcagaatctggtgtttccacctgcacacaaccctggagcattccccaggcactcctaaggttcttgtgagacacacataaatgggagagagaattccccagaatgcagaggaggaaaaatgactgataacccctctctccagaaagggagatttctagggtttggaaaccctagcctacacgtccttatggaagattttggcagcaagtctcagaccagtttgggacctatcactgaatggatcatctcaaagaagcaaaaggaaactccccttgagcctgaagttattggctcccttcagcgttgcctcccaggattctctgtggaaatacacaccttcagtccactgccagttccaccaagccgggatcacagcgggaaccctctttcctctgaattctgccactttggatgctgtggtcttgtgagatgttgctcctgggcccttgcagagcctggacgcagggcacacctgcctgatctagaaaacaagagctcctggcacaaaaggtacacatctggacagggccgcaggtgttggaccgtggagtcactgttgctgtggtgtgtcgcccgggctggacatgcctgggcctggcgaatgccctccttgccttgatcctggtcccaggatccctcttgagatcagggtcttttcccggctgtccctctggcacagccctgcaccttccttctctcctgtctggatggtagccatacagccgcctgttccctgaatcccagctgctctgcccacctccctgggccccatgctctggccaactggagcctccacagccaggcctgatggtgggtggagccagttgatagtgcaagatagaggtaaatggtgtttcctttcctgctgcagttctgatggtctgtgacccaggctaccatgtaaatggaaaatggggcgacatagtgggttttcctcagactaacagtatgtagaatagagaccatccggcatttgttcaaggtaggcaggactggtgggagcagaagttactcaagtagcagcaaaggggtggcaaaatgatggcgacttgaaggtagggtggcttagggaatggagccagggactcagtagttgtatccatcctacgaacacactgtggagcgcctactgtgtgctggaggccaggctggtgaagggcagcaggagggacccggagaaggggtggctcacatgcaacttggaaaatcagaaatagaacaagggccggagcacagatctgtgggcactggccacctgagccagcgtgggtcctgaaacccccagctgagacaggacatgtgtgccacccagagagcccttaggagggcctccccgtgtgaaatgaaaccagggggtgggaggttggggtagcttccgttctcatctcctcagcggggcttccttggattccattcccggctggctttacgtttctaggagaacatttctatggagacccaggcctaaagaagttgcttcaaaagagggtggcggtgtacttcctcctttcctttggggttcccctgcagatgcacatccgcatcctggaaggaaggggtacactagggagagttttggggagatatgaaacatcaggatttgtgggagacccagcgagaggctgcggctgtaagcactcagggagcaaagcgccaggctttttgaggctgcgtctctggatgggagctggagaagctggatggtcaggccatgctgagggtgtagagttggtccactgagagaatccctccttcaggaagcctctgagctttctttcccagagagccagagctacctgtttcccctccccagctgagcgctcgctttggattgttccctcagtgagtttttacctttttaactgagcgcatcagttccagttgctggaagctcctgcatgtctgagacctgagcacagggatataacacaaggggttttcggcactcaccagacgcagagaaaagaactgcagctgggctagctcgggccggcagctggggatccggaaacactggaagaggggacggctcaggcagcatggcagtgtttagccacagagaaagctgcccaccgattgtgctcagagatgattttgtgggtctaggcctaaacagtctgtacccacacgggtacatgatgagggtccccggtaagcccactgctgccaacttcctaactcactcttcggccttaggcatgacccgtcttctctctgggcctcagttttcctaactgtacagtgggtgaagaggacacctgcagccccacatcctcgggctcaccatcctgaagctgtgggttgggagccaggcaagaagagacctgaaggtctcaacgtacaccctctttgttccaagggcatcgggagcctacttccatgggtccttcttgaaaggggtgctgtggagctcggggcagaggacactatgacccatgcaagtctcctccttcccaattaggcagtggagcctgattaaaaggggtgctgcctgccccctcccacccgatccccatcgacgagatttcccttcatcagaatctcacattctccagaaattaatttgatgcctcatgttatcaattaattgaatctcgttgggagagagagctccgcgaggtgaggcgagcttcagcttggcccttgtgtgccgccatcccccctccccctcacaccagggcagccttctcctcccccattcctttttttctgcctttcttttaattgcacttattttctaaaataaaaccactgctctgtgcccctttgcccagtttggcttggatggatacccatggactgggtactggctgggatttgccctttcagaggtgggggcaggaggacttcccctcccctggaccctgtctgatctctccttaagtaaacagaatctcaccctttgggaatttggccgtgatcctgtgtgctccaggggcttctggtgagaaacttaggaggactaggggagggaggaagagctgggaacagactgcaccctagttggggacagaggaggtagagaaggaccaagctagggaccttttaaccctcaggattttgtcattcagaagctgctgcccctgccagaactgatccattaaaacacagggcagagggcataggtgtgtggtacctccaagcctcccaacagtcaggtcagatatctgcaggaacaagccctcagcattttcaaggacacttggaagcccttgctctgccccctgcatggaagatgggggaaggaagttctaataggacatccctattaggaaacctgggaggttgttgtggcaggtagagctaggtagtcaccaggccctgactgaggaactgtgctttgccgtttcacatacctccttgttcttatccccacaacaaccctgaaagattctccaggcagtggtaattatcactctcatttgataggtgaagtacccaggcccagagaggttacctgacttgccccgagtcacagttaactggaacttgcctttctgaaatgctggccataagggctgaggtcacaagtggactaacttcatccctgctgagttttgttgacccacacacagttcattacaatggtaaatttcacataaatatccccacttctgctccttttgaaaaacccaagccctgtcaacactgagcctgcatttctgtgtggaaaggatggactgggattgagtggcagctgcctcctcgtgccctcctcacctggcctcctaagtgaccagcctagcccctgaaggcattttggttagcagctttgacatggagattcacctgtccccagtattcctcaaggagaatctagtgtgggacagtgtctgaaggactctgcagggtctagccaggcacagtggctcatgcctgtagtcccagcactttgggaggccaaggcaggtgaatcacctgaggtcagtggttcaagaccatcctggccaacatggcgaaaccccatctctactaaaaatacaaaagttagccgggcgtggtggcaggcacctgtagtcccagctactcaggaggctgaggcaggagaattgcttgaacccgggaggcggaggttgcagtgagccgagattgtgccactgcactctagcctgggcgacagaatgagactctgcctccaaaaaaaaaaaagactgcagggtctgtacaagaagatctcagagagaggacctataaggacaccctgacccaaatctaattcccacacagctacttaataactgatggtgggatgggcgcagtggctcatgcctgtaatcccagcacttgggaggccaaagtgggaggatcagttgagctcagtttgagaccagcctgggcaatatggtgaaaccccctctctacaaaaaatacaaaaattagggtgtggtggcatgtgactgtagtcccagctactcgggaggctgagaccagaggatcacttaagccaaggaggaaaggttgcagtgagtgagccgagatcgcgctactgcactccagtctgagcgacacagagtgagaccctgtctcaaaaaaaaaaagaactgatggttgtgggtgattctttttgccttctttctaccacagaggttaggtctttgtaccataaggccttgtgtctccgggggcctgtttcaagatgaaatcagcgcatccctgccagggtgagcccctctatgataaagtcatcacttgccccctacatctgaggaaatgaagggaggggccaaggcatgtcggggcaggctgggcagaacagccaggggcccagaaatggccatactcagtggtttgtcccaggccctctagagcccctcctgtgcccaaaggaaaccctggtgccaaaggcaccaccagaaccaggctccagatggccattcaggccctgggcgaattgcccctaccccttaaccagcaggccccccacataagacgtcactatttaattagccgtctctgattaaccaaacttggcattcggctcctcttgccctcatctttcccagctccgaatcaatggctttgatatgctaattagggagtaatttaatttcaaaaggccgcaattaacaagggtgttgtggacatgctgtagttaagcggagtaatctaatttgcattagtaacaagcagggactaattagaagcttaattagacacttagatggctcttatgtttactttcttaatgagatggagtgggatctttggttctctttctttttttccccctgtattgttaattcttttttttggtctgtgtagtaggaaggggtattgagggaggccaccttgccagggcctgtgggagcgtttcagggatggagccagtaaaaggtaaggtggagggtggtggtaggggtaagggaaggcttggattccagagtgactcggggagttaggacgcggggaggagcactggtttaggagtcaggagagccacctggtttcagtttggctcagtcacttagcagtcaggtaaccttgtcaagtctttggcatctttgaagtgtggttccatcctctgtcaaaatgagcgcaaaattgcatgggggagagaggagggaggggctataggaaagcactcttggggactctgtgaatgttttttttttttttttgaaatggagtctcgctctgttgcccaggctggagtgcagtggcgtcatcttggctcactgcaagctccacctcccaggttcacaccattctcctgcctcagtctcctgagtagctgggacttacaggcgcccgccaacacgcccagctaattttttgtatttttagtagagatagggtttcaccatgttagccaggatggtctcgatctcctgaccttgtgatctgcccgccttggcctcccagagtgctgggattacaggtgtgagccaccgcgcccggcaagcgaatggtttttaacaataaaatatattcacaaattgtgtgccgaggccttgctgcgtcatggctcagctcagaagccacctcctacagaaagccttcccagagcaccccttactccctccaggctccatggtccccagtgtctaacataacatttgtaaagctgtgtgtgttgtgtaagacagaagttctcaatcctggctgcactgggaatttagaatgcttggaaagctttttaaaatatccacgcctgggtccagttccctgaagagtgcgatttaattgacttagggtgtgccataggtatgggttggttggttttttaaagctccccagatgattccgatgttcagaaggaaaacttacctgcccattagtctttctcctctctccatttcaagcccggcaaaagcaaggattacgttttgctcacctccatttgccccaaccccagtgcccactgtgctcagtatcagctgcaggtgaaggctccctaccccactctgaccttagggaactcacccagattcgacagggcctgtagtgttgagttgcaaatgccttattcaggctctgagaatctcctggagaaggagctgaggagaattgagggaaatcactaaagaggttagggcccgagagtcttatgagatgtgactgcttgctaaagaagaactgggcaaaattggtatgaattttatgggcatcagtttgggaatgaatatatcaagaaccttaaaaatatgcagttccaccttctaaacatgtatcctatgcaactagtcaaaaatgtagagtatcctgttcccatagagtatcctgttcccatttactgcagagtcatagtaaaacatagctaacagcctagatgtccaactctaggggattggctcaatacattctggaacatgcggcccattcaagcaactgtgtgaccattagaaactgttgcttaaaatatttgacagcatgtggaaatgcttatgatagtaagtggtgagtggaaaaagacgaaaattgaaaccatgtatagattatgacccaaatttcactttttaaatgtttatatgccaaaagagagtgagaatggattgaccagaaaggctatatatcccaaagggctagatctctgtagggtaggattatgagtactctatttttttttctttttttcaaaattttctaccaggatgtctcttacttttaggattcagaaataaagttatttggaacttgggagaggacctggaacagacagcacaggacggcagattcaccttacaaatcgaaggctttggtggagcctttcagataggaatgtctttgccctgccacttgtactgatctcctccgagcacccaagtgttgtgctaagaagccttgaatggtccctagagttggggtaggcagcttctaggatgtcacagtcattgagggagactcccaggccaggaactcaggcagagatgggggtacagagggaagtccagcgtgccagcctctgacccacacaatgaggagtgcccaaggagggcaggggcttggagagggattaagcctactctcgaactcacagagccccatgtgtttggggagagaaactgctggcacgatcagggagccaagcagtgcgtgactcacatcacccacctctggcttcaggacctattctggagctatagccacattttaacccatgggtcttgactcactttcttcaagtgctgaaccaagggctgggagaggggggtgggatcaatttttaaaccatagcccactcaggtgggttgtagcaagactttctggactcctgtaattatagtcactacccttctctaaacatcttcctcatgcagtgtgtcttatttgataccactgcaaccctggaaggaaggtgtactggcattggccccacattacagataaggaaaccagggctcagactggtgacctcattcctcaatgtcacaaaggtagtaagaggccaggaagggttagcagttcatctggcaaatgagtggctggctaagtaagccagaggcccaaagtggccactgccctgaagccctccccttacctggagcctgaagccagaagccagtgggcctctggggccagggctgaatgggggaggctggtccctgggactttggattgggaagcatcctgcagttacttgtagggccagggctcgttgctctgaaaagccctctgttttatatctcttgacacaagtaagatatagcaggatagctagaaacaaacaaatagagaaagaaggaactagaagacatccttgtgctctggtatccacatgtgtatctttttatataatctagaaatgtatgtatttcaaaggtttttcattctggaaaagtctgaaaccgacgacccttcttttgtaaaataaaggcctttgcgtatgttctttgccctgcattcattgtatactttgcctggccagtacctactcagccttcatatctaagcataaatgccctttcctggcaaaaggaggctttccctgcccctctccacttaccttagatccccatttatttcctgtactcacacttgatagaatgtatctgacttgggcttctccatttacttgtgtatttagttaacatttgtacactcttcatgggaacataagcttcacaagagcaagcctgtgtcctgctctgctggagtctgcatacacagagcctggcacactgtaggtacttaaacattggtcgcaccaatgaatggatgaagggtcattgctggtgaaacatgctcctggccaaccactggaggagagagaagcatgactttgttcatggctaaagccccactggtttttaggaaacttgttttgaggaaaaacaagtgccaggtttatctagaaaaaaaagagaaggggctaggacctccattattaccagtcgcccttgctgagtcctttacctgcagctctcagagcatctaaggacactgctgcactgccttgttcagtagcgtccacatttcactttccttcaggtagatccccagtgcttagcttaatggggccctaaatacatgttgaatgattgaatggcttttgcagatatatcatctagttttgcccagcaggaaactcataactaaagttagtgttcatcattggagccccattgcctgggacaaccaccatcagcatcacctaggaacttcttagaaatacagattcccaggcccactccagacctgttgggttagcaacttctgttggggcccagtaatctgtgttttaacaaactctccaaggtaactttgatgcactcaggtctgcaaccccctgatttaacgttgtggtccgtcattctcatcttctactccgtgctattgtattttaagaaatcttacctcttattgcaatctgcttcctaatctttgttggaattataaattataaaagagatggctacatctagtccagttctccccattatacagagaagaaaagaggagaatcaacttgctccaagtcactctagtaggccaggtgcagtgtctcaggccagtaatcccagcactttgggagactgaggagggaggatcacttgagcccaggagttggaaaccagcctgggcaacaaagtgagactctcccccgcaccaccaccactctgaaaaaaacaagtcattcagtagtaaattggtgttagcgctggggctagacaccaacttacagggtcaggctgtcagctgggccacgtcctgctgtctcccagactatattataggtttctggagaactggaaacgatatcttatttaaattccaaccgccaccattgctctgggtacgggctacctgtggtcgttccccacccgtgtctcccttaagaactggggcctcatctccactccagctgcgcgtgcacgtgtgctcccggcaggacgcgcgcccaggagcgcgctgggggctgccccgcccctctctccctcccccgcgggtaaactccgggcatccatcagtctgttaattgcactaattagagatcgcagaggtgttaattggaaaaccctggtattgtgcctgtttgggggaagaaaacgtcaataaaaattaattgatgagttggcagggcgggcggtgcgggttcgcggcgaggcgcagggtgtcatggcaaatgttacggctcagattaagcgattgttaattaaaaagcgacggtaattaatactcgctacgccatatgggcccgtgaaaaggcacaaaaggtttctccgcatgtggggttccccttctcttttctccttccacaaaagcaccccagcccgtgggtcccccctttggccccaaggtaggtggaactcgtcacttccggccagggaggggatggggcggtctccggcgagttccaagggcgtccctcgttgcgcactcgcccgcccaggttctttgaagagccaggagcctccggggaagtgggagcccccagcggcccgcagactgcctcagagcggaagaggcagccgcggctttgacccagcttccttccgacggcatctgcaggagcctctaggcctgacataggctccgaggtgccctggctcccccacggggaatgctgagggttgggccactaggtcctgcctaagtgcaggacctgagcctcagacaaatcctggacctgccaaaataactcggcctccggtgctatctcccatttgcccccaacatgtggtaggagaggcatatggaaagtctggggtgggggataagagcccagtattagcgaaccttagacccctggccaatccctaccttattgtatggaggcagaaagagcaccccagtgacttgcccaaggtcacacagctgagcctagaaaccagatggtctaattctcagagcctctgccttcctgttccgcaggtgttcagctgctccttgctgaggaccttggtggctgggggaggagcatggattgggaagataggggtgtgtagagaagaaaggaggacctcttggagcttgcccctcattaccagaggaagcagctcagatctacactgggtggagtccactgtgaaagggacccggctgtgactccagcagaccgaccatcagtgcctaccagtattcacttaagtactgtggtttcatgtccacatgccagactgagagtgagaagagaccttcaggaccacctatttgtatagagacagggaagtagaggctcagagaaaagggaaggcagaggattcacaatggtgtgtggctgagcccaggcccctgcctgctcccctagccagggttcaggctcctgtggacactgacttctcctccataccccacacccttgtagttacaggggactgataatcaaggcctcccgccagcacccttccccatcctgtctttagctgactgggtcccaggcacccagagcctgctcacccacagtgcagggagcacaccggtgctgtcgcggcgccctgtggagaggtgggcaggagacatgaggctgctggtgtgctcatccttggcgggcaggtatcccagggcagaggtgagaattcagaaagcacttcggagtgcctgtcatgcaggtttggggggtatgttgttaggtgggcgggagcatggaaggaggtgtatgggtgtgtgtcagtggggtaaagaccctggagggggcagagcatgccacatgggaattaatgccattcacacaccctgcggaaatgacttttcaaatgcatataatctcaagcatgcaaatgagaggcttgcttcaccctgtttaatatgaatgatcggcccctgaatagctattattatacaccacattgcagcaattatgttgttcactgggtgttactctgtatgccccccccataaaaagaaaagaaaggagcacctctgtctgcatcctcctccttccttctttctctttttccaaacttactgtctgatctgcaactttatgatactccttgagtgttggaagggggccactctccctaaccccagggaagtaactgccagattctctttcctttctcctttgcatgcatacacccctgaggctctggtctttgtcccttggggcccaggagttctcagatctcagagaagctagacttggaatcagagcaggcagctgctttccaccaccagcagagccagggttgggggagaggcccccctccctcctgtctccccatccccctcatgtaactgaggcccaggcccaagtgggggaaggtgctgctggctgggtggtttcaggggagggtgatggagccctgtgctgtggcaagtggaggatggtgcccaccccatccatcatttcaccgccactagccctcaggctgacatggccattaaggcctgagaccgagtgctcaatctcttccgaaccatcactcccatcctgcccttactccagcccagctcctctcagaacttaggagtggagcagtggctgggttgggggaagagcaagcccttgggaacatacagagaaattcacaaatacagggcacccaggaggccactcagacttactgggacagtgacacccagagtcacagatgaagaggggccacaggaacagggatgtggcttctgtggaccccttgctgttctctatctcctcccgactctgcttccagccaggatgaaagctgagcaaatggcttggtagagtgagggagaagagttcttctggagtgaaaggagagaatttgggagtgggagggaaatgctttggggagctgctgccttggggaaggaactagagaaatcacagtccagtctctttccgcagtttctcattgttacctacaaggccctcatctgtcagtcgggtcagggagaccgtgtggttatagggtgtgcctaggccaaaagagatcgaattgggaggaaagaaactggctggcttccacgggccttgctaaatgctcatgtggcttctatccctcgatgatctctgtgcaatctgggccaagtccttgacctctttgggtctcaatgtcctcacccttacaattatggtgggtggagaaggcgctgatcaatattgggggcttgctctgtcaggtgccatgtgcatgtttattttctcctcaaaagacttggaggctgggatgaaatatacttggctctctttatccgcaggttccacatccgtggattcaatccaccacagatggaaaatactgtacagtatttgcagtgtgcaggacccacagatagggagggccaacttttgtatccataggtcctgcaggacaaactgggaggcttgagcatctggaaattatggtatccacagggatcctggaaccaatcccccataggtgccaagaaacattgtcctaccacagacaaggaatctgagggttggggagtttaagatggatcaaaaatcagtagtggatgccaaccatggtctgacctgtttgactgaaatccatgttcctctcaagggactgtgactcgggggtagttggggagcccccagaattttagaacagcttttcatactaaagatattggaaccttgtcaggtgcagtggttcatgcctataatcccagcactttcggaggccgaggcaagtggatcagttgaggccaggagttcgagaccagcctggctaacatctctactaatggtgttgcgtgcctgtagtaccagctacttgggaggctgagacaggataattgcttgaacccgggagacggaggttgcagggagccgagattgtgccactgcactctggcctgggtgacagagcgagactctgtctcaaaaagataaaatgaataaattaattaaattaaattttaaaagctattggaacctctatgagttataagaagaagcttaggcctccacctcctccttactgtcctgaccatcccaaacacataccctctctttctagggggatgtttcagccactccttgagaggcatttctggggtcaggggatccagaccttgactctttgccttgggtatgtaacctaactctctggaccttcggtttttccatctgtaaaattggcgtgataactctctcccacagttctcatgaggagaaatcatggttcctatggagagtgagttaaccttactgagtgtctacttttgaccaggtgctaggctgagggctttaaaatggaagatggaaggtggaaccagggcttccttcactgcacacctccatgacgaagcccagtgtctggctcccagtaggtgctgggcaagtggcagccttttttatggaagaataattgttgctttggaccttctgtggcctggggaaggtcatttgccctgggatgggagcaaacacaaagtccatttcaggtgggggtaggaaggcaataatatgataggttcctagtgaataacttttgtctttgctttgttggtgtaggtttaagacccagacgggggctaggcactgtggctcatgcctataatcgcagcattttgggaggctgaggcaggcagatcacctgaggtcaggagttcgagaccagcctggccgacatggtgaaaccccttctctactaaaaatacacacacaaaaatttagctggtcgtggtggcaggcacctgtaatcctagctactcaggaggctgaggtagaagaatcgctcaaactcgggaggcggaggctgcagtgagccgagatcgcaccactgcactctagcctgggcaatagagcgagactgtgtctcaaaaacaaacaaacaaacaaacaaaaaacctaaaatagcccttcttcatgtcattattataaacagtgcaaaacctcaactggggcaaaaaatcctcacccagaggggcagtgcaagggctttgtctcctcccttccccaccccagcacgaggtctcctagaagtcaagaaaacatggttgggggtgtggagccacccctcacctggggggacatcgggaggagccacattccatcaggcatcccaggagcagcctctgggaagttgaggagaagtagatgcccagctactcctgtggcgatggttatgtttttgggggtcagcagtcactgccctttcagccttcagcctcagcctctcccctgtgtctctcttcctcctccaggtaccgctagagcgacatgatggtggaatctgcctcggagacaatcaggtcggctccatctggtcagaatggcgtgggcagcctctctgggcaagccgatggcagcagcggcggggccacagggacaactgcaagtggcacgggcagggaagtgaccacgggtgcagacagcaatggtgagatgagtcccgcagagctgctgcacttccagcagcaacaggtaggaactggtgcgccttggggtatctgggagcgggagaggggcactaggctgcattccacttcatcctggctgctggagcaccactccctgccaggcagcctcactttaccattcttaagacagtccagcctccaaggactccctgtccacccacccattctggtggccaccttgagcctaggctaccacagcattttcaagagatagaagtgggactcggaggtctgagatcatgaagcttgaaactgtcccagaaatgccaataagaagagacagacacacaactgggcagcaggcttgagattggcatgttggattggtgggcactccactcttcacctgcacactggctaggaaactggctaaatgaacagggttaagagggtgctgtgcacacagggggatcttcacattatttctgttgcaaaacattatctgcctccgagtcagcttgggcctccatttccagcagtgaagagaggcccaggcagctgggtaaaggccaagagaggtaagcaaagacaggcctccatttttagggctcaaactgggaatccctgtctgtgtcttatatttcctcttccaccctaaagtgcagagttcgggagtttaagaccaacctctctgaggatctagaggcactaggatgggtctagatctggttgggtgatgacagagcaggggtctcatgtcctggtcccacctggggaaaaagggagagtcatgctcaacaagttgaggagaaccttcccagccaacagccctggccttgggattctctttctctgatttgactctgctcctggaatcactgctggtggtgccggcccttgagtggggcagggggcggggtatgctaggaacatggagaagcagggctctgtgtgtacctccctgctcagtagcccactcctgcctcatgcgtgcacacgtgtgtgtaccacagtaccctcatgtgctcctccatggccctgctgtctctcccaagttcaccctgggactctgcactccttctcccacagcccaacttcataacccttaaggggccttttcccatcatattccttggagccagaagtcagactggaagcaacaccatcagaagcctgactcccctgcacagagctggtcagccagcgctaaagcaggaatggaagaaacctggtttaagtcccagccagcccattaaccagtggcatgaccttgaccaagtcatgagcctgcctgagccctggcctccttggcacctaaagtacagagttgttaggatcaggtgcaatttgggtgtgcaacacatgcagctcatttgttgatgtggatgtgagtggaacagaggacttcaaaaatcactttctcttgccagcagtggagactggagcagggaagggcctgactcccttccctagggagatattcttcaggagtttgctggcatctcccaagccttcctaagcacgttctctggggaagagacccacagagtctgtgccatttgctggggacagaaggttaaagggcaatatcctaacctttaccaacataatagcaaaacacaccccaccagaaatctccaaggccacccattttatatggccagctcttccatctctgtgactgtgcagacagagttatgaagaattttaaatgtaggggttggggagtactgaaactggaaagtttcttttaaaaaatttctgaaaatgaagaacggacacagttctctggataactggggaaatgtttagggtggggaaagacagaactgtctgtactgatcaggtttcttggttctgcgttgcacatgagccatgttttcccatctatattccacattccagttattcctgtttgttttggggaatatcccacagtcctggaaaatcctatatctgtttcacaaataaactggggtggggagttggaggcaggcagagggctgttttatccatttgggctcactatgggcagagtgcccagggccaaggaacatatttgagacttaaaaaaggttttgttggctccaaactatgaaaagaaccttgcaaaattaaaattacaagatttccaattaaaatgaaatagtccatgggctattcctctgccctgaatgtgtgaacgaggcttttgggggagcttcaagggtaacattttctggtccccaacaacaaatgttcctacttgtaggataaacaagtatgggaaagagagcctggccctttgggttcctgctccttctcaacctcaacctgaaaggacttagaggacaaaccaatgcctttcgtctctggtgctttggggtcttcacatatgctgtgttgttatctcaccatccctgcaaggtggatattattattccagtttcacagatgagacagccagaggtaggcactgagttgtcaagatggcacaataaaggctgcgtagacctcactctcccagttcctagttcagggctcagcacacctgcccctttgctgcttctccatcacacagtcgctgtgggaaatggaggcagcgaggcctcgagcatagtggatgctaaggaaatgtctgttgatgagtaaattagagcatttcatttccaacctgaaagggttctgtgatagaaaagcaacgctgcccgctggccctaagtagccactctagtgccatctgcaaactcgataggaagtggggtaggagagggtctgtggaccacacgctggtcccattctcctcgtactctctgtggctctccaagctcctctgcctttgtctgtctgttggtccttgtccctctgctctcagtaaacaagccctggaaatgcaatcctggcctttgggagtaatgagttgacagagaggagagagataaacagggcgagtcagaagtcaggcctgttacaggactttaggctgaaacaaacagtgctgaagagggtggccacgtcactttggaacaagagcaggcacttgtttccatgcaacgagcaggctgggagcttgtttaaacagaggctggggggtgacctggcttggctgccaggccaggtctgactagagggagagggtccttggctggctgccccatttcagccctcaaggcccagcttccacctccttcatcccagcctggtcattggtgagtgacagagccatatcacctccacgctgtctttggggctttcaccaagtctgcagtcttatgccctatggggaatctgtctaccctgaggagaaggtgcaggaagtacagtaggctctggagcagtcagtcaagctgcaaacacaccttcagtcttactttgcactgggctccgtgccggccagctggcattggtgatccccagctgctgttaaagaataccctagaccatagacacacccgtggcccatccgtcccctccctcgccaaggcaaatgcttctaccacagtgcccctccctgcattttaccctatgggatggctcttttcttcgaaagttgcccttgtgttttattctaatctgatttcacttgtatgaaaatgttcccagtgtggggattttctcagggaccccacaaatacccttaggactctctctgataggggccatgaagcctaggagaagtgtgtgccagattttgggaggggaggtcttgggggctggtctgggtgcgctggccaagttggggccaggagggccgagctggtggggtggaggcaggcagagccgctggcggcggtgctgaggccacgctgaaaggcgtcctgggcctctggagtgcgcactcccattgtccatgggttgcgggggtgacaggtcagcgagggtcacgggagggttgcctagcgtctgggaactcccactgcagttgccgtggcaactgggccaaatcccatcccgttcacatcctgtgaggagattcaaaagggttggggggctttgcacattaatgggcttttacctcacccccccttcaaagagatggggggaatgtcaggcagttgggggaggggagaagaagaatgggagagatttttctttccttttcctcccccatctgggcctcctctgcccaagctacttagagggatgacagcaggggaaggggaggattcagagggtgaatttgccccccaccaccccctgacacacacacacacacacacacacacacacacacacacgcagtcaacagttgtctttggtctgcaggtccagggcccatttctcttcaggactgctggctgtgtgccccagattctactgtttcctgtctgatcccacaccttctgcattctcctttttcttctggagaatgagcccctcccgtggaggagccatggcatggagggagagttggggcccgcactctccagaggggaggcttacggacatcacaccagttcataccagctgctggggaatgctcagaaactgccctttcctccttggcctgacacagtgagagaaggacaggtgggaggtgggaggagctggggagtgctgtggctgggagagggccttaaccatcccccttgttgtacccctcccaggtccctgagagccaaagaccgccctgtttcctatgttggaaaattcccctaggagggcagagggcggggctggggcctggaggagggatctgcagacccctgctttcttgggactaaaaggagccagcccactctaccagcaggagagcccccagcttccctcctaatatggaattctgaaatccctcttcttccctccctcacctccccttcatggcagaattcttttccctgctgattagaactggggatacagaggagaatttggggaagggagatgaatgttccttctgagaaaggatttatcttgaggattgaagtggggaaggctgcatcctagggtcacctcatcagggcagaacttggcctggaaccctcagtgggagagctggcttttcccctgggggagcacctttattctgagaaggcccagtaggaatcttcaggacgagaactgcatcccccaccaccactgcccccactccaaccctacattgcagaggtggctagagtgaagcggctcagaacccaaaccccagcacagacccacttccagagaactccacagatactggtgggagggatgtatgtctggtagccacctccaaatgccaccaagaatgaggaaagtgatcacgggaacttttgcatcactgccactcggtcacccaccaccaccttggtgatttcacctccttgctggaggtcagagagttccttccaggcactgaggactctccccctcatgacaccctgcagagctggttttggctgcaggagctggatgagccctgggctgcatcattgctagaagcaggcagaggccgggcactgctggtgcgaagcctgcctgagtttgagagcagtggttcagggaatggagagaatgaaggagccttttgaaggatcgcagttcctcatccacgctgttgagttcagctgtaaattctcatctctctgaggccagaaactagttccttatagagaggaggcattttcaaggcacttggtagggaaggcgtcctgaaatcggggctgtacacccaggatgtgagtcgtctcccacccacgtgggcctgtctgtgtctgtgcgttgctggttttcattttaatggttctaatttgagaatgcgccgatgtcatttttacgaggttggtgtaaaaaaatttacagccttttccaaaaagcttttttttcccaagggaaaaaagtgcggaataacttcaggggttttatggtctcctctccccaccttccttgtcccccctctctgtgtaatttcatttttatgtctctttgctggaggacaaagcctggctggtcaagaactttcctccccccaggtcagttccctcagtggtcaggaccactaatctctaactcctccttcttgtacccctttcttccaccctctggtccctgaggagttgcattttgaggggtagatgaagcgatattccttctttactttgaaccagtgagtgcttattaggcatccattgtttaccagcagtaagtatctaccccgaaagactgtatcacttcctactcaaaatccttcagcgatttttcaagtgtataatgaaataaaaaatcattgtccctgtgtaatctggcacctgcacacctctgggacttcttctcaggccactcttctcttggccacactggcttttcaattcataatgcacccagcttttcccacggcagggcctcgcaccatgtgttccctccacctcagatactctcccttggaagagttgcctcctcctgatgttgtgtctcctcagagaggccttccctggccacacaccctagagccagccagccagccagcctccatgggacactcgccaccagctcagagtttgcatgtctctttgtgtagtgtctgtctcggcccattagaacgtgagccccgttaaagatgctgagtccccagtactgaggacactgtgagtgccctgtggggcttaataaccactcattaaattgttaaattaatagtcatgctgtggttctggaggtaaaggtaataggctttcctggggatgcttttctggctcagaatggggcgaggtgggccagcaccctcaaatacccttctagtcccttcttttcctaaatccagccagttcccagtgaaaattaattatggagacaatttagataagattgaatcccagttttgccaaaaccagccagaggcagacaaaggaagtttggagtttgtttgttttggctgcccctcaccacaatccaaattaaaccagaatttgctagtacctcctccatcctgcccagccagcgcttggtttctcttccctgtgcagagcccagtttcaggtctggtacattcaggttctgcttttgccactgtgtcccgttgggcaaatcattgcccatctctggatctctgtttctccatctatcagtgaactagaaaatacctattttttgacccactaaattgatattatgacccactactgggccatgagcagcaatttgaaaaatactggactagataccctctaacacttgcagctctccaggggttgtggcccaagctcttcgacttctcattctcaacagcctttcaagcttgtctccctgattatcacgtccctgccctcctgcacacacagagaataaggctggcaccccaacacagatctgggatcctccagcctgctgaaaggactggtaaatagccccgcacctggcttcctgagagagaatgacccctctcccaccccccactccaccaaccccgaattcccagaaccagaaatgggagtgtggtcctatcctggaggggagagagagaccccatagcaccgagacttgtttttctattcatagcagctccctgttgccctcaaagctacagcttcattctccaccatcccaaccgccctccctggatgccatccgttataagccatttgttcctaattgcggagatcctgctaatgacttctgaatgggggatggggggaggagagttcagcttcattagcgagactgagttcttaagcttgagggggaatgggggctgggctggaagagggtttggttagcaaggccttctgggtggcaccaggcaagtgaccaggagctgctggtgaaagatcaatcatcataatagcgttcgtccaggacctactgggtgcctggcagtgtgctaagtactccatgtgcacagtcccacatgctgttcccaggaaccccatgaagaaagtatggggttgttccagttttgcagaggaagaaacggaggctcaaagagatggtgacttgcccaaggttacccagcatacggtggagccagaacttggatccagatctctcttgacgtccatgcatgaatggacagtacacctcccttagaggaaaactggacatcatccccaaaccacagagctggacatttggttttcagtccaaggggtagaaggaggaaaaaaatgaggttcaagaggccaaatggctcccagttttccactctgcctaagccccctcttcctcctcccctaggttttccataatggcttcttcctggtgtgggtatctgaacacctttctcacccagggctgtgtttgggtatctcttgcccttagggaagggaaactgagcccagttttcccctggagtttcctttcttggtcttcttcctccacctccaccatcttcacttccccttctcactggagggctgaacacatgcagattagggggaaggcagatttgaaggcctcgctggactgtgcatgggatcatggagacccctcagtggagtaagccctgagcagtcagaggtgtttggactctgccacttcctagctgtggaacttcaggcctcagtttccttgtctgtaaaatagggatatcaatacctgctccacctagctcaatgttgtgaagcttcaattaaatgtttgaaaaagtgctttgaaaactgcaaggcaaatgttagctgttaagtttagtgtcagcctgtgccagcctcccgtattcagcctagactaaaatgagttttgtgagtgggtatcacatgtctgctgtgtgctggtggttggagatgggggttcacagctacagttgacaacatctgtgctttcaaggaggccccagtctggttggcatattcaaagaaagtggggctggggatctgccggagttaggacccattatttcccacgtctctctgaggtgggcagtccagtgatctccaggccgcagtgccagcaggcagtgtgaacacatctggtgcagcagcgtggtcgatgtgaccctcctcgttcaccgtgttaactcgcccttcagatggcgagactccagttagtgctgccaccacctctgggaagccttccgagacttccccaggtagaagaaagccttctctgacccctggcactcacccccacttcaggctgactagtttcttatcattcgtgttttgttttgttttgtgttttgttttgttttgttttttgagatggagtcttgctctgttgctcaggctggagtgcagtggtgccacctcggctcactgcaagctccacctcccgggttcacgccatcattctgcctcagcctctggagtagctggcactgcgggctcccaccaccacgcctggctaattttttgtatttttagtagagacggggtttcaccatgttagccaggattgtcttgatctcctgacctcatgatccgcctgccttggcttcccaaagtgctaggattacaggcatgagccactgcgcctggctatcattctttatattagaggctatcatcacagaacctgagctgtgagccctgggggggcagaggccacattctgtttctgtgtatccccagcccctagcctggtccctggcacgcagcaggtacttcatagatgtgagaagagtggtgagtgaggacccatgtatgagaaggaatggtgggaagctgagggaggggagccttggccagacctaaggtcttacctggctctcatctggcctggtcttggcaggaagaaggaaaggggttgtgggtagggggtgtagggggaggaagggcctgtcacagggagggggaggtctcaggaatgagactgcaaggccttgccatttttttcctgtaaatcatgtaatttcatgctccaggggaccacaaagtaagagagtcagtggggagtcaactcccctggccaccccccaccccaccccaggagactgagcagggctctgcccccaactgcccccaggagcccctccctgctgttccctcctgtcccccggggatctggagtgtgtcatctccccaccccaaccagtgtcccttttgggtcgcctgggctggccagcctctctgagccatcttcttcccctacccttgtgccctggcctctgacccctgtaccccctcaaccctactctacctccacctttggaggacaaagagcacttgtcagtagacctggaggagtttgtaaaagcaaggtagtagaggcaggggctccttcctaatgaccacctgactccctgcccttcctcacccgcaacccccccccccacccttcctcctctttccgcagagccttttgacttagaaaggtcagatttctgctttctgaagtgaatctggaagaggagaaacatcctgtccccctctggaagcccagggcacttctctgggtgtgacatccagggaaggaggtggggtgggggtggcctgtgaggagcacaccaatctgagctccaggtttgctgcaggacaccttcccgtcaataggccagtgcatatttagttgccctcctagggtaaactagatttaaagcctcaggaggctcggctgtttgcactgatgatgaacggacgcgaaggtggttgtgtgtatatgcttggtacacagtggtcactctctttgcttgttgagcgatgatgggtggtgcagccatatcccaccttaaaaggttttgccttgaaggtgcttgtggtggggtaggagaataggggcccatacagaaaaaacaagtgtatgtgtggacagatgtgagagagagccacaggcgggcgcatttcgtctaataagtgcgcagggcacgaggctatgttggggagaggctggaggaggtgaagtggagaattgtggagagattaatgagagccgaagggagtgaatacttcccgaatgccaactggatgccaaacattggtcctttaatccccctagtaatttggagatgggtagtttcccagttttgcagataaggagactgaagtgcagagaactggaataacttgcccaaggtcgcagctggcaggccgcacagctgggattcagacccaggactgcctaaggttggagccctgtgtcaagggcttagacacacctgcactggctcccaagggggtcttgagcaatctggaagcagataaattttgtgctgctgaaatgtggattcagaacttgccttcaaacctcccactgaagcatagtgaggacatagagggcttgactggcctcatagataatttcctgggccctcctgacccctcactcctaccagacgtctcactgcccatcagtttaccttccgggcccctcctactccttgactgtcacactgacccactggagtgattcctccagcaatctccatatgcctcccactcgtatgacccctctggctcagttcagtctaagccactgtggccaccaagcccacagcacgatggtccatgcatctctgctgatagtatacctttcagaacttaatctaattcctccagcagcatgcatgtacaatccttgaactcagaaagtcacacggtactcagaccttgtgccactgaccccagggctcttccctcatcctcccaactgtgtgctctggctccacagtgaatgctactttttagcccccagactgaccacccagtaaggcagttggccttggagccaggcttcctgggctcaaatcttggctctgatgccgcctagctgtatgatcctgggtaagttacttaacctcctggagactccgtttcctcatctgcaaaatggggcaataatccctaccttacagccttacagaggaagattaaataagctcttgcctgtacagtgcctgacccatagtagatgctcaacaaatagtactgatttactaatgccctgagtcaaccccctttattttcctctaagagtccctttttgaccatgggcccttccatttgctgtccccattgagtcctaacaaaacttcactgggtcccaggctgagtctgtagaggctctgatccctgaaccccaacagctcttctcagtgacttctactacccttaccccaagcccttatggacccatgaccctctcacccccaagaccttccaccttaccctgatctccttctccttactgccccaaacactccctaatccctggatcccacccagcctcccaggccattgctgactcagcccctgtcttgcaggctctccaagtggcccggcagttcctgctgcagcaggcctcaggcctgagctccccagggaacaatgacagcaaacagtctgcctctgctgtgcaggtgaggaagagagcaccccgctggctctgggttgggctggagtgtgggcctggcacagagggagggcaaggacccgttggagaactgctcttgccagttccaacaccaaaaagtgggcaacttttcaaaggaaatacagtcactgcaggggtggggcaaaaaggcttcccactttctctcgtctccacctgatcagccagaccttccgctagcttagcctctttgtccctgtcactcaaagtttgtctgcagctctccctgtctctttgtacctctctcactgtttgttctcccctgcctcttcccttcagggtctctcttggtcacttctcatgtttctgcgtccctgtcggtcactccctctgtccctctgtgttcctgtgtctggggctcagcccctcccaggccatctctgttgctgcagtcacgtcaccaagtccccccttctcttatcctccccccttatccctcatccaccagctctctcgcagtctctccatgcttcctgtctcttgatgtctctctgtctcttttgttttcctttgcacaatctgcccttttttccccttctcccttccctccagcttgccagcccatctggctggctgggggaggggagatctgtggggggtgggcggggggtgggggagccaggccttctgtttaccttttgtgtcacaaagaacttgggagaattgcagtctgagtccgggttgggtcactactcgggcagccactcccctccccctctgcccagcagcccgggatccatgctccccccacccctcccccagcagagggaggctcagaattggggaagggattaagccaggctttgaaaggaagtttatctaagggaagaagggtgagtatggttggttctgagctggaggtgctctggagtctggggctgggtgctgagggaagtgaagaggagggtggggtgggtgcagggtgctcagagaaggacccaggaccaggctttgtcctgggtggagattccagtgctctgacaaagtctgagttttatgtaaaacaagtttatgtttggaaaaagttcaaggtgcccaacagatgtgcagccttaacagtaaccctcttaaaattcttgaccctaaggagacaaccctcaaaggggaggagctgggcaaagatcagggcgtggcctggggtggaggaggggaagacacaatctggaaagtcaataaagagaggaagagaaagatctcatcagaatgagatctaaaaggttctcatacccatgctggtcaggattgggcctctttaaattaatgatccccacatacaatcccagggtttgaagtggtccttgggcttccactctgaatcctgcccgccctggacccagcttagaacaggaaggagtaggctggacaacagcaaacgttcccccaaaccagaaaggggctgctgacccaggggtaggagggtaggagcttgatggtagtgggagggactggggtaagacatctagaaggactgctcagctggggattaagggtcacagatctgaaataattgagagctgaagggagactatggaatcttccttaggaaactccctccctccaaaataagagaggcctagaggtttcagagtcagaaagacagataaaatgatgtttttctcaggccttctctctccttgtctcattacttccaaaaattcattgattgattcattcattcattcaacaaatacttactgagtacatcccaaactaacaactgacatatacagagtgcttaccatgaagtgtagacactaagcgctttacagctatctcatttatcctcacagtcctatgggagaggtgctattctagccccatcttgcagatgaggaaactgaggcccagagaggttaagaaagttgtccaaagttatacaacaaataaaagacagagtgaggatttgaacccaatagctccagaactcacacttttttttttttttttttgagatggagtctcttgttgcccaggctggagtgcaatgccgtgatttcagctcaccacaacctctgcctcccgggttcaagcagttttcctgcctcagtctcccaagtagctgggattacaggcatgcaccaccaagcccagctaattttgtatttttagtagggttgtatttttagtaggttttagtagcgttgtgtttttaggttttctccatgttggtcaggctggtctcaaacccccaacctcaggtgatctgcgcgcctctgcctcccaaagtgctgggattacaggcgtgagccatcgtgcccggccagtagaactcacacttttaatctctgcattgtgacgatcccttgtgcttggcacaatattggtaataatgccaatatttccctggtgtagaagcctaggccagatggttctcagggtctcagggatatgggggttcttggggccatggagccatgcttccccaggagcctggattccctacctatattgatccctctatttcttctccaaccctgaataccttccttgccttctgcccctattcctaagtttattatctccaaggaggtcagatccttgtcctgaagtagggcccagggccttgaaatgttcttctatgagctcaagattggtgaggggataggggagagcaaggactgggctccccacccgagcagaagagtgcatcttgagcctgagtgcagtggataatgaagggagatcaagcgcagctcctttcccagggctccccacagaacgctgctctgctccccagcaggattttctgcccacgcacctcccagccacgttcaccatccctctcctccagagccagcttcagaagagtttccaaaactattgtcaggtctccagctccagcctagtgaggggccctccttccaggcctggaccccaccagggagagacctatcatagaaggcagcacaggtggccgagagttgaggacatgatgggggcaaaggtggctggggccttggcttcgtccatccccatctggcattttcagaagttcttctttatatctcactgctatctttccttgctgcagctgcagcccaggattagtttgaggacttctggtcatttgcaggagagtttaagccaaaccaaactctggcctgatctccccacattgccccccactcacagggaccccatactcaagagacaatttgggttcttgaccctggcaccaaattgcattcgttcccactctcagccctcaaataagcttcctgtgtgtcaggcactgtccctgttccttccagtcagaccgtccagccgagcacgctgtattcatgggtgggtgcagggtccctgagggaggggctggaggcagctgccggcgtttggcccagggctcacactgccagggcttaagttagcacttagctgcccagctactctccagatggtgactcatgggccctgctgagcctgctagctgcagagcgcccatcctgaggcatctgagcctggcaaggggccagcgggacaccagaggagctccagctcagttctcagacccccaaggggcacaaggagaggtggatgaggtcaaccaactcaggagatcagcatgcggcagccacttcccagaccctttgtgaccccagtgggccacctcgagacgagtgcacaccatgtaatccatccagatctctgtagcagcctccataggcagctgctcagccaagtggcaggaaaagcaagtgccaaggaggccttccaaggtcatctcttccattcccctgcttccaaggaagaaaggcccgaggaaggaaaggccacatccttttttcacatgctcctgtcagtgactcacagtcctggtgcctggaaagatcttctgagtgtctggtctcagtctttcctgttgcgggccacgttcgtctctagttcagctctcacagcagtgagaatgagtggcctagtgccttggtcctcagtgacctttgtcaggcagcaccctaaggcacaccaggggaggagacagagaaggaggggaaagggaaaatccagaatgttttaaaaagtgattttcttcacgtttacatagaatttaatggcgtacaagtcactttcacccctgctcccactgtcccttccgggtcagggtcagggcaggttatttaacctctctgggcctcagttttcccatctcatctgtgagatgttaatgatgatggcaccatcctcacagggttgccgtgaagattccatgagatacacgtgtaaagggcttagccaagtgccgtgctgggcacataataagcagtcagcaacgtctgctaatgatgcagggagggcaggtgccccaaatcccagttagccgaccgggaaagtgaggcttggtgatttcaaggctagtaaatatcagggacaaaaaccaaggtcacctgacccagaaatctagggctctgagctcacctgcaccaagatgcctctctttgttgggcacccccttgggaggaggaaagaaaggacagtggtacttgttccatgtctttggatggcaaaacccaccttctttgagcagcctccccagctgcctctggaacacccaacaacagacttaggggctggctctggagttgggtctatgccgttgtctgcctccaaccccaggcccaccacatccacccctgcagcctggctttcagagagtccttctaggatacaaccgtagagtaggaagttagcctttgggatctcagcctcatcagccccctcagcctccggacgtcccacctccacattctctccctaacccttcccaagacctgccctgcggtggggcaggcagcataggatgtgaaaaccctgggagctatggagtatgcagacctcagcttacatcccaaccctgccacttaaggccaccagactttcctggtctcctcattggtaaaaatgaggttaaaaaacaacaacaacaacaaagaacaaaaaacactcctaagggcatatcccccactggcttagaggtctcttggagccttcattcacatggtatgcccatgactaaagagctaggtgttacccctcccaggcccatgtggatagagatgggctgggataggggagtaaagcccaggggcagggacagccgccagtgatggggtgagcgagaggtgttgggagccatgggattccccaatgtccttggattcactgtacctccctggttgcttctctgcctggggatttcctaatccatggcttaaggggtggttcaaggctgagtcctgcctctgccaggcattgaaaagagatccaactcctcctcccctaccccacaggtgaggctgaggcttgggagagggtcccctgaggacctagcctgtcacagcctaggacaagtccctacacagcactcctctctgactgggctagccctgtaaccttcccttcctgcttccgggctggcagaggggcctctgaggtgccagggaaggcatttcagctcaggggggctaacacttagtgtacctaccatgtgccaggcactctgccacaacttgggagtgagagaggaaattagagaagagtcctgtatgcatggggtcacagagtggagggggcggcagacagccccatcagagcacctgtcctgctaatacaggaacaagacaaaatagcagctgagacctgcctgtccatgactgcacaagcctggggggttcaggggaggtggggctgggaagagaatgatgtcattgcttttctctgaatcttttccctgtagctggattctttgggccttctatagaggcctgacccagggcagggggtagaaagctgttctactttgagaatcctgaatgttccagcctagaaggaatcatctcttacagcatagtctcttatgttttatgtttgaggaaaccgaaacataagagagggcaagtgacttgctagagtcacacagccagctcagtgcagagttaggagcggaagcctgccctgctaactccctgcctgccattcttcccaccccaccctagacatagctacacacatgcacacacattaggaccaggatggcaccaagagcgctctgtgggcttcacctctggccactgtgtgtgccgtccaggcaggtgtgccggggtgtgtgagaggagacaaagtgcaggtcctcgtgcaaggtgggccacgttttgaatccttcccatgctgtagactgccctcccagccaggcctaccttgcaggaagtggtctcaaaatagactgcgtgagactatgggtggcctggtatgctgtccctccccattactggggggaaccagccaaagcatgggttctactgaccagtgtcactacagcctaatcttcctgctctaaggacagcccgtcctatgataatagccaacccttatgtgcacttgctgtgtgccaggccttgttttaagtattcactgattagtccttatggtgaccttaataggtaggtactatcactgttttcgttttagagataaagaaaacagacaacaggaaggtaagtcactgtccaaagagagagacagccagcaggcagcagagccagaattggaacccaggcagcctccctgggagccactctgccacgctgagagtggggccctgggtggtgcctcctcctgggttggggtccaggggacagggctaacgggccgaatcctgcaggtgcctgtgtcggtggccatgatgtcgccgcagatgcttaccccgcaacagatgcagcagatcctgtcgcccccgcagctgcaggccttgctccagcagcagcaagccctcatgctccagcaggtgagtctggccccagggcagctggtccctcctcctctgcctggcctggctcctcccaccctgtttacacctcaccaagggcccaagctgtcccagaaaccagagagactgctcaggccagactgatctgcattcctctagggtagtggggagaggtcaaaggtcaggcatctcttatggtggccctgcccccacaatactccccggtcctccctccctgcatgctggccccacttctatctcctgaacagggaagggcaaagtactggaacattctggcacgttgtcccctgtgacctgctcaggagatccaccaaaagcagggagggttcagagctgtgggaatgaaactcctccatcccttgctccctccctccgcacccagaccctgctcagggcccctccaggctgactggggaaagccagaccatgttttagggaaactcccttctcctgcccccaggagcccagatgggacagggctggggttgtggggatagcagtaccctgccagtggtaaccctcctccacccccccagctacaggagtactacaagaagcagcaggagcagctccacctgcagctcctcacccagcagcaggctgggaaaccgcagcccaaagaggtaaggggctgtaccagggcccaccaccgccctcaccccctgcccagagctgggtgtccagagctggtcaggagggaattgccttgcaggaatagtagaaaaatctagaaaaggctgaggaaggggaccaaggatcagtgtgggggaaatggggatggtggttcttacgtgtctccatctcccctcatccccattcattctttctctccttgcctcgtgttgttgtctctgtgcacatgggtgtagacaggtgtgtacgtgtcacccccgtgtgtggtgtctgccgggccacgctcatgtgccttgtggtcgcaccatcttcctgcccccttgtctctttgtgacccagcacctcagccctcccctccttgtcctgcgaatctctgagtccctcagcaaaccacctccccttacctcagcctgcccccagcttcttccccttcttcttatgacttgcccagccacccctcggtctcctctcagagctccccagcctacatcccctaccccatcggagcttctataccaggccctggaggcccttctcccctgggtcccagacctgtgcatctctcctgctgcccaaccgcagccccaagctctaagtttcctcttcccagaaggctgccctgacacccaggaattctccagcacccccagtctccccctcagcagtcttgtaattgctgtgttatcagcaggtaaatctctaggctaagtttatcctgtgtctctctattgaatagccagcccccaccctaccccatgcttcccacccccagcaggcaggcagagacatctctgcctctcaacccacccaggacatgcttggctcatggggctcaagagagacttgctgacagcctgacttgtcagtgcctgtgtgaagaactgaatgggtgggggtaggtagagtgggtgagccaacgagtacagggcgcctgggcagtggtgatgtgactgttctccgagcctgggtcccagtgagtcccgtcagactccttgattctctgtatctaaaaagcaagagaggaaaagagctgggggagagaaaactccctccccagagcagaagggggcaccccgggcatgtgggaagggtgccctccaggcaggagtggcccccagaatctgacaggctcatcgatcattgtgatgaggcacccccaggcgtgcacagctgcggtgcagggagctgaagcagcggaaggagggaggcgggaggagggagggcgtcgtgctgcgtgtctgggtctggctgtgtgtgtttgcgcgcgtgcgtgcgtgcgtgcatgcgtgtgtttactgcgaggaggcatgcagccttatggaagctgggccgggagcagagacactgcagctgcagacgccacaacgacagctccaggggctgacaggccctgggagggggtggccgcggggtgggggccagatggcatgcctgaagctgatggcacccctctctgcccgccccctcgggcccctcaccaggcactggggaacaagcagctggccttccagcagcagctcctgcaaatgcaacagttgcagcagcagcacctgctcaacctgcagaggcaggggctggtcagcctgcagcccaaccaagcctcggggcccctccagacccttccgcaaggtgagcacccgccactcctcccctcccagccccaaccccacagccctgcctgtacgcaacagctggcagcccctgttcttggggccaggtagaaagccgagtgttcgtggggccctgccagcctcccctgtctctcccacagcagctgtttgcccaacagacctgccccagctgtggaagggcgagggtgcccccgggcagcctgccgaggacagcgtcaagcaggaggggctggacctcactggcacggccgccaccgctacctcgtttgccgctccccccaaggtctcaccccccctctcccaccataccctgcccaacggacagcctactgtgctcacatctcggagagacaggtacaggggtccaggctgggaggggcatcaaaggcctgcctgggggtagacctggccccccacccatgagggctgactgtgagggagggggtggagcccacggaccggaggttcactccctctccactccctctcccggggtgtacagatggtgcttggccgctgggaaacctgtattggggcagaaatgtcaccagcaggggagctggtgctcagctgactacagggccgctggggtcttcagggtccctgatcggccacctccctgctgtcctcccagctcttcccacgaggagacccccggctcccaccccctgtacggacacggagagtgcaagtggccaggctgtgagaccctgtgtgaagacctgggccagtttatcaagtaggtgtcacccccagcccctcccccagcagcctttccccacagggcctctcccccaaccctgcccactagcttgccccttctgggagccctcctcactagctgtactactgtcctcactccagagggttctagttctttctctgccccccacggactccctgatcacccactccctaccctgtctatatttctgggcctgcattcccctgactccatccccagcgcagggtgcgggtaggagaaggagaggacaaacataagcattactcctccccccaccctcccctgctcccctccagcctcagccccggggagtgatggcgagtgacaggctgagggccgcagacaggcagggcgggaggtggacgggcggctggcagcaggcggccagctgccacagccgtgccaggctctgtcactgactgattaactccgctgtctcccagacccttgcagcatcagggtcaaacaaattgttttcacgcttcgtcagaggtttacttaattagttcatttgcaattagatctctctgtagctgggattttagcaaagacatcaaaggaggctgacgagaagggagaagccttcctccattgccccgtttttccacctctttctcttctttgtatctcttggtctgtctgcttttcaggccatgggtgggattagaggataggatgggaggatggtggcagcagggaaaccggagccaactttctctcctcctctcttccccttgaagacacctcaacacagagcacgccctggatgaccggagtacagcccagtgccgggtacagatgcaggtggtgcagcagctggagatccaggtgtggcccggaagatgctggggagggacatggtgggctccagcccctgcccacccacagcactgacttgctaggtgggctctgttgggagggtctcatggaagggtcctatggtcaaagccaccatcttatgctttctaggtcctaatgaccatggttgtgaggtgaggacagctggattctgaggggtaaaccaaggttgggggcgtctctgctgggaggtccagaagagactcacgctacatagaaacatcaaaaataattattagcagctaacatatggagcacttactttgtgctgtgctaaatactttatatagctcaaggaatcctctcaacaaccttatgtggtgggtaccattattctccccattttccagatggagaaaacaggcacacagagctaaagtaacttgcctgtgagtggcagagctgggattagaacccaggcagcctggctttcccaagggagtatcccagctacttgagaggggacactcagcagcacagggttcccaggaagcaactcagggcagctcctctgtgcttacccatctccctccagcacctagcagagcatcctgctgtgagagggtggtcatgagagacccattgagtttatgaatggggtgtctgagccattcatcagttcctgcatctgcattcagtatgcaaggccctcacacacaagtgccactgcacaaggcacagtggccgcccccccgtgggtgggtaggaagaagcctcccaacatgtagaggcagggataagctccagccaggacgcactgggagggctcaaatggtcaccatccaggggagaaagggagaggcttcatggagctggcagcccttgaggggtagagcattgctgaggcctccctggagcgggtcacagagggagcatggatgctgaggcaaggaggcgaatgggggtgggaatcggcggccttctgaagagcctggcggtggaggggtgggacaacactgcctccagggttcagcctcccgctcacctcctgctttgccaccctccacagctcgccaaggagagcgagcggctgcaggccatgatggcccacctgcacatgcggccctcggagcccaagcccttcagccagccagtgagtgctgctcccctccccgcccctcccagagccttccacagaccctggagcctcgggacccccaccctcgggcactggtctcagtaccctccccgttgctcacagctgaacccggtccccggctcctcctcattctccaaggtgaccgtctctgcagcagactcattcccagatggtctcgtgcaccccccgacctcggccgcagcccctgtcacccctctacggccccctggcctgggctctgcctccctgcatggtgggggcccagcccgtcggagaagcagtgacaagttctgctcccccatctcctcaggtgagggtgggctgggggctgcagggcgacagcagcgtgaggctgtttttcccatctgagccccatatctggctacctcatcctctgcctgtctccccagagctggcccagaatcatgagttctacaagaacgccgacgtccggccccccttcacctacgcctccctcatccgccaggtgagcagggcaggtaggaggagggtggggaatggcacacaggctgctcccccagcccccgccacacccctgcctccaggaaggtcctggggccaagcaatggagctgtcccgctccctctcacgtggcggtcttccctctctgctgtgcggggctctcctgcaggctgggccctgtcagcctgctgcatagggttatgtgtctctgggggtgcacacactgttcttcttactgacacccaccgtggcattcatgtgctcatttccacgtacacagcccgccatgatagactcagggtcactcttcgtctctctcctttgtctttcctccctcaagcccatgatcttcatgtcaccaatgttcacatagtattcacactcaagcatgaacttacatcgacacatatgtcctccctgatacccacacaggcatgtacaccttcacacacattctttctgtcacacacacactgtgcttagggtaccttttgccaaaatcaggataaattccaaacagcctccaccccgtggacatctctcccaagaaagacaggactgactgctttcaccctcggtgcagggccaggtactaaaggcattttctctccagaagcagctccaatccttcttgtacaaatacatagcccttggaggctcctgccctctttatccttggccaagctataaccagcctgtccctctgaggggacccaccagccaccacccatcttgttatccacacatttctgagcaggtcttctcacaaagtgaactcggggctaggcagaagggagaggtactgggggagggaacccagggctgtgacccttcgaggcccaggctgacggtccctttgcttgttccttccccgcaggccatcctggaaacccctgacaggcagctgaccctgaatgagatctataactggttcaccaggatgttcgcctatttccgcagaaacactgccacctggaaggtgaagcaggccccttccaccttctgggccccagtcacccttggacctgccatatcccatggagaccaaggctgcctaacaattagttccctaaaccattagtcctgcagaaacagccacccaagggcccagccagggctgcatgcccacgcccacctcagcaggggctgtggattgttccataaccttttaatgatcccttccttccagcctggtgctgcctcctttctgggaagcaatccttctctagggtacacccccaagggccccaaagacgccagccccacgaggtagggcctctaggaattgctaatgcccaagcttgatacagaagcctgggccgaatttcacagagaccctaagggtctggataccttggcttaaggtacatgttctgaagcctgaggtggggctaggaaagcgcaggtatagacacacggatggaccaagagccgtggaccacacattggggcactgacggcactcacagccctccccagctctgccatccctggcaggaagataattgtctccatccaattagtcatttcaacaccttcagccataagttttcctgggagagcagaagcaggcaagagggggactctagaaaaatgggagacagatgctggggtactaggccatttatttttctatagccaaaaggggggtgtgtgtgtgtgtctgtctgtctgtctcaaggtgggaaggtgatatctaaattgggagagtgggcggggcggggggaagaaggagagagtgttcgcccctgcagggaaggttagacgcggggaaggactccctctcagaaccttaattggatccctggctcttgagtccccctgctggccactgaagaaactgcagttaaacgggctacctcccccaatcccactaggtttcaacaagtgttactgaacccctcctccccaccagcgcccaggacttggtggggtctgcacagtgcctgcctaccctttgccctgggattatgctaagtgcagcagaagggactgcatcatgactttcatatgctcatacccaattcccaaagcttgggagagaagctgggaggctgttgggacagctgctgtaattggctgtgagtgatgtcattttctgccaaccacattcctgccctctttctgagccagcagggcttgcttgggaccacctggtccagtctccaacctccaagtcagttcagataccaggtttttataaatgatagagtcctacaaacataagggatgattataattattacctaatgtttaataaagcatattaatcttttgcctttaggggtagtaatatagagcctcctttccataagacagcctcctttttgggggcaaagtactgctaagccacctaccttccttccttccttctgtcttacctgtaatgccctgctgcaattttctaattctctcttctcttgaggtcaggttaggtgacctggtttaggtgacttccttaaactactcagtgaccatcctgaagccacccccctgatattctaaccctgccgcccttgcccagcccagcctttcacatctctgtggtgtgttcctcctagttcttcacccccatctcccctcacctagtctagggtccagtaagaagcatctgggctggggaaagtgaacgactaagtgggtgactttgccagttagcagtgttctgctgctgcctctgtgcctgaggccactgcctgagccttcctcatggcacagcagaatccatccagcttgaggtccactttgaccttctggtttttttcagccaaatgcattcatgttacttgggaaatacaccatctacacccaactctgcttcccttccacctctactttccactcatttctcagcccctcaggtcatctctgctcctctcccgaattatttgtgctttcttctttcccttcttcacctttgctggctcccaccctgagatactttccacctcagaccagggcagaagggttgggagcgggcatggtgtgggcccagccagctgccgttcatccagggacagagctgccatctgccaagctgatggtccttgctggccctccccgtgtccatcccctcccaaggcccgtgttgtgggcccgtccttttgtttacgaagcccctgccagaccccttaaattgccgttaatgtttcagcgtaacgaattagtctctcatcacgaatcaggcttcgaaatgagggaaaaaagccccggtgaggccatcctcggaaattggggtcattctcatttgcaaagcggaggatcggagccccgtaatgcgggcaaatttattccgaggcaggagccccggcgtgattaggccctttgtaattatcgctccaagagattccactccagccgcccgcctccctcgtggattagcaagcgagtcggaaaaatacacaggatttaattagaggcaaattaaaattggtaatgaaatcgggccagttgcaagtggcaagagttggaagggagagagggagagggatctccaggggcacgggctgcctgccctacccgctttcttccccgtttagaaatgtaaagaggagacaaggatggggacgaggcgggggaggctaagggaggacaggtaacagggtccagggatgcaggcagggatggtgataactgggagctggccgtgggggcagcacagctgagagaggagggtgcagggacaggactgagggacacgatgaggtggggcagactagggccctagtccgggctcccatggtggtgaggggggaattgggccaagcaccccgccctcgcccaagcgtcctacaaaccagatgacctcaattcttgaagttatcctgccaggaggaggtgggacagacaaggtgacttatcttctttctctcctctttctgcctctgggttgtcaacccacactctcctctctccctgtttatttcaacaagtatgtatgaggcctttactgtataccttgtgctctcaaaatataagctgcctgttctgagccacagccaaagcatggctcccagactcctgtgggtcagtggaggtggcagtgagggtttatgagctctttcccaaacttttaaaagctttgtggaaattctgcatgcagctgagatgaagcatcctgggctcgcagagatgccggggcccgaatgtgatctgctgctgatccaaagccctgagtaacaattacatgtgtctttgattaacgaagatgatgaaacagattattactaactggatagcatttagttagtagacagaactttccaagatgtggcagggagagaggaggcagctaataaaatgggtcatccatggtgaagaggctgggaacccctggctctatggaaagggtaggggcccgccttccctttggctgggtctcctcccagcccacccccctcccctgctcatccctgagctggggaaggtgggccgctgctgcgtgggacatgggatgggatgaggactatcatgtttgtgcttggccaagcaagccgcctctgagctcctcttcactgcacccacagaacgccgtgcgccacaacctcagcctgcacaagtgcttcgtccgcgtggagaacgtcaagggtgccgtgtggactgtggacgagcgggagtatcagaagcggagaccgccaaagatgacagggtatgtgggtccagagctggatgggctgtacctgcccagggggcaggagccaactcacccccaccccctacctctccagggtacacatgtgcaccagatccttcctggctgggggaaggggtgtggggagaaaggagcagaggagactagtgcttggggacagggggctggaatccggaagtgatggataatcagaaggcagacatttatgtcctcttctgtcctcactctgactgagggaaggggccaagaaggaggcctggtagcaaagagagacaggggccccaagtagccctggccagagctggcacacaggcagatgccagccaacgggccatgggtgaggggctgccacccccagggcacccgctctctcagctcatcaggatgactagacctctgaggtcccgcgaccccaccaattcatcttacggcagaggagagccagtgagggccaggggctggcaggaggccccagagcagatttgtggcagagctggttccaggaccaggtctctgccctcctggtcttttgtgctcagcttcacttcaccacctggcattttatttatttacttatttatttattatttttttaattttattattttattcatttattttttttgagaaggagttttgttcttgttgcccaggctagagtgcaatggcacgatctcagctcactggaacctccacttcccgggttcaagcaattctcctgccccagcctttcgggtagctagaattacaggtgcccacgaccacgcccggctaattttttttgtatttagtagaaatgtggtttcaccacgttggtcaggctggtctcgaattcccaacttcaggtgatccacctgccttggcctcccaaagtgctaggattataggcgtgcaccagcgcacctggcctattatttttttgagacagagtcttgctctgttgcccaggctggagtgcagtggcacgattttggctcactgcaacctccaccttgtgggttcaagcgattctcctgccttagcctcccgagaagctgaaattacaggcgcccaccaccacacccagctaattattttacttttggtagagacggggtttcaccctgttgaccaggctgatctcgaactcctgacctcaggtgatctgcccgcatcggcctcccaaaatgctgggattacaggcgtgagctaccgcacctagcctccacctggcagtttaaacagaaactgaggagcctgggacagggtcaggacctccctttggcttccacgtagcagcagtggccttctcccgacctcaaacagccccaccccagccacctgcttgctgtgccccttgggccagagcccctgggtaaggagaggagagcaagttagatggatgtctctgaggtgtggggtgtctgctcccctcaaagatgcctgcttaccaggcaggagcctttgcaccccaggcagtgtgcagcctggagaatggagggaagccatcccctggtgaatgcctaggggccagtctccaggcctggctgcgcttgcacctctgcttctcaccagtttggtgacctttggctgtttccttaagctctgtgagagctctgtgatggtgtcatcactggaagagggacagcccccagccactgcttttcctgtcccaactcccgaacaccttcccgtgcagagaagccttctgtatggaggcttccatacagaagcctccatgtgggacaggctgagcatatgtctgacatgtcccaaaatctaggatggcaagacagtgtgggcagaccaggtgtgtaactactgagactatagattagaccttgccaaacattggaaaatctagaccggagagaaaacgggtgggggggcagcatgctgtgaaggcagacactggggggatgccagttcccacttcccagctccgagacctggacaggtccctgaaccaagcccatcgcacccacctgtgaaggggctgctcctgcagggccagttgagcgtgaagaccgaatcagaccaagtacacacacagctccaagacagcggctgatccgccctggcctcccggaatagggaatgggacccattcccagcacaggccgttacttagtgagagtaaagagatgcgaatgaagagctaagtgaatgagtgagccaaagatggccttctctgtcctccaggagccccaccctggtgaagaacatgatctctggcctcagctatggagcacttaatgccagctaccaggtgacctgcccagagcccacccactcacctctacctcccgcccccttgctttctcatacaagagacccccatcctcccctgcagaggactcaccagaggagggaaggagggtgaagacccaaactctccgagaccccacctctctgccccaccccaactcggggccagcctccacctctgctttcaaggctgggttcagacaaggcaggcagctgggaggatggcatacctatagcatcccctttcctggtttgtcagtctgggggttctctgttccctgggagaggggataagccaggcccaggttccaggaaagctaggaggtaggaggtcggggggtcagagttccagccatgggggaggggtgctacattcaaaggctgagttggggcttgggggttgcccagacagatccgcccgtggggccagtaggcagacacacaggcagctctctagtgggcggggaaggcacagcacttgactgagtgtgccccatcctgtggagccactgacgaggcccaaccctgtgcccctgcaggccgccctggccgagagcagcttccccctcctcaacagccctggcatgctgaaccctggctccgccagcagcctgctgcccctcagccacgatgacgtgggtgcccccgtggagccgctgcccagcaacggcagcagcagccctcctcgcctctccccgccccagtacaggtgagcacacagcacggacccccacccaccccagcacccctcaaccaccagggaggaggcgtcatcccccaccctgggtggggttccccatcccacccccaccacgcctctccccaggacaagtggcttctctcttccttccctcagccctctcagccctcccttgtcccacctgcctgttcttatcccctctccccacctccccaccttcccaccttctcctccccattttccccctttcttatttttcctcctcctctcttctcttttttttttttttttttaagacggagtctcgctctgtcacccaggctggagtgtaatggcaagatcttggctcactgcaacctctgcctcctgggttcaagtgattctcctgcctcagcctcccaagtagctggaattataggtgcctgccaccatgcccagctaattattttgtatttagtagagaatggggtttcaccgtgctggccaggctggtctcgacctcctgatttcaggtgatccactggcctcgccctcccaaaatgctgggattacatgtgtgagccacctcgcctggcctctcttctatctttcttctccttcctccgttcgctcatctcccctctgctcccctcttctctcctccccaacccagagcagtctctgccccaggaccagcttttctttgaagagagccctaggggagatcagccctcaggtctgatgggatcctggggagggggctgtgggcaccccactgtgccccagagttctgggtgagtttggggggcagggggcagagggcatcagaggacagccgcctggtgcccatgccatacttttgcctcagccaccaggtgcaggtgaaggaggagccagcagaggcagaggaagacaggcagcccgggcctcccctgggcgcccctaaccccagcgcctcggggcctccggaagacagggacctggaggaggagctgccgggagaagaactgtcctaagggcctgtagtgaccggcagggctggggtgagacccctcccttccagaatccaggccccatctcccccaactccacagcccctcccgagcctcaaggcaagtccaggactcagaccggggaggcccgggccagcagctcccagtgtgacctgacaaaaacacgtaggggcagggacggtccccacccccagggacacaacccctggtcttggaccagtagaggacacggagggttcagacccctcctcagaccctccccacatctgaaactgcctccccccaaccaccagcagcagcagggccctcctcccccaccagctctccccacagggcccctcagcatcatggagacccgcaggcggggcttagccacccctcaaacccagggccccctggcacctggctctggccgtgttttctggccagaggcccccactttcctaactcgtgctcccttccgccttcttttccgtactgtgaagaaagaactctccaccccagctcccaccctgccctggcctgggtggaggaactgtgcctccatccccagaagaaacagccccctctgctgctggggtgggactgtctgtgtgccctgtgggggtccgtgtgagcaggcccacctggctccagacccgcccccaacctgagacagaaccaggctgagccaggcctccacccccacccccgtttgctgggggctcctccagccgcccccatgggaagaggcctggtaccgcctcacccacagaggtctgtgccaggtgcgcttctgcaggtggagccaagctctccctgaggccagaggcggggcctgggccgggagcccaggggaaggccaggctggaccccggctccacacccacatccagcctgcaggcctctctgcagtcctctcaccctccctcagctccccttcctctgcagtcaccctcagctccccttccttgcccgcctctccccccgccgccccaccagttaaacggatgaccaaagacctttcttatgccggaagcaaaaaccaaaactttttgttggctttttcctttgtcgcctccccagcacctgccctcccagtctcccaccccggccccaggctggaagccctccctccacttaagttattgttttaaaccaaagtttacagtgtctgttggtggccaagaccttctctctccacccctcctccatccaccctgaggaccctggggctcagtggaggcagggccctgcccccctcccttccgctcctgcccagcctgggggaaggagaaaggaggggagaaagcgggctctcaccccctcaggagtgggcacgggagcccttctccctgaccctgggctgcttcctgggggctctccagacccctctctaggaccaagtcacccgtcgtgctgggagtgtggattctagcaaaagagctggaaaaaagtcagactctccacagaccccctatgggggacccccaactcaaggccaaggactgggcgtatcggatgctcataacacccctggcctggcccctttactgagaagactccttggatatttcccaagaaccccccacatacacccctcacaagccacccctcctgagaggcagggggccctccgccccctccccatgtattccccacctgtgttccgtttgaccagcacagaaatattaaacgtcctctattcaccgggccctgtgtgtgtcaccgaggtgcgggaggggaggagcattaaagctgaaagatcgctctgctcggggagcctgggcagagcagcagcaacgtgagggtcgctgtggtggtggtttctgtgagtggatggaatgagcagccctgcaggggcgctgggcatgtgccctcactgtggacagggcccacccacctccggttcccctgtgcctcctgtcccttccacgcttaaacagggttctctgtcattttcctgttttcttccagagtcccaatcctttgccctagttctttcactagtttgaaatccaagttcttgccagagtgttggagcaaggcagctgatttgctgcagggatggagaggaccaccgccgcagggttcttttacctgtgccaccagctctggagacatccacacccattcccaggtgtccttccaggcccattgtccacgtcttcaagggggctgcctggataggcgtgtgtgtgtgtagtgcccaggtgtggtggtggcatcctgaagcagtaggaccattagtgtgcgtgcacacccacgtggcacactgtgtggtgaccatggtcatcatagtgggctcacggcggaaacgggatcattcaacctatacaaaggggaccctggataggctgcaaggaaagaggccaagggccaagctgctaagccaaagatggcccctgacacctcccccagccccagcacaccagcctgcacctcttatcccgtgttaagtcctggttccccacctgctgcccctcctcaacacagagcccctcccgccgcctcagacccctgtgcacatccccagggcctcagccgtctcattggtctttattttttattttttttaagatggagtttcgctcttattgcccagactggagtgcagtgatgctatctcggctcactgcaacctttgcctcccaggttcaagtgattctcctgcctcagcctcccaagtagctgggattacaggcgtgcaccaccacgccgggctaaatttttttgtatttttagtagagacggggtttctctatgttggtcaggctgatctcgaactcccgacctcaggtgatccgccagcctcagcctcccaaagtgctgggattacaggcgtgagccactgcacccggctctcactggtcttacgccaccttctggacactccctccttgagggcagaaaggagtcccaggcctgtccctagggacaaggcccagggaagagtgtatttggggagcaggggaggggagggtgttgagaaagctgaactggagtcaatcacccttcccacaaatcaccaaactgctggaactctccagccaaatgctgggagaaggacctggagggtgagtctttgctgacctctctctactctcaggcatgtcttttgtccttttcgtccatctatttctgtctgtcgctcactcgccccgctttctctgtctcaccttcatccactctgcaggcctgctccaccacagccctaatcctctggacgcttgtgtagggcctggggtgaattccctgtcccccatggtacctcgagaggggctggggagctcagcttggtctcagagtctccccaccagatactgtttaaaaaagtagcactgatgtgttttgtaatctgcccctcccagccctccgtggaggctgccagggccttgtacggtaaacctagctgcatgtaatctgtggacaatggcattctctacaatgcaataaaaacaattacccatgattttgctgcggccgcttcccctttccccttcttcccctcccagctgggacctaccagaatgccccagagaatccttaggtgttggctgccagtctcccagcccccttactctgcccccttgaagaagtagtcagttctgtggaccagccccgggggcattcttcctatgccagactctggagggacaagactgcacctagctttattctcaggaccgtccttcccgcggtctaacttcagtttctcctgcttcaactagagtcctctttttattcctctcacagggatatagtgaatggtcagtgcatttgcaggtggggtgatgatctattttggacactggtacaggagagggtcttgcaatataagaaacaagagctgttatgaaccaccaccttctgggtgcattgggcttatagactcagtaatttattttcttcctgatctgacatcctacatggggcagccctcccacaattattaccttattcgaagtatgaaccaacatgtccaccccacccccaacccccatcacgctttgcctcaggaagcgctgcatgctgggtatgtagcttctctcctttctactgttaactcacagccagggagtaggctgttaactgcagctggcagcttgtcctggtcttagcattgctgagccctgttggggaagctatctttggaacctggggaaaaaaaaaagagaaatactccaagccggacgttttaggggtgggataagtagcgctctgcgctctgcatccgacagaagtcccccttccccttggcactcagcacttcgctcccccaccatgaactcgccaccttgcccaaggccttcttgccgatggtcagcagagggcgctttaaacaaagcagaccggctcctctggacaaacttgcctgtttccggggcacagaacaacttccctgagaatgccagccgccgtacagcggagggctcagtacctgtttttaatagtaataattattaacagttaatgagccctcattatgtgccaggcactatcctagaagctttatatttcatttcatccccaaaacgactctgagttaggtattattatccccattttatagatgaagagactgaggcagagtcaaagagatgagcagataaagcattaagaataaagaatctttgcagatgagcaatccgggttctgggtttaaaaaaaaaaatgaacctgtggctgacggtggggaaagagaagagggagaccctgtggtttgcccctgctttctagtgacacgatttactttggtgatcgctgcttccctccttctctggaggctccgagtggggaaatgaggctccgagcgcctcgaagctgggaattaggccctggcttctgagttccccagctgccattctactctaagcagaataaggtaaattgatcttgaaacagtcactgaaggacagagtgaggcagagaagtctgaattaccctataaaaataatcagacaggggccct

SEQ ID NO: 210 - DNA, 821437 bp, Homo sapiens
  source 1..821437: mol_type = genomic DNA
atctcttcctcctgtttaatgctagtgtcctcctttccccataaatgtggttgtgtgcctgtttgtctcgtccatgagagtaagcttttaagaactggaactctgcaccaaatgtgcagtgaaatgactttgttggagacccattgtctgcctgctggccctcatcagtggtgacttcatattcctctttttagagagttttacatagagcctttttgaaatggtatcctgggaaaataaagagctggctgtttgtaatactttctaccaggagtggggtgttcactttgtgttctctaataattaaatgttcggaatcaccttttttggcacaatgaaagggcagataaacagattgatagatgaagaggtgaaaagtaggaagcagtgggaaagaaatgggaagaggatcttcctatctaccagttgctttcatgtggtagagcttaatgagaagatgatacgctaatttcctgagctgtgacatatttacatgtagaagacttacgtgagggccctttgtcttttttcaagtgtagatgattttgagatggcctggttgcttccccaaggagaggaggcttcaggctctcccacgggcagtttttagggtgtaggaagtagagaacactctcttgatgggctcacttccagatgtgattctcagtggattgttttccttttcggcagcatcaactagctctagtggccaaggcttctgtaaggcttcccatccaggagtttttcatgcagggatgctattggaggccagacttccagttttgctaggaggagatgcctattaagttagggggccagggattcgattgcagcagtcactactcaagtcagtcagtcaccatttcatctgtaagtcagggactctttgtacttgcagtccccataggcgcttggctctcgtgatgtgatttagagagtcagtggcagggtttgagctgcagtgtgagcacagaggattaacggtagtcacagagagcctgagcagcctgtgtgagtgaccctctgcatcctacatggaatgagggacaacatggagagactaaagacgatccctcaaagcctagcttccttcattgctcctgccgtggactgtcttgcagggacagtacacatgctggcacatattacacacagggagccgtttgcagtgaatagtgatgcaaaggctgagatagtatcctcataaagattgacctctaatctcaagtccttttttgtagtagcaggaatacataatttagacaatattatcttgcacagttaacagaaggaaactagaataagagggaattcacctcagctgaacaaaccaagcttctctgtatcatctagcaagctcataaaaatgccatctatagattgactttaataaaggagcccactgaggacacaagcacctgaattacagattcccagtgcacacgcaagcatttatcgctgacagacaaaggaacaaaatctccaggaggcagctgggatcttttcattttgaaaatgctttaataagtgttgacaacactgttttgcaaaatgtaaaggtactatacaaattcttaatacaaaaagaataaattaaaagcagatttctttttttaattctgcaactttgtctacaacgtacatctttttcattgattacagttgaacagaatccagtaaaatcattttacatgctctacagtcagtttcaggagcaacctaatcttttttcccccattattaaactagagtccattttacacaacttgtaataaactattgacattaatgtatatgtaaaactttacacctagttaactaagcagtaactggtcatctgatagcacctggatggggtttgctatatttagaactaaactaatactgaatgaaaacaaattggaattttaacagtttcaacactcacctgcatataataaaataaaaaatcaacctggctcacaacatagtctgatgtatgtgttttcaccagtcttctggctgaaacaggcaatttcttttacgcatccgaagaatccaataggggctttatatcagaccaaggacttcgtatttcaccttattttgttttaaagaaatagggataaagagtttgcaagtgcttgtgtacaataactacatcatttcccaccacactgatcattaatcatgtcagtctcaaaggactaacgttttatgtacattttgtattaactgaactcagctaaacagtaaaacctgttttacttaatctctgtcttgactaccagactatcatgatgtttgttggaactgtaattcctgctctccatttctctctgtcccccaagttgaaaatataacccaaatctttagaatttttgcctctcattccttgcaactccagtgggctagaatcttgatccagttttctccagactagatttcaagctactatgcatgatgtagaacatgtaaccatgtaacctcatcagctaccttttcccttttgacttttcctgttgcacacagttcagtctgactatccatgaatcttctttgggagaaagaaaaatggcccaatgtataatgtttctgaatggggaagggagaaaaaaaaaaaatcactgttctttgtagctctaaccatgaaagtaaaagcaacaaaaatatcccccagtgaatccctagaatcatttaataatgtaaccggtatctctttatcctgcaggtgtacacttaaagcgttctgggaatatgaatcccttctgcaccctggaatcaccagtccagccatgcatggagctggggaaagcaggccctgaattgtctagagagacttggtggaggaggccacggcccgccttgtccctgccgggtcccggccaggtgtgtgtgtgccccagctcgactctcggtggtctccaggctgcagcagaaggaataccttggtatttgtttcattttagtgtccatccttacccttctggtctggtagagcctatggttattcttggattccacatacatgaaaagcgaagatttttctttgtttttatgcttaagctaacttcagttctgctttcccacaaaactacccccaccctggctcctgtccctggctgtcaatgcctttccaataggaagtcattagagtgagaaaaaaattccacccccaccccatccccccaccacttgcgccaaaagcacagcataccacctctgcggaaacctttttgtgccatcttgaataacccaactaaagtcgtgcacttgttactataaaagtatttttgaggcctttgaagattgatggctttccagttgtgtttgaagcatagctcaaaacatgtaaacgtgcagctcccacacattaatttttttcttctttcctcctcttttggtatctgcacacaaatgtggtgcatgacagtaactgatgatgtagacacatgggccctttgggagctgatatttttttcaaccctgctctgcctgttggctagtagacacacgagtcaaatctttctacctaagggcatagttgggttcttggaataagtgacacataggagaagtcggatctgagctcttttgtcacacaagtgctaacgaacagaaaatgagccacgacagttaaacactgaatggatcgcaatgtgcttttcccttggtttcccataaaaacgaaaatgaaacaccttgtgcaaaaaaataggatacgcttttactggttggtttaatgagagagaaccacttttggccattatcaccttacgttactacaaatcctgaaaggaaagcagctttgagtcttgggctcggctgaaccccctgcatggaccggggctaacagtaccctctacgactcccacaggtctctctttgtgtccagatggatggcgactgtgagtcagcaacgccagccaagacttcctcgcctttaccgtggcattggggcagtttttcaggctctctacggagagagaagtgggccagtaagggagagggctagagagaggacaccagtttacatagggttgactttcacttgtgtgtagtagcagttcagaatttaaaagaaatttccttgcagaaagaatgtcttcctcttggcccctcttaattttttatgtttttatttatttttaatctttggcagcatagaactgattgtggtcctccgatgcatttctggtgtcgagaacttcctttctcaacctccccttcccccatagccatccccacaagctgtcccatcaaggaatatttcaggtgtaaactgaatatgccacgaggcctcctcttcatgaagtgcttggttggcctacgtatgggtggcaggctggacacagctgaatcgtctttctgggtcaccctgtaactcaagtcccctttcccgttctctcccaacgctacttatccgcaggaattggatgccggctggcccccctgatggttcctggcctaggggctgtcatggcagagggaagccaccaaggtgccattgaggattggtgtctggctctctatgggcaagagcgccaggggacacacagtgggaccggaaccttccagaatgtctcctcagtcaggttttcaagggggagggaatgcggagacaggagaaaaaaagtgctgagggccaaagctggtgcagggtgacggtgcgtctgggtaaggcaaatgagaggcagtgaggtgatctcagaatggcgttgaggcggtcagattaggccgggctggctcacacgagggtcccgggcttggctttttcctgcccgtaccactggacatcagctagttctggatagagggaggaatccaggaaacagctatcattgtagctcctgtgggaggcccaagaaaggagatgagacagttagttagtggaggaggatgggttcagccaggcctgcactgagaaggatatgttcaccttgacagggccctgtgctaatcacgagtctttcctgttcggagcagtgaggcctgagaccctcaacagtgctgtgtgtacagaaggcccccagaatccacacaaaggggccgcctgaaacctagagcatttgtgaaggaggaaaatggaaggtaacttactcagtgcggtggttcttcagcgtggctgcatccggggagcacctgggaactcccagaaatactcatgcctgggcccaattgatttggggtgtgtttgagcgctgagaactgtcaaagctccccaccaggtgattctcagatgcagccaaagccagaacctctgggctttcctcaggggacttttcccacacgacagctgcccgggttgtcctccgtgagaccccagggctaacagatgtcactaggaaatttttattctgtcctggaagaacattcaaaatgtgagttttccctatagtgaaactgcggtggtattttgaattgtgttttaaaagtttaaaaaaaatcaatgatgactttgctttattctaaataacatgcattgttttgtgattataaaagtgtgttcatttaaaataggaaagtctatagaagaaaataaaaggcttttttttttttttttaagtattttagggaggtatcaccatttaggttgggtagaagtaattcttaaatcttaagaagcaatcatagatatgtggaagccaatagtcattactagggatcatgattcggaaaaacagcctctcttcaatgatcctgaatgagccctttgaattcctctcctgcaactgatctccccatggggagtggtgagggatgggtgacaggaagggaccctaacccaaagtagttcagagcgggtgagttttaggagcatttcggtaccaaacacagcttcacgattgagaatcatcagtcatccccagctttctatttcatttgctaacctctctaggaacaactggatgttgtaaatgtttctcatctggccttaaaatccatgaaagctggaaaatcacaaggcatctgtgcatatactggtggattttaatgagagtcctgtgtttggagcaccagaaataaaccagcttcagaagcaaagtaagaaaaggcccttgattatgacactggccatgggtattactatatgtaggtggtatgtggatgattctgggacacctgtcctgcaaactttgtctccaccctaagctgacttttgacattgtgcctgactgaaaaacttctaatgggagaggtggttgggccttgcaggggtcctatgtttttcttagggggacagtctctccctaactccacgtggtcctggtggtgctctccaccatggcgccatcctcactcccgtgggggccaggggacaaggaacccaacggggccgggccaatgagagtcccccgatcaaaatccctggttcaaaggtggccacgtgcctgagcagctttgaaaccacaaggatgtcatttcctcctgagaactaggttaacaggaggaggaagcagagctagagatggaaggagacccagccagcccgggctccagtgacatcggctggtacacgcttttgtttgcttacgcttgttgaactgagtttttcatatgtaactaacgaatactggcacatgtaagtagtttcttaaactgttgatgaaatttttgtttctaacacaaacatgatctgggtctgtttgggataaaacttccctaaggggtttcatgagatcttaggaacacttagccagtgtttcccaaagtagtcctgtgagttgctctgaggggaaaaaaagcttccatggataaataaatttgaggattctgcctttcagaggcctgaaatgtaaatgtatatgaaacatatattaaaggttctgagaagtcctggattagtttgccacagaacttctggaacagtatcacctattaacatccacagaacacactttgaaaaatactcttaaatgggctaatattatgaaatgtagttgactctcttgtatgttggatcctaaacagtttctggttgaaactattaaagttgagtcataattgtgacaacataatctgcttcagagggactaaaagtgcactatgtattgatcataaaggctcaagaaagaccattgagttcaaagcagtgatgtttggatcaggcagtagatgaggttaagggttcctgtggtggtttatttggtatgtgaagagcctaactgttggctggcccatggtgttctcctgtggttcattatggaggcttctgggtcacagaacccacatatgagagggcatcgggaggatctggatgatggggtgggagatgctggattggtggtttggttctcaggtggctcctagaggagccgcagtatggaaaccactggcctgctcctgcctctgagaaaatgaagctggaggaaaagatgtaaagatgtattttttccaaacttgcgatgttttatacagaatctttcttagtgcttccacatagttattgaagtacgtaaggtatttttaaagctataaatgttgcttcatgtattggtcttttattctcaagtctggggaagagacccttgttctggctgctcagctaagcctttgcctttcagtacaaattcaattttccggtagtagtcaaggaatgccatgtgctacgaaagagacccttaggaagcatttattcttcacaaataatacaaatggggccactaaatagttgccctagtaaaaacctaaaaacctaagtcagtcattcactggaacatgagctggggcaggatgaagatctaggtgtgctctctcaactgtgacccagaagagcagcttagccctgggcagtctgggtcacagcaagtggtgacttcagaatctgtgggggctttccactgcaagaatgccctttcccagggctatgctcagagatgtgtggcctgcaaagggtactggctaagccagggccgtctgataccagacagatggcaaattcacccacatctcacagggttttgtggtttataactgcttggcatagggaggtggggctgctgggagggaggaatttcaaactgaattatttttttaaacgtataactaacttacagaaccaactggtggcacatactggggttgttgaacagtcccacagttggtcacaaggccagaggataggggatgaggccctctagaggcatcctgtcttacctggtctgggaaggtgctgttgctcagtataatgtatgtgtgtccctgcatgtgcacatgtatgcatgagcatgaactcgtgtatgtattcgtgtatgtatgtaggtatttcaagcagtgcctacattcccaccgcagctctttcaaacctggttaattctacttctggctgtcagccctatctccatcacctttagcagatgatcgccctcccataccgggggagaaaaaggccattcttcctacttcaaaaatactgctctcatgacatcaccctggcactggggctgggggagggggtctaccttccttccaaagcctaagtccctgtcctaattgcccatctgtcaactttgcaatattgtcctaacttacttttcaaaagtccagttttttctctacaggaaacaagactctctactgttaaccacccctcacccttatctgtgcatccatgtttttgcacttgggatggtctctgtctccacctgtctaagccccctcctcccacggcaggcttctgagccaggctcacataacatctccgtgaactcgaaagtgaccccctcatttctgaatcctctcagcattgcattttgtttctaagtcttagagcacttaatacataagtgtagcagtttctcatgctccttgtatatcttctgataggcaatttgatttcaagcccttgtgtcccagttagactgtaagggtcctggggctaggaaccagaccaggtggtactgttatctgcccctgtgctttgcagatttcgacgtgaatcttgttaaatgcacattaggttcagtaggccagggtggtgcccgggagactagctttctaacgagctcccaggtgatggtggtagtgataaaaatgttggcttatggacatttggaaaagcagtgctcatagcttttggtactcagcacagctgttactcaagaatgctgggggtgcttctggagccactgagtcggcccttggtgctttgaaacttacattgcagtgatgctgttcttttcagggacactgattactcacagtaaaatgtctacaaatctttgaatgtagatagaacatggtgagtctaaaatatactttggggccaggcgcacagatcacttaaagcttaaagtcaggagtttgagactatcctggccaacatggcaaaaccccgtgtctactaaaaatacaaaaattagccacgcatgcacctgtagctactagggagccaggagaatcgcttgaacctgggaggcagaggttgcagtgagccgagatcatgccactgcactccagcctgggcaacagaacaagactctgtctcaaaacaaaacatactctgggggtcttttctgggaagcagtgttaggaatatcataattttgatgtaagaaccttcagctaaaaacatagttccagttccccatgtatctagaaataaggcataaatacagcattcagatgtatccttgtggaaatgatgacatggacaaaagcaacacatgtgggaccacagactcatgggcagtaggaacaaaactccccttacggtacctctattcatcagtactttggtgaggtggagactcagacccatccagaatgggtgagttttctgttgcttctctgaacaaaggaaagcaggaggaggaagagaagagaggtcatgttacagagagacactgacacagacacagacacgattagtagcttattaatatatccgaaaggcttgctgattagacacctgagttagcaacagatcatacaagtcatgcagtactttcagtccccataattgagtcaaaatacctagtttgttaggagggacgggccctcttttacccatggcctcattttgtatcacatcatagcaaacagtttatgccaagaaccaaaattgctgtttttcaaatttggcttgagtcctcactagttgtaggtggtgaaataggcaggtttcaagaccatcttaagtgcataggaccctgaggagggcttgtacatttcggagcctgttgacagccaaataatacaatcaatcatatatttggatcaggtgagactgggcatgattcagaaaagttggaagatctagagagggatcttgcaatctgaagtttcttgtttagtcactggaggtatgtattacatatatgaaagatgtgtcattcttttatgagttaatcttagaccccaaaccttgcagaggctgcctggccaaacaggtgagagctggggtgtgggtgggtgagtgttaatgatctaaaggacaaaggggcagctactgtccaacagacagcccaagaagtaggagcagacacaggaacaccgagctggggctccagtttctcttattttaaaaggaatcagaggcagcaggggatcgttcagtggttgtcaaaacttgagtgtgggtcagcatcacctggagggcttatcagaatgcagcctgctgggctcacccccagagttttggattttttttgtgttacaggtaagcccgagaatttgcatttctgacaagatcccaggtgaggctcactcgtgctgctggctttgggatcacacttaactaccggtatagtggggaaagacagggtttggggtcacagagggcagagctggaattccagctccctccagctgtcagactttgggccaggcacttagttcctctgagcctcatctatgaaacgaaaacatctgggtatttcccccgcaaggggatgatgaggattgtatgagctcatgtgtgttagaagctgctcgcagcctttgagtacacagcaagcactcagtaagtgttaggaccctttcttgccaaaaatgaaggctccagaaaacctggtgtaaaaaaattaccacagataaacctgcaggaacaaaaatgccgaccaggtgcctgtaatcctagcactttgggaagctgaggtgggtggatcacctgaggtcaggagttcgagaccagcctggccaacgtggtgaaaccctgtctctactagagattagccaggtgtagtgatgcacactagtaatcccggctactaggaaggctgaggcaggagaatcacttgaaccatggaggttgcagtgagctgatatcgcaccactgcagtctgggcaacagagtgagactccgtctcaaaaaaaggccaagtatgagagcctgaaaggcagacaatacagccaattctggaattgtgcttttctcatgattcaactcacagccagttgtcaggttttcccagacatccccctgatgctccaccaaaccaggaaccagacaaaccgaggaaggggcctccttaactcctctaaccaacagatgagatgttgacagaacctaacatctacttagagatgatgtctcaggggcaacagaagaggcaggtgctgtagggccaggcgggttacctgtgtctgccagaccctccagtagttcagaatagcctcactggcgccgagatgataatgctgtatgcaaacatgtcaagctatcaaagggagctgcctttcggtttcattaattttgttgtgtgcagcttccactgaaggcttcagggcacctgatctcttttgtgtgttgagaaagagcaagtgcttggccaggacacagccctttttcttgcaccctgagacatcctaagacactggctgtttcacctgccccagtgtatttgctgtcttcatcagctctctttctccccctgacattcttgcctggcattttgagtcagcctgagtataatccaaaccgaaatgaaatgctgtctggaaatcttaccaaagaagcacagtcccacttcgtgcttccatctccccacatcccaaggaccaccgcctactttaagagaacacagacaattcacctctataaaggcacagccaggaaaaggagtaggcagaggtgacagcagatcatggggcttctcttgaaaggaagacacctcccagtgatgaaccctcatcatccatttactgacatatccttatgtcaccaggatctgaacgtctatgacactctttcgagctgacacagtgaagaacatagaaggagaactcacccagtctgccaggttaggatgtggtgggggctgcttgggggggtggctccaatttcacttgacggtgtcgagcttctctggctttgaggtaaggcagctacatgcaggtggtgcaagaaaggcagagagcagacagggatcagacacaggtgaaagagcttgcgacttgttggctgacaccaacccagtggccagaggtcaccatttccagggatgctgggaaggaccccagagcagggtctcagcatccctatggcatggtcacagtgggcaaccatctctacatgcccccccaacctctgcatcccacccattccattttctacccactaccatgcaccttcattctgagtcaagctgacctgggatcctaggtccccgctttgccaccaggaggtaggcatagggatggtgacggtttctacagcagcaaagaatctgatgtccccatagtcctttgagcgagacctgagcagggctcatacagggagggcatatttctctggccccagggcattttcagtgtggccctgttatgaaattgtttctccccattgtgaagagagggcatccagaaaggttctcagagcctgctctctctgctgtttcaggcttatcattgctactgtagggcgctttgaagggagcagggcttttaatagctcatccaaacctgaccactacgcatttactgatgtaggcagcatggaagtccagctggaaagatttagtaggaagtcaatcctacgtaaatgcatcctttgcttttttggtaaaggaatcctttccatcagtaaacctcagatacagcttaacaattttagtctaaaatatgttccaaaagatctacctcatctctttacataaagcaaatctactagaccagtgctgcagttttgatagaacataaaccctcctgtttgttggagatatttacaaaacgttggttctttatctaatagggtcacagaatgatcatactcaagatcttcctggggagtcaatggcaaatttcactgggctattttacagatgaagaaggaacataaagaaggttctgggaccccgaagtccacggaacacccaccattacctgatctttggagcttgtcatttggccagtggaccctaataaacgtccacggggatgtggggatagaatgccagagcctggctcgctagggcatccaggttcttccttcctctttgccctgctgtctccaggcaccaagaatctcctacagttccccaaagatgaaccccccattatctcaggtcactctgtttcccccgatctttaccaaattcctgactcagagttcctcccatttgcttctgactctcattttattcttacctctcattttattcttatgatgtttaccatttctcttctcctcagtgtccctctctgagtggtaagagtatgttaataagccagtgctgagaccggagcacgaggcaactgctcaatgttggtcattgtcactgttattaaatgtaacttaagggaatgagtggtttcttccttttttttttgttttttacttgattcaataccgcccaatgctcttgagtatgagaatataaggtaaactttatagaaattttcagatataacgtcaaggatatttaagacacttaaataatagtttgtggctatggcataacatcatcatcgaaatgggaaagccaggagcagccaggaattctgtcaaacgcacagctctggcactgtttattagccagtctgcccccatctggggagacactggccaaatctctaggcttgacccaagcccatccccaacccagcttcctttgcaagctacagctgtgggctttcactgggatactctcctcactagggtaaaagacacctttggttggataaacccagagacattacttttactttacctaactaactttcttagatttctgtctttacaaggagaaatgggagagctggcccagtgcactctggagggtcaggtgcacggttatggtgcaagattagggttagaacggggcggggtcaacaaaggcctggaagacctcaagtctcccgcatctaacagcagcgttcccagaattaattaatgattcccgttcctcactgcacccagtcctaagggtaccttccccgcggtagcccttgacaccggcaagcagttcgccctcaggtcttcccgcgtgcacctggccgccccctctcacctgacgtggccttgcacatctggggcatcctggtgaccctgctgtgcgccacgaaggtgctctgggaggaggtgctgtactgcgagccgctgtccgaggaggtggagctggtgtgcgacaggcggctgtgctccttgtgcgaggcggtggaacgctggtaccactggcgcagctcgtctgagacggcggcacggcccgcgcccttgtcgtgggcgccctcgcggcccagcgacggagtccgcaggatctgcgatcgcgacggcgtcaggcggcccgtgtcgccctcgtcgccgccgccgccgcgccagctctccttgaacaggccgcccgccgtgtaggagttggacgtcttgaactgagccttgacgctgtagtggccctcctggtcgctctccaggctgcgcaccaccacgggcgtggcgccgccctcgatgtacagcgggtactccttgatgcggtactgcgagctgggctggctctggctgtgcaggtacacaccgccccccgcgccccccgcgccccccgcacccccgcgcgccgccaggttgggcatgctgcccgagctggctgagcccagtgcgcccgccgcccgctgccgctgcctctgcctctggcgcgccttggacggcgagtcctcggccagcgtggagtagttggcgttcatctgcgccgggtagtagtgctccgagctcgagtggctggtgcacgacgagcagtcgtccatggggtctgagccgttgctgctacgagtccgcggggtgtagaagtcggggctcccggtgtcgttttccgagcccaggagcttgccctgggactccaggctggagctccggtgcctaaagtgcagtgcgaggctgtgcagtcgggtggggctgatgtccaccgacctgccgggagacgacccgggttggtctgggggtggggagtgggcccaaggaggggtgctccggggaggagggggtcctgaggagggcactgggtgtctgcacgcgggcgcaggccccagcccagcaagccagagtctcactcagcagggctgccccagggatccgggaactgcccattgcgggaggtgaacctggggtctccaccatgattcccagtgggaagtgggactgaagctaggactcacagaaaggtttcgatttctgggtttttttttttttttaaataattctatagacacaaagagaatcacagaatccttagtatcatgttaaaccagatagggctgggcactgtggtccacgcctgtaatcccagtgcttcaggaggctgaagaattgcttgagcctgggaatttgagaccatcctgtgcaacactgtaagacctcatctcttacaaataaattagaaaattagctgggtgtagtgttgtacaccaggggtcccagctagtcaggaggttgaagagggaggatcacttgaggatgcagtaagctatgatcaaaccactgcactccagcctgggcaacagggcaagaccctgtctctcttaaaaaaaaaaaaaaaaaaaaaaaaagaaaacacaaaccagatgaaatgtccctatttacagatcagataaaagcagtcctacagaggcccttcatattgtttaaccaaatactattacatgatccatataaatagactcccctttcctgtgaaaactgggaaatagaaggttggtggcaaatgagataattaaacaatgaatgatgcaaatactcaccataccattactttataattcattctgctcgtttgagtccactcagggcttagggaagtgcaaaacagtatcacatggcagatgatgttgcccgatgctgggactgcatgtgaacttcacagcggccccacgggccaagcacaggaagaggcgagtcccacttccgactgccactcagaagggggatgaaagcccccatcacgtggccctccgtgatctggtttgcttctttttagaaaaagaaggtgtggctaggagcggtggctcacgtctctaatcccagcactttgggaggccaaggtgggtggatcacctgaggtcaggagttccagaccagcctggccaacatggtgaaaccccgtctctactaaaaaatacaaaaattagccaggcgtggtggtaggtgcctgtaatcccacctacttgggaggctgaggcaggagaatcgcttgaacacgggaggcagaggttgcagcgagccaagatcgcgccactgtactccagcctgggtgacagagcaagactccatctcaaaaaaaaaaaaaaaaaaagaaacagaaggtgtgattcactgaagcctcatttttgcctggctcttttgctctttatgaatttacattttgaggcactaaaggaagtccagtataaatttaggcctcagtagaaagatagaagacctcttcccatgctaacccagccagcctctgtggcctctgctttgcttaggaaactttccatgctccctgtctccagaagcccggggattctttggctgactccaagtgccctgtgcatgggtctcttggctaacgggggttgactgctgccagcttggttttttattccgcttcatttatcctcccaggttcaggtctgactgtagctcatccattatttgggccagcttggggctgacaatgcccaattttaaaaaggaaggcttggtctgagcaggaaggccaggcagactcacctcgtggaatggacgtagtggggactccggacccgcaggtctggcgtggacggcatgctggactgggagttccagtgcgggaggccgcggatggggctgttctgcaaggagttgcttcctccgccggcttccgcacagcttcctgtgctggggaagcgcttgtggctgctgcaaagccaaggatgccacgtggtcaccgccagacagacagcacctttcctggggggctggctagttcaggacaatgatcccagcatgtggggaaagctcgcccgtgactcccacctcgcttggtcagacctctactgtggttctcagcctttccccagcagggggtatgccctcccccctcccaacctaggcaatatgagaggaaaaccctggtcagccttctctgtgtcaggcagtgtgacggtcctgcccttacagtttttgttttccaagaaacaaatatttacctgtcctggcaccccccttggagcttggtagggtgattaaaggaaatgggaaaaacagagaagcagaccgaaaatgccttcccccccaaaaaaaacctccctacaaagtcagcccggtaatgagctgataatacacagcttggattacagctgcttggctggagaattctgctggatgagggggtagagttctgaaccactctgcatttgctccgagtggactttcacttgctatttcagaatagcgctgcctgagatttcctaattaattcctctggaatttaacagcattcaaaccatctgccatcacgttgattgtgggccaaagccccaatttctctgagtcacaaaaatgtacctcaacagtgtcggcagcagagggcgctgtgagcacggccccgtgaaaggcaaaccccacggggaggaactaggttgatgtggattttgtcaccgtggatgctacttgggacggccctttgattcttccagagcatagagggaggcctcatttggcctcattcacgatgcagctcacctggaatggctgtgagaggagcgcttcttgaccttctcatagggttcatctaaagaggactcactccacattttgggcttgatgggtgacttgtcatagtcgttgcggtgatagtgcatctgtcggagtccctccagggactggggaggaggaggcctgttgtgcgacggtggccgaggagggagtcccttgtgaggagaatgtaggggggatattgtgctggtaacctgagagtcttctgcacaaagacaggaagagaggaactgagccccggtcatccttcccacaggctgagacagaacccctacacccctccacccgcaccttggagccacacagccaaacccacaccttcacccctgtgatgagaaaccctgaaactcttccccagttgccaagacaagtcaagacgagtcaaaccaaaccagggcaagccaaacctccactgcaggcgggattgcatgggaagagatgcgtcacttttgattagacacgaatggagtgaagtctgaacgtcattaaataccaccaacaaatgactgcttcacactaaacagcaaaatgtagttactgctgtagtgctaagttgtctttcaacagatgctaagcatctgattcactgtgggagggtctgagttctgggagagttttgtctgtttcatctgctgctagatcctcagccgacacatagtaggtgcttgataaccattggttggagaagaaaaaatgaatgagggtctatatgtccattgtaaatacctgctgggtggatcgggtgtctactctgcttttttcccccagagctgtgtttattctcttttaatctcttcctctatattttaattttgaaactgccttaacttttttaaggagatgagctacaaagattatgtattaataaatgattccctgcctccaggaaagaaatgatctaacacgtcagtgcgctagaggactttcagaaaaagcaaattcagtgagtctaggaggtgctgtgggagaggctggtcttgaaggggcttgagcagtgggcaggcaaagaggaggaggaaggaagggcttgaaccaaagtgtggaggccctgagggcagggtaccagctgcaggcacatctggccaggcaggggctggtgaggaggggcagggggagtaagggcagagctctggccagcacagccgccttctgtgtgcaccatgtgagccaagagcccgactgatgggggcctggaattccgagttgagattttgaaaagccacaggaaaactttgcgatgtcttaagcacggatgcgtcggagtgaaaaatcctgttttagaactattcacctggcagtgttctaaaactagaaaggaagggagagagactagagagggggatgaatgaggacttcaggctagggcaggtcagcattgagaagagagaggagggaacgattcaggcttcacagggaaggcagacatgggaggtggaggggaaaaaagcacagaagcaaaccttacaaccaaccaactaccattcacttgcccctaaatccatttccagcgacttgtttcacagcctaattctcagtcccccagccgtggacacccactatgcacccactcctcctttgccctcaaatcagtaaaggaagagtccccagaaagagaccctgcagtgggactgtggcaaaaggatgtgccgacacctgtgaggaagtccaggggtctgcatctggaacacggggaagaagctggaatcacggaatgatatctcaaaattaccccgtgacattacctattgctccaggcacccctctactaccaaggaatctctcaatttttcttccctttccaggggagactgggatactcagaggccaaccgcagggctgggatctctgatgctcaagccccccatttccttgtagcccaatggcgtccccggcttgtaatgaagcagacaaatatattccaatctgatttctaatagcacagccaaggtgactgggtaaataatccgccagactttcctcacatcaagagcaatcattattattattgcaattatcattattactatgactagtgtggacctttcatgctttccatctgaacagccacttatcactgcctgcctgaggtttccatacagggcaaaaaaattaactgccacttaatatatttccatataattaatgtacccgcctcccagtacgatggttaaacatccacaggagtattctcacatggttctgggtttggaattctttcttccccgacgtatggtggtgatgggggttgggggagggatcagttctgtttttttaagaatttcccaagaaaatatcctaactgccaggttttaagagttcagtgggaaataataagacagttttccagcctgagtgtgtatctactgggatatctcccctcttactttcactactgtcttgggaagcaacagagggtgtgttccatttcttctcacgatccttacactctcctagtgggtttcaatctttgatttgtgatctaaatcaatttctacccttttcttttagataccatgaatactcaaaaggaagctatgcctagtgtgtagattctctgtctagctaaacgtggttttgggccaggtatggtggctcctgcctgtaatcctcccagcactttgggaggccgaggtgggtgggtcgcttgaacccaggagcaacatggcaaacccagtctctacaaaaaaatacaaaaattgccaggtgtggtggcatgctgtagtcccagctactagggaggctgaggtggaagaatcacttgagcctaggaggcagaggttgtagtgagccgagatcataccactgcactccagcctgggcaatagtgtgagaccctgtctcaaaaaaaaaaaaaaaagtttttggcttctaaaaaagtaaagcaccactcactgatgaaaagctctaatacacatgggtttatgcagcacctacccactcccaaccaaagaggtgaatactgggaaatgagagagcttgcagggagcccagctgccttttggcctggctcttgcctttacacaaggcaatccccagactacatagaaattcatctctgtttactctgagctgtaggtttgtaagcaggaaatgcataaacctaccatcctcaagaacaagggcatctgagagggagctgtcttcactggcaatgtttccatctgagaagacaaaaagcaatagcctatgagttcagcacattccttcagcaaagccctatctgtaaaaatagcatgtctactaccacctcatacctttctcttcctaaccagaaacaacccaccagatacaataaaaatgctgttgggtgtttcttttgtcagtccccgtggtgggtcattggctcagcctccccaccccgacactgccatgtgcccatgtgccctagcctttgtgtgtttgtgccccggtttcatagaatactgcaatgcagagtggcttcataccgaatataaaggctgccccagcctgattaaaccacatcattgtccctgcacaaacccagggcgtgtaccagcaaaaccaaaggacgcaaactgcttttgattctacaaatgcgaaaccagggtaggcactttgctttgcttctgtggcaataaatggcttctcaataaactttgtaagtcattagtagagaaaacaagcgtgctaaatacaggctccatctctccaaagcttatttttatagatgccattcaattaaccgggagaacacacccaaaagggagatggtaaaataatcctccctgtttcactgctggggaaactgaggggtaggaagggaagagtggtttgtccgaggtggttttgctctccagcaatgtgagcaaaggtcccaagtcttcagattccaagtttggtgttttatctctaaaataatacgctaaggaactagcaagaaccttaattactcctctagttcaagtgggtccttggatgtttctataggaaacatgtttctgttgggaacccctaagtgccttggagggggcagagggtctcaaatggagtgtcagaaagaggttggctgagggagctttactaggaggtaggggaaaagttgtgtggtcttggccaaggacaacaggatgagatagggaaagatggtcattccaaatttcctagagcaaaagaattttaaaaaattctctttttaactagaaattcactttatttatgttgcatgatggactatgagcaaccaggagctctgacttcggcatcttggaatcttcagcacatcactgctacgctaggatgctcacgagtttaggctgcaaatctgcatctatctatatttatctatctatgtaattgtggtgaaatatatataacatcacatttaccatgttaacatttttttttttttcagagatgagtcttgctatattgcccagactggcacgcatggttactcacaggtataatcatagtggactacagtctcaaacctctggctcaagtaatccttctgcctcagcctcctgagtagctgggactataggtgcatgccaacatgcccagcttaactatttttttgtttgtttgtttgagatagagtttcgctcttgttgcccaggctggagtgcaatgtcgcaatctcagctcactgcaacctctgcctcccaggttcaagcgattctcctgcctcagcctcctgaatagctaggattacaggcatgcgccaccacgcctggctaatttttgtatttttagtagaaacactttggtcaagctggtcttgaactcccgacctcaggtgatccgcccgcctcagcctcccaaagtgctgggattacaggtgtgagccacctcacccagccccagcttaactatttttaagtgtacagttcattggcatcaagcacattcccattgttgcgtaaccgtcaccaccatccatcttctgtttgaataatattttcatgtttccagactgaaactcggtatctatcaagcagtaactcctcattcccctgtcccctaagccccctatagtaaccactattctactttctgtctttctagagcaaaggtattttaaacacacatacctttatgtgtgtttaggaggaaagaatgcttgatatatattttcaagaattcactgacttagacaagaaggattctaacagtttaggggacttgatgctttgtgggtggattttgggggatttccttctagaatttaccaaaggtcatcacccaaattcctaacccatgactggagctcagggttccagataatcagatggtccagtctccccaagcttcagctcttgggataggaggcccctggcagcataggggtcagtgggttggcgggggccgctcgaagacagggatcactgctgctgtgtaccccagccccacctgtccttccagacttgagtaggggtggtcaggtccctgagagtgtcagagcctggtctagcccagtcaactcagctcagttcacagtaagggctgagaagaatgctagctcctggctgcaggttctcccagggaggaaaccaatagtgataccaacagtttgattcgtacaatcccttcatctgtgtctgagtccacttggtttctctcatgtgggatcaggccttactcgcttcattttatggatggacaaatgaaggcagcggacagttaggcagctgctcaggtcgtgcagggaccactcgtgggacctggcgtctggttgccggggcccgggcgtgggagtggggtgggggcagcccggttggcactgaccgtctatgatcagcgaagccctctgggtgggtttcttcccagacttgatgcggttctcattgattgcattttcaatctcctgcagtttcttcagtgcattcagatacgaggttttcctttgtttcttcagttttttgctgacgttggggtcactggctaggcggcgggcggcctccgtaatctgggactgaatggcaaactctcgttccaggcgttccagctcagcttcctgtgggagggaaagcaccggtttgggttactggggatgctgagcagggagaccctcatccttccctcccctgtcccaaggcaagtccagttccatgggagacactcttaagagtagccccactcctaaaatctgcacccactgaagtccccaggcacacccactgttgtaacccttgctcctgttactttctgaagacaagtgttggtgtgaacgctgccgccatcgctgagaacagagttcccacgatgcaggtttagggatcgcttggctgtgtttcgactgtctccagcaaggttcatcaagacaaaccaaagcctttggagagattcagagcccaagtgactgtcacttcctttccattttggatgtaggatgcagcaggatttttagtttctttatgccattcttctctgtggacttgctaccaaggagctcacacacatgagctaatgcacgggcctctgactctcacactgtgtgcccctcacgtgtgcctaactcacaggcctctgactcacatatcttgtctttccctgtacccccactcacccgcgtgtctttcgggagcttttcttttcttttctttttttttttttttttttgagatggatcttgctctgtcacccaggctggagtgcactggtgcaatctctgctcactgtaaccactgcttcccaggttcaaatgattctcctgcctcagcctcctgagtagatgagattacaggcacctgccaccacaccttgctaacttttgtatttttagtagagatggggttttaccatgttggccaggctggtctcgaactcctgacctcagactatccttctgccttggcctcccaaagtgctgggattacaggtgtgagccaccatgcccggccatgggagctcattttgcaagctctggctgtccctcccccatctgcctattcatgtatactctgctaggctacagccgggcccttcaaggggcacaaatggacagtgggtggtggtggaggcagtccccctcccaccccacccccccagctcacttgatgtccttcccctctttttactgtagctccctcccacctctattcttcctttagccaagaagtacggatggatgagattctcctcagagttttgggaccgggaagaatgaagctgtggctgtcaaaaatgcctggtggacctagcggatgacacctagacagcatgtttgctgctgtcctctatgctgaccaagcctctcctctgcagatgtatgtacaccagctgctgagggatggggggaggtagctcatgcatgtgtgcgtgaggatttggggatgaatgcggaatcccccgcaaagcgtcagattgttcatttttctatttcctctcttctctagtaaaacccctccggatcagagctagctctaaacagcaccttgtcggttgagattttgagcaacagggtcctgcaaggtgggcatatttggcagcctgaaggagaggtagaatatttgcctaaccccacagctagtaaacccaggacaaatgcatcggcagcttctcaaggccagggagagagagcacacatcttgccctaggaaattcacagacacgctgaaatttgatgggaactgatctagccaaataggaggagatcaattgtttgctagaatcaacagatcttcctgtttagttgctcagtaaaatatccttgcctctgggcacaatgcaccaagctggaggatgccatcaaggagaagttctttgcctgatctcattgacttttgagcactttaagcctaaagggagcaggaacaagaagcgagaggaaaaggtgaaggttaaagagaactatttcggagataataaactccttctgaatcctgccaaggctggctgcgctgttgtctcagagggagaagaatatcaacatggactcctgcctgtggtcttgaaataggcaagtcaccaagggacaaagactgttctgtgagtttgggctccctggggcagctgttcctgagctgttacaatggccctggcaccagacactgattcagagttttgtggggagcccaggacaaattctcactatttaaactaagacaagtccaaggctgaatgccctgtccatgcaaatgtctgcctgttatatgaatagggaagcaaagtgcgtttccaggagccacagtagagaccaggtgatcatctcatgcttcccagaggaaccccgcagaatgccagctgctcctgtgttggttccttttacgaacttaggaaagatcatgtgtggggacaggtaaggaagcacatggctagggcattctcagggagctaaagtcccgcggtactgagatgcgtgaaaggtgtggtgggactctgggaagaccaaggagggtgttgggggaactccctaaaagtggggtccctttttaaagcttaagggccaggtatctgcccagcaacagggggagttgaagttcctccctagagtggctctgatgaccagcaggatttggaaatacccgacctcaatccctccgtcccctgcagttcctgcctacggtgtggcacccctcctttgagactgcatctcccctacaagcaactgtttgctgagcatcacaagtgccaagtactgagtgacgtgttttacatacactggctcattcaatcccagggacaccccaagaagtaagggctatgagctccattttacagaccaggaactgcctaactgagctttagttttttttttttttttttttttttttgagacagggtctctgtcacccaggctggagtgcagtggcgcaaccttggctcaccgcaacctccgactcccgggttcaagcgattctcacctcagcctcctgagtagctgggattacaggcatacaccaccatgcctggctaatgtctgtatctttttggtagagatagggcttcaccatgctggccaggctggtctcgaactcctgacctcaagtgatctgcgcactctggcctcccaaagtgctgggattttgcagcgaaaggcgtgggccaccacgcccggccacatgagctttagttttaattgaagcacattggtgtgtctgccagtgtcccaggacctgccactgcagatctcaggagattcctctaacacagatgggccacaagcacatgggtccctctctgaattcaccctcaccctaatcctacctaccccaggtgtccgtttctcccaatcactttcttaaaatactaaaaatgtacagcattcctttttcccctggctctaagtcctgaccttttaaggcctctgttcaagagcatgttaattagtaacttccttcagaagaaatctgggaaagcatttcctgggcaggagccctgggcctgagggtatacctggcctttactttctcttggcctgaggctggattctcattaaccagccagagagtcaagtcttggttttgtttgtttgtttgtttgttttctccccaaatctgaagtctccagccccatcttcacccgtgttcagtccaaaggatggacgtagcttctccaaacacagacaaacaaggccagggccgcccaagcatcctgcacacattcttggagggatgtgagtagccaggtgaggctatgaccacggggcggtggaccctactggtctctccccagccaatgtacccttgcacctgatgccgtggcctaagttttccttctctcggcagcttttcttccatagatcacacatcaagcttggctctcagtcactgagggctgagaggccattacaaagccaaatacacgtgaatgctactggaatgttttccccaagctcaacgtggctgcttgcgctagacccacagcgtcagacaagcaacttcgacagacacccaaatgcctgcaaatgcaagcaaactactcctaccgaggggaaccacatactgaccggccagctcactcaagaaaaggtatgagcgaaaatactggcattaggcagaaatgaagaaattggtacagaaaacctggaaggcctgaccaatgggaaaaacaaggataacatgagagaatccaacaacagaaaggaaggacgcacctctcctttgggcaggattttctgttcatccagtttgaaggctgttcctattcttctccgaacaatgggtggttcctcccctggatccaggggatattctactggcagcttgcccgtgagctcctgcatatgtgaaatggcattcggagtgagcacaaatcagagtggggcgtgtctgcttcctagaacacacacacacgcacatacacgcacacaaaaatgcacgcatgcacttcgatacaggtcaacgcttatgctagaaatgttcacattaagcactatgcctaagtaagaggtcaagaaatgaaatttcatttctctaacaatgtctcttatgtagaatagttgcacttccaaagttttttccaaagtaaatttctgtaattgccatttgactttcattataaaacttgaatttcattcatttgttaagtgaacagatatttcctgcctgcctcctctgtgccaggcaaggtcacccagccagtgaggagcagtgtcagcgtgagttctcgggcctctctaactccaaatcccgtgctcttgacactgcatcaaatattcctgctcaaatatctaagtttaaagtttccttcaaatggattttcacaagaggagtggtatctatatggcaaatcccagaaaagtgcatagataaataatttagaaactgagtaaggatagtaacctactctggccagatgctacaggaataggctgtacttaaaagacattaaactgtttaatttaaaagttttagtagaatggctgggcacggtggctcatgtctgtaatcccagcactttgggaagccgaggcaggcggatctcttgagatcaggagtccgagaccagcctggccaacatggtgaaaccctgtctctactaaaaatacaaaaattagctgggcgtggtggtaagcacctgtaatcccagctacttgggaagctgaggcaggagaatcgcttgaacccgggaggcggaggttgcagtgagccaagatcatgccactacactccagcctgggtgacagatcgagactctgtttattaaggaaaaaaaaagtttagtagaaactgaacatataatccatgttattgacaaggctactaaaaaaacacttgttttgtgtattttgggccccggaaatctacttgttgtgggtacaaggacagtgaatttagttgacagacttccatggtgacagtgatcctggttaaaggctaaggatctgggggcgattcaagattagaatcaggctctctgtgagtgagttgtatcagggctgaacaatgatcaaatcagagtcagtggctgccccacactgtagaggccaggcatcaaattcaagaagtcacttccagagaccagaaaaggctgggggaccaactgtgcatctgtctctaatggcaaagtgggcacttccaggccaagcccagctctggcttttctagcccaaatcaacgcagatgctgcacaaagactgaaggagctgctctgacaaggaagttcaggaggcttttctcaggaatatccatcatctacacagaaagcttttgcgcagggcagcccagggctgagtgcccagcaggcgggaaaatccaaatcatgagagtgtgatgctggcccttcttctccaactgctgtgtgcacatgtgtacgcatgtatgcatgtgcaggcatggtgtgtgcatgtgtgtgcgtgtgtacatgtgtacacgtgacatgagcataaacacatactccgtcactcgcctgcttctccctcgctgtgttcagattgccgggaaatgaccccgtggactttatattcctcaatgtaagcatttcagagcacaatggccaactatctgagtatcagactctgcaattttcttccctggttttttctttaaaaaaaaaatgtggttcaaatgtctccaaagtagttaagtgtttattccgcaacttttttttaatctgcttccctaaaagtctatctataagtaacacaactattgagggttttatattgtcaggacttgattttttttttttacttagaaaattccaaaaaggagggaaaagttgttaaaattgccatggatctgtaactctaaactgttggtggttttaaaatgtagtttaaaaaatgaggctactgatttttttcaccatccacttgaaggtatttgagtcgaagtcttgattctccagatatttaatctgatttcatgtgtaactggagctgcacgctgaagacgtaatttaacactctgcagtggggcctcggcttggtgcctccctatatcctgccaaatgctctccccctccatcattctagttgcccccctccccaggggtcaagcagcgcgtcttgatactctgagctgaggggagagatgcaggaacagcacagatttagcaagacctccccccagcccttgactacacatgcgtcaagaggctatggtgggactaactatagggaatgatcacaggagaaatctacctgcaactgatttcttgttgggttatttcttccactcaagttacattttctggtgttaacattataagaagtggcagctttgttttccttcttttgtttttgtttttaagagcgatggtgagatttttttataatgcatgctcatcttgccctgacatgttccttacctttttgaaacgtggattccctgccgggtttagggactttttattaaaaacaaaacaaggctttccaaattattaaaggcagacacccaaactcatattttttccaatccttcaagcgtattctttataaaaatgttgctaatattaacagtatcacatagcgcattccccagccaggccaattgctttcctaagatttgcaatggatttgtgctaatgtggttctgctttgagctggctccggtttaaatcaatccagaccataattaagccaagttgaaatgtaatgtgatctcactccacggccccttgtttcattcttcccgctgcaaggccttagtgtttgggggaggggtatacgtctctttgacttactttgggaacctcttttgacttcccattctcaactgtttaccggcgaagctctttctaaggttaggtggtgcacagttgctcctgccctggagagctcccaccccattgtgcccatgtgcacaatgcacacatgtgcatgcgtgcgcgcgcgcacacacacacacacacagagtcatgtgtattgcattaaaacatgaagccttcaaacacttctaacaaatagtcatgaaataaacagacaaaggtggaaatggatatttaaataaataaagacagcagcttgcagcaacttctgtgagactagcacatacatagggtcgagaaagcattgcttttttttttttttttttttttttgagacagggtcttgctctgtcacccaagctggagtgcaatggcgtgatcactgctcactgcagtctcaacctttcaggctcaagcgatcctcctgcctcactctcctgagtagctgggactacagacacacaccaccacctctggctatttttttgtagagacagggtctcactatgttgctcaggctagtctccaacccctggtctccagtgatcctcctgcctcagcctcccaaagtgctagtattacaggcatgagcagctgtgcccagcctgcataaaatttaaaaatgtcattaggctaagatttcattttttaaaatgaaaaagctaaacaccagatcacagggtctaaaggtgactatataccaagtgagatcgtggtttccttgttgaccaccagtgtttctcaataggatgtccaaagacaagtctgaaatacccttaagaaagaacaaaagccaccacaacaataaactcaggcacaaaatcttgggaggatggtggccagccattatgatcgatgaggcactatcacgtgaggagatgctttatgaaccaccatgcaagtatgagggatgagggatcatcattgggacttgtcgcttggactcccatggggtcctctttgggattttgccagcaccaactttaactggtcatcacagtgcttcatcaaccaattctttgatgggtttagggactttttcttttgttgaaaacaaaacaaggctttccaaataattaaaggcacacaccaaaacccatattttttccaaccctttaagcatattcttttaaaaaaattcgctaatattaacagtatcacatagtgcatttcccagccaggtcaactgctttcttaagatttgcactaatgcggttctgctctttctctgacaaagcacattagagaggtttggatgtttccaacatttgtgtttcaggagagcgctcgccgcccagataggccctctttttatcactacccttgccttctgtcaaaacgatcaaatgacatcagtcaaatgacatcaaaaagatcaaatgacatcagaaagatcagtgacatcacagacaacaccaatttcaacgggatgagctaggaaaggcttacagcttctcggagacacagcttcttcagttcctccagcctctgacgcagggtttcctccagagcttcctgcctggacttcaaggcagccagcatgtccttcttggccgactgcgagctatctgattcctgagaacctgtcgataaacagtggggttacttggccagctgacaggggacacacatctggaccactaatgaatttaactggagcccatgctgcggagatgggatttaccccaggaatcaagggagtgtgaaataaaacaggtgctcagcactctaactgtgagaagcacattccagcactgcatggaatttatagccagtcacaagaaatggcaggaagatggaccctcctgaaaaagaagtttatctttctcaattatcttaagaaatgtcacatacctttttaaattttactagcaaattctaatagactttacacaagaaagggggaaagaaaagctcatgtcagcaattttaatacgtattgagttatttatctttgtttgagacagtctcactctgtcacccagcctggagtacagtggcatgatctcggctcgctgcaacctccgcctcccaggttcaagtgattctcgtgcctcagcctcccgagtagctggggttacaggcatccgccaccacacccggctaattttgtatttttagtagagatggggtttcgccatgttggccaggctggtctcgaactcctgacctcaagtgatctgcctgccttggcctcccaaagtgctgggattccaggtgtaagccaccgtgcccagccctaaaacgtatttaaaatgttattttgttcccttaaaaatacttattatttttgcttagtgcaaagataatgtgtgtttatgatgaaaaccctgaaaatgtagacaggtataagaaatagtccattaactaatcacccagaaataaccattgctatgcattttcttttggccttttttctaagtacatatatttaaaaaataaaattagaatgctattgtattttttaacttcatgttttgtatcatgagcaaattccctcctaataaaagttatacatattttaacatacttttcctgggtaaaacatgatgattcaaatagcagagtgctcgataggaaaccttgtggaaggcaaacttcaaaccaaaccaaaggaaaataagctgaaatgccatctggaggaatttaggttagaccaaaggagtaatttctgggctgccagtgtttggattctgaaataactttcctggagtgaagctattgtactttttctaccttgatgggttagaaaaggaacactgactctctacaaagggaaaagctgattataacttttcttttctttttcttttttttttcagacagtttcactcttgttgcccaggctggagtgcagtggcaccatctcggctcactgcaacctccgcctcctaggttcaagagattctcctgcctcagcctgccaaggtagctgggattacaggcacccgccaccacacccagctattttttttttttttttttgtatttttagttgagacggggtttcaccatgttggccaggctggtcttgaactcctgacctcaggtgatccacccgcctcagcctcccaaagtgctgggattacaggcatgagccaccgcgcccagccgattacaacttttctttgcaagcccatcgtgagcagaagtgttagaaacggacaggtgttagaggctgtgcattcaaggggctcacaccatgccattgacaactgcatcaaagaacttcaaatacctagggagattaatctaattaaagatgagcaagatctccaccgcgaaaactgtcctaaagacctaaatagacagaaagatacactgtggtcaaggattagaagcttgatgttgtaaagatgtccattctccatcaatcaatgcaatcccagtaaaaccttggcaggacttttggtaggaagatgaaaaaattctatttccataggaaacaatggattttttggacaattttagtaaacagatgagagaataatccagtcagaattcccagaatccacagttctgtttcttccaatggtagaaaaggcaatgcagcatcataaagctagaaagaacttctgtcccgtggcatcaaacagctctgcttcacttaaattgtccccataaatatactattcttctatttaacgtctctgagcagaaaaccctgcattccatcaattaccatacatacaggctcttactaccctaatcaccaagaactctcaatgtctaagaacattttaactctaacatgggttttgttctttcccttgcctcaatttgagcttgaaatagagaatatatctgtcaccgcagaaacatactatcattatgcctccaaagcagctaacaaatattagcttgaatgaacaaccaaataaatgttcacagtcatatacttggatgctataattatctcctcttcataacaaaaatctaatacctgtaatttgttccatcgtggaacctaccttccgagctttgaattattttcgtagctgtttcctggattttgacatacttcagttgcaggtctccaaatgcaactggacacaagaaagcttcatccgtgacctcatggttctcaggtactaaatccatatagtgtcatattcacacagcacatcgctgaacattattgcaggttcccctttttgaaatggttcaggtttgctctctccataagccaatcaccctgtgcttaccaatcctaaattgtctccagtttatgtccctccaaggttacatggctaaatcattgtgactcttaatctggttctcttagtaacagtcaccaatcacatctgaagactcaggaacatttactgaagtactccgtttcatcattgaaagaattaataagaatgtaaaacaatactggaaggaagtcagactttagatttaaaaaacagacctagagaaacttgggtccaagaagattaaaggatttctagctcaagtgaaaaattcattgttttccctttcacccctgcctaacctctcaataggaaataatgatttattaagtccaatctaagaattaactgtgttctggaatggcacaaattacaaatgaaactcaagggaggtaaagcacacagtttttggatgatcatgttgctagttatgggattagttaagatttggccctgagttccagggctcattaatgctacccaaattattatcatttccaataattagcctagataccaagcccacagaaaacaggcaagaaagtcctggcagactagatggctcaagagcccctctctgtatccgctaatgctggttggcaccactaatgctggttggctccgtttcatgccattagcctgggagttacttcagggcgaagatggtgtctgggtaccaggtcaaatccccgcaaaatcactgagccagcctgccttggacatgcagatttccactgtggcggtaactggatggtggatagagggtaaaacagatctgagtttgataaagtcagaaccactcactggatgtgtggccttgggtaagttacctgccctccttaattcataaaggctgaatgagaaaacacatctccagcactttgcactgggcctggaataggtcaaccctcaaactagggcaggttgaacatgagcatgtgtgcgcacgcgcacgcacacacgtcctagtagaattagaaagagaaatcattgcaactgcctcttcactgttgctcaatgaagtatcggtcaaagagcttcgtacccaattcagtgtaacacttgaggtccaaagctcacctttagaaaggaacaatacgaactaggcagtgttttctttaaaaaaatttttttaattggcacataatatggggtgcacattgatgttttggtacatataatgtatggtaatcagatcaggataattagcatatccattatccaaacattgatcatttctttgggttggaaatactcaatatcctccctctagctatttgaagctatacaataccctactgttaactattaacatcctacagtgctataggacactcgaacacattcctcctacctcactgtaatttctgtcctacaacaaatctcccccatcacctactctctctacccttcccagcctctagaaacttctgttctactttatacttctatgagatccacttttaaaaaacacatagtgttatggctgggcgcggtggctcacgcttgtaatcccagcactttgggaggctgaggcaggtgggtcacgaggtcaggaggtcaagaccagcttgatcaagatggtgaaaccccatctctactaaaaatacgaaaaaaaaaattagctgggcatggaggtgggcacctgtaatcccagccagttgggtggctgaggcagggaattgcttgaacccgggaggcggaggttgcaatgagccgagattggtccactgcaccacagcctgggtgacagagtgagactctgtctcaaaaaaaaaaaaaaaaaaaaaaaaaaaaaaaaaaatatatatatatatacacacacacacacacacacacacacacacacacacagtgttcacaaacgatgtttcctgagtccctgggttagcagctaggtctttggggcagctatggttggaggtggggtcaaggaggttctgtggctattcttatcctattccactccacgttcctcaaaacagagcagctccccgtgaacctgctgcatgtattcaggttgccgtattgtaacgaaaagaggttcccattgccttttttgtctttaggaaatccactgttctggggcaagggctcggagctttcaccgctgctctacctcagggcttgtctgatctgagcctgcgggctgctacctgcaactaagcaaacgtggccaccaaggcaagaggtggccgagtgcccagtgacacggacacaccagcaacattccacagaagcagctcaaagggcgtcaggagagggagcccaaaatgccctctgatattgatctgctttcccacgtcctccacaaatgcccactaggcatccactgacccagcaggttggttttaaaagggaagaaggaaagaagctacaagacagggagaaatcaagaggtggaggttcactctcactgcctgccttgatgccctcaagtgacagaatgactccaggaagaaattgaggcagggcagagccttagggctcagggaaatgggactgtcaaaaactaaaagctggtcacagtggctcacacctgtaatcccagcactttgggaggccaaggagggagcatcccttgaagccaggagtatgagaccagcctgggcaacatggtgagactctgtctctacaaaaacaaaaccaaaccaaaaattctaatttcaaatcagcacctaggcttatgctgatttatccattttcagttatttgaacacatatatgcttttgcaagtgcaaacctctttgaggttgtgtttagccccttggaaattaaaaaaaaaagggctgggtgtcgtggctcatgcctataatcccagcactttgggaggccgaggtgggcagatcaggaggtcagattttgagaccagcctggccaacatggcgaaaccctgtcttctactaaaaatacaaaaatcagctgggcgttgtggcatgcacctgtaatcccagctacttggggagccgagacaggagaatcgcttgaacctcggaggcggaggttgcggtgagctgagatggcgccactgcactccagccggggtgacagagcgagactccatttaaaaaaaaaaatttaaaaaaaagtttaaaaaaaggatataggctgggcgcagtggctcatacctgtaatactagcactctgggaggctgaggtgggaggactgcttgaggctaggagttcaagaccagcctggccatagtgagacccctgctctactaaaaaaaaattaaatgatctaaatctgctatcatggagagagggtggtgactggagggaaagacactggattttcatcacatatctgccattaaatggtgtaacgccttgagttactaatctcatggttccatctataaaattaccaattgacccatctctaagattcctcaaactgaattcactattactcaataaacaacttactcggatagttccctcgtgcctctagcagtcatttttgcaatttttacaacaggcatcttatacacagcacaatcttccctcccctttttctctaccttcctaacttctagccttctgccagtgctgctctcatttcagttactgctacagcctctcccgggctggaagggtgtgtctcatcattaaccagtgcctaaaggatttactgcttcatcaacagaccgaagcaaatatttgtaaactcaaaagctaaacagagtttaatctgagctgtctctgggattaatgaagtagaagatggatggaacctctttattctaggtagaagggcgagatttcaaaggttattgattgagaaaacagtagctaagtgctacctggaaagggttgtccaaacatgagttggtgtaggagtcaaggggaaaacagaggtgatctcaatacggtttgtgaaaggcacatatatatatgtatgtatatatgtatatgtgtatatatatatatttttgtaaagtttcaggcaacactcagatttattagagtattctgaatattctttagaagacacaaactgttatgtagcttcctctaaagccaaagctcacaccagtggttttgaggtaatagggctgggtgtgtgttccagcactgccgtttaccagctgtggggacttgggaaggttgtgtaacctctcgaagtctgtttcctcccctgtaaaatgggaatgaaaacaggacttcttcagaagttgggagaattaaaagagaacgcttagaagatgcttggaagagaggtgagaatatattaagtgttacatgaataccagttactctttctattaaaaagtgaggctggggtggtgtctcacacctataatcccagcacttttgggaggctgaaatgggaggactgcttgaggccaagagtttgagaccatcttgggcaacatagccagaccttgtctctacaaaaattaaaaaaaaaaattagtaaggcgtggtagtgcatgcctgtggtctcagctacgctggaggctgagatgggagaattccttcagcagagggtgttgaggctactgtgagctgtgattgcgccactgcactccagcctgggcaacaaagcaagaccccgtctgaaaccctcccccgccactattcctagcctttactaggagtctgcaccccaattcagagagcttcaaaatgtagatgagaaagtccatttcgtggacaagcaaggaaacgtagaatgcttgcagatgtaccacccaccgtggccacatcaattcaggaagctcaggaggagaagggtaaggaaatgagtttttagagaactcctaaacaggagcttcctacctgctgcacttcattgaatcctcacagagacatcattcccattttctttctttctttttttttttttttttttttgagacagagtctcgctttgtcaccaaagctggagtgcagtggcctgatcttggctcactgcaacctccacctcccgggttcaagtgattctcctgcctcagcctcctgaatagctgggaccacaggcacacgccaccacgcccggctaatttttatatttttagtagagatggggttagtagagatatagtatgttggtcaggttggtcttgaactcctgaccctgtgatccacctgcctcggcctcccaaagtgctgggattacaggcgtgagccactgcgcctggcctcccattttcatagaaaaggtcacagagtcataaggaggctgaactgggagtctaactctgctattctgtcttctgcctcttgcataaaaactcaacacgggtaggagctttctgtcttgatctcagctgggctgccctggtaaacctgtgtagaaagcagtcacatcgactcccaagtgggggctctttgcgtgatagtgcaagcatcaaaacctaagagaaggaagcagggcaggggctctttggatcacccaggctggagtgcagtggcgtgatctcagctcactgcaacctccgcctcctgggttcaagtgattctcctgcctcagcctcccatgtagctgggattacagcgcgccacaacgcccgactaatagaagcctctggagccccttccacgtgcacggtggtgtgggagagacacgaacagcagacatgcatccagtgctcagacctgcctgccgggaggcagaagagagcaggccacaagaataggccgggcctggtggctttcacctctaatgccagcactttgggaggccctggcgggaggattgcttaatgccaggagtttgagactatcctgggcaacacagcgagaccctatctgtaaaaaaaaaaaaacaaaaaataaaaaaattagttggatgtggtggtaaacgcctgtagtcccagctgcccaaaaggctgaggcaggaagatcccttgaatccgggagtttgagagtacactgagctatgctcacaccactgcgctccagcctgggtaacagagtgagaccctgtctctaaacagacaaaaaaaagaatgagacaggtagtagttgccgtagaaggtggaaggtggaacccacagccgggagctaactgggtaattaacgtgaattgtagctggtcacatccagttttttttttttctttttgagacggagtctcactctgtcgcccaggctggagtgcagtggtgtgatctcagttcactgcaacctctgcctcctgggttcaagtgattctcctgcctcagcctcccgagtagctgggattatagtgcgccaccatgcctgactaatttttctatttttagtagagatggggtttcaccatgttagccaggctggtctccaactgctgacctcaagtgatctgcccgccttgactcccaaagtgctgggattacaggcgtgagccactgcacccagctgggtgactttttttattgcctctctgagaaggttaagcctgcctctgaattattgtcaggaaaacagtgtcatcaggtcagttctccagcaaaaaatctttcctcccagttatcgggaggaaatgatctacttgaatgatactaaagatagaatctgttgtttttggcgaccttatgagcacatttcaatcctaatccaaaggattttcattgaactagttcactaataatctggccaacgaggaagacaaaaagggctgaccctaaaaagacaattcccatccaagcagagagagagatggagttactcacgccaagtcagaaagtcattttcgggggcatttggaaatctttggagtgaacttcccgatgctatgaacattgtttgagaccctggagacactgcctgtgtcactgtgggtttcccagcttccagccggggaactccagactccagccggggacagctgggtgtggaggagcggatgtggaggcaacgccagcagcacaaacagcagctctcctcccggccggcagacacatggaaggacagcctctttcagcctcattcagccgcgagccagaaatgctccaattgttcagaagaccctgggcgactcagcaccggatatgagcgcacattctgccaggaggacgttgtcaggagccacgcgtggctcatctgtttttgacacagaggggatattgatgaccagccactgatttcagaagacagagaaggggtgctttcctctctggaaggaggggaaacttcaaagcaaacaatgctccaaagaagaaaggaatcggttgttctagaactaaagaagggaaatgacaatccgtctctttagaccttagagaaaaaaaaaaaaaaatgaagaaggcggtatattcccagcagatcagtaaaagctgtaaggaaaagttttggcagacatcccaggaataaatatgaggaaaaggttagaattcttctttatgataaaaagatatttatttccttgacaaatcctcagtgatgaattccttacataaaagatgtcccaggagaccacgggaaataatgccacattgcagactgcaggataaacgtgtcatctctggggactgttatagagaattagatgtgatttttaacatgaaaaaatgcatgcttggagaacttttcatcaggcttagaaattttagaaataaaatagttcatttcagagagcattgaaattgaagctctttgaaaaccaagcaccttttgatggtggctgggagtctctggaagagctttgctttctggctagattccatggctcactggcactcggtgaagagtgcaaatgtaatttaacagagagagaggagaatggaaaaaaataactgaacattcattttaaaaaattagcagcatccagtaaaatacccagctgaaactatggtttgtaaatcctacagtttccatttcttaggctgtgaaatgagggagctgacctatcttctgggtccaagcttgttaggctattgcaataccaacgtttgcaggttaactgtgaatttcagtcatcctcattctgtgctcccagcaaaggagcactgcaacagagggctggccctaaatgggaacagagaaacgctcgtgggaagtgatagttatatctctttttagtatttaaaatttcatcacagtcctacccagtcaggaggctgaggcaggaggatcgcttaagcccaggagtttgaggctggagtgagctagcattgcaccactgcactcagggcgacagagcgagaccctgtctcaaaaaaaagttatcattggaaagtcattcatttaggttatacattgtcatttggtcctggttccctttagtgggcaaatgctcctttattagtaacacctcaggggataaatatagctgtgtaaatgactttgtctttatttcccccaaaataagaacagaaagggataacgactctgtctccctctcaattttgactcaggccagtcctgctcaaacatgtccagaaccatccattccccagaaagagatttcgcagctctccctgggcacacggtccagcataaacaaaccctggcacaatccgactttggctgcgccctggggcagagcagaggctatgaccaaaattaaggcccctggaatcctgtccattgttagacctaaaaggagaggccacaggccatgggtaatggaggactttaaaaggccaggaacagagatacagggaggagaaggaggaaggacaaaagagaagggatgaagacaaaaccgaaaaacgtcgtgtgatttatatcagcgcaaggcagtgaattctgagctgaacacagccgccatcatgacgctgacagagcctatcagctcccctctctgtttggagagatgtcagatagctggcactctcattgttacattagttattaataaactccttaacaatgggaggaagtgctagcattcagagaatgggagtgtgtcaacagctgaggactgaatgtggacggatcccaggcaatgccaggcccatgtttagcacaacctgttttctcccagaacagaaagtgtcagagccagggtacaatgacagactgcaagttttgtttcatttctcgttttttaaacccaagatccatcaccagattcttcgcaatcttgctgatcacactgcagatgactcaatggccatctcagtaatcacacagccaaattcctacttgaaaacacaacatatcccttagttttacagagaatgggtcgtttatggccctagacttctagtcgagaagccaagatcagcctcatcatctcatttaagaaatgctgcagtcccatttattcgtttcagtggttaatacaacaagccacacgtccctgcagcacactgggtatttcctaagtgggtttgtgctattttccttaaaaagcctgagaacaaaaactaactctcctaactcccattgaaatcagaactgttctctgatggcttggccaggtgtggtggctcaagcctgtaatcccagcatgttgggaggccgaggcaggcagctcacttgagctcaagagttcgagaccatcctggccaacatcatgaaaccccatctctactaaaaatacaaaaattaattagccaaatgtggtggtgggcaactgtagtcccagctgctcaggaggctgaggcaggagaatcgcagataacccgggaggaagaggttgcagtgagccgagatcatgccactgcactccagcctgggcgacagagcaagactccatctcaaaaaacaaaatgaatgaatgaatgagctgttctctgatggcaaatccccaaaacaacacttagaacaaatctcaggctctgtctcactttcagacaagctatgaatgggctgtgtgtcttcacctacaaagatacacccagttattgttgctttgttgttgttattcccttttttctcccctccaacattttctggaatttcaagtaacatgagatgggaaggaaggaataaacccattcaagttctttcaacatggattttggattctttttttaaaagaccctgaacatgtcttaaccagatggtttgaattcatagttgttctctcaaactgtacctgaactttctgcaaatgtgttacctgaagacttaggagtgaaagcaacagagagacgcagctacaaatgtggaagcaatcactgggctgtcacagggcagagtgaatccaatgcaccctgcctgctccccctccagtggtcaataacagaggcactgagcacctgcacaaatggattcaggacgcgggttccacgactttcctcccatctgaatgccactcagtgctgcatggggaggtgagaatttcattccttttcttccaacacaggcttacagctctgattcagatggttcaccacctctaagggcctccacttaaatacaggtctacggggtctcacaggggacagctctgcgtatcactactacgggattcagggccctgatctcaagccttaaccaatcactttaactacgctgaaatcatctgccattgagtcatctgcagtgtgatgagcaggactgtcaagaatctggtgacagcatagcaaagacttggaaccaacctaaatgtccaacaacgatagactggattaagaaaatgcggcacatatacaccatggaatactatgcagccataaaaaatgatgagttcatgtcctttgtagggacatggatgaaactggaaaccatcattctcggcaaactatagcaagcacaaaaaaccaaacaccgcatgttctcactcataggtgggaattgaagaatgagaacacatggacacaggaaggggaacatcacacactggggactgttgtggggtgggggacagggggagggatagcattaggagatatacctaatgctaaatgacgagttaatcggtgcagcacaccaacatggcacatgtatacgtgtgtaacaaacctgcaccttgtgcacatgtaccctaaaacttaaagtataataataaaaaaattaaaaaatttactattaaaaaaaagaatctggtgacggatcttgggtttaaaaaataaaaatgaagcaaaatctacagtcaactatgttgacttttttatttgaaatgctaatccgtggctcagggcattggtaggtatggatattgacttcttttttatttatttacttattttagagacagagtctcgctctgtctcacaggctggaatgcagtggtgtaatttcagctcactgcaacctctgcctcctagctaggctcaagtaactctcctgcctcagcctcccaagtatctgggattatgggtgtgtaattacacgcctagctaatttttatatttttggtagagaccggatttcatcatgttggccaggctagtctcgaactcctgcctgccttggcctcccaaagtgctgggattacaggcctgagccattgcacctggcctggcttctttaataggtatcaatgacattcttcatttcttcagcatctgaggcctcagataccaagtactagacttcagtagttttaaaggtaattatgtgtccttaaacaggcaaaccaccttcaaagttactaatagtttagaaacattttacgtcttttttttaaatcaatgagcagtacacaaactctttgcggggggggggggggggggggggagggctataactttgtaaaatgctgtgtatagtacctggcagagttgggagctagcagaaatgtttataccacagaaatcttacagtgttgtgacatggctcagacacaccatgatttgggtttagatgagggtcagagaataattgaaagatgacaagatggatactactgcaggacactgacgtgacacaaactttaaaggtctcataccagtgtgacaaaggcttacaatataatttgggaaaaaaagtactggagacagatcctatgggaggtatcagcaaggcccagggtaccatacactctaggaacatagattagaagattcttttttttttttttttttaagagacagggtctcactctgtcacctaggctgttagtatagtgataccatcatagctcactacagccttgaactcctgggctcacgtgatcctccagcctcagcctcccaagtagtgggaaatataagcatgcaccaccatgtccagctatattaagaagatttttttttttttggtacagatggtgtcttgctatgttgccaaggctggtctggaactcctggcttcaagtgatcctccccaccgccccaaacccctaccctcctgaataggcgtgagccactgtgctggggtgaatattcctaaaacacagcacatgcaggagtcttattagtatccttcacaatttaattcaatttcaataactgtgcatcaaacacctattgggtgttgggtactgggcaagtattagaaaattctgaaatggagactagtttctcaaaatgcttttaaggaacaattattagacactatctaacaaggaggtgaaagagagaaaacagttgacccaactggacactgggttatacatatcaccttttctgaatgaacatcagaaaataaaatccggcaagtgtaataagagtattaacaattagagctctcctggaattgcaagcagcggggcttgtcccctttgtgggaacacattctaggcaagagggcagaaaggcaggaagaaagggatggagatgagccagccgcctagatcttcaggccaaggctagatttccccattgcaagggatgtcgaatcagccccttccagatggcgctgccaatgctttcatcacgggaaagctttatcctcctggtgcaaggaaacacaggcagccgtcagccatcccagcgggagggagaacaagatctaggggtgctagaaattccctttgttccctgatggaatgtttcctgtttgcagtgcgtccccccactgtcttggccctcctaagtcacaggaggtgggtgtggggcaccccaaggagcctccaccctggcactaaaggatgtttttcaggctcaaacttgcagggctggtaagagtgggacctgccctcgggttgagtcatggggctttctcaccttctcaccagggtttcttcttgctcagctgtgcagctgcagaaagggctgagggcactgaagctgacaatgggagccgctctgcaagtggccccagctgctactactaactcctaatcacctcagcctggggccccagcgctgaatgataaagcatttgaagatcgcttcattgtattggtataccgatgcttatctattaggtgtacagatggattaagcaggaaggttttcttaggatttctcttctagcccaccagattgattagcaaagtccagcctgtggggagtcatagagatgtactgcttttaagtcttaaagacacttggatttcatttgtgtgtgtgtgtgagagagacacagtctcactctgccgctcaggctggagtacagtagcatcatcttagctcactgcaacctccgcctcctgagttcaagtgattctcctgcctcagcctcgaaaataactgggattacaggtgtgcaccaccatgcctggctaagttttgtatttttagtagagatgggctttcaccacgttagccaggctggtctctaactcctggcctcaagcgatccgcctgccttggcctcccaaagtgctgggattacaggcgtgagccactgcgcccggccagatttcatttctgatggtgcatgatgtcaatttcatctcaggaggtttggggctcctgttcacagcctcatctatagctgctattaaggtaaattgctgccttggtgccccctggagtctgccagatacaagggggcccgtgcagatggaccaggacacgggcttaaaactgggcacacctgggttctatgagcctgggcaacacacccaccccaagcttgtctcttcctcagcaacaagagagtctccccaattaaagcgactagaccagcagcatcagcctcactcggaaacttgttagaggtgtaaattctcaggctctccccagacctacagaatcaggagctctgagaggggttttgacaagccctccaagtggtttcgatgcacgccgaagtttgagaaccactgagcttcaagaatccaagctgaagtcagccagattccctgtgctaagggggaaggtgggctgatagatgcagcctctctcatctgacactgggttttcacagggttaggaaaaaacgcgattgtaggttgtgtttaaaacacaaacaaggtgttggctctgactctgctctaggtcattcagcaggagactgggagcggctgtaattcgaggtaggggtcttggtctttgaatttcattctctttgatccttgaagacaacattctctgcagtcttcatggccaactcccaagcttcagaaagaatgagcattgaccccatttttttggatgaaatattttcgaagaacttaaggcagggaggggttgacaatggaccccaggtgatgtggcagaggcagatctaggtttatggggcttgaagcttataaaattttagcagcttttttttttttttttttttttttttgagacagagtcttgctctgttgcccaggctggagtgcactggcacgatctctgctcactgcaacctctgcctcctgagttcaagtgattctcctgcctcagcctcccaagtagtgggcttataggtgtgcaccaccacactcggctaatttttgtatttttagtagagatggggtttcactgtgttggccagactggtctccaactccagacctcaggtgatccacctgccttggcctcccaaagtgctgagattacaggcctgagccaccacactggcctttagcggttctactgaagaaaaatacaaaacatattatgttcacagattttataaaaacacatgaccgtgtgaacacactgctaaggtccccggagggcctcagcctgtccaaggaggggccttcaacttaacgctccactcaccagaacagtaacctcgcctctcagtccaggaaggatgtctgtcctctctctggtcctttaaatttctcctggctatgattggatcacaccagcccacaagctaacgagacaatttttagctcctcttcctctcctgtcttttcctttttgttattgtttacagccactatatatagtaatataaattaccagggaagatttcttgccttctttgcgtggctcagagacagctgcatggttcctacatcaatcaggtttttttctcatattccacttttctttttttgttttttgaaacagggtcttgctctgtcacccaggttggagggcagtgcagtcactgctcactgcagcctcaacctccagggttcagtgatcctccctactcagcctcccaagtagctgggactacaggtgctgtgccaccacacctggctaattaattttttttttttttttttggtagagacggggtctcattatattgcccaggctggtcttaaactccctggcctcaagtgattctccagcctcggcctcccacagtgctgggattagaggtgtgagccaccgtgcccggccacaatgcccttttctaacatttccaaaccacggctgcctcccttcctctctgcttctttcaaacccactcctcctcctgccatttcagtaaatgacacccccctttttaagtcagtcagatccaggaccttggaactcctctgtccctcccaacatcaaaagacaaaatgacttggccaaggctggcggaagcggacgacggaaccagatctctgactcgcaatttcaaaaggcactgaatggagaaatcatgccctgcgacacgatggagagagtattccgcatttttaaaagccggagaaacccacctgggagtagaatgcagtgtctcctggcaccagatcctgaaattcacaacacacaagtgggcacatgagcggattccacttttcacccttggacctgacattcccgacagcttgccatggggattgtgaaacgctctggggggtacctgaagacacttaagtgtgaccagcaggccttcttgcactgcgtggttctactgatgcttttttttttttttttcccttccactatttgattcctgggagcagttttctcagattcgcatttggatcccaaccttggtctggaaagcaaagccagctttggagcagcttgccctgcagtctccccagctgcagctctccccaccttcctgggtcccctctggggtcccagccatgctcagggggcgtccctccagctggcctctgcctacctgaagacagcaggctgccgctgctgccgctgatgatcttccccttgctacccatgttggccagcttcgaggtcttcagcgtccccgtctcggtcaggtcgatggcgatctcactcaggctgcgtgctgcatggattttggactggaatggaaagggaagcaggtcaaagaagtgacgctcaccttgcggaaaggacagtcatccctcgcccgcgcctgctcaccgtcttgacattccgcaaagggacttatctccctgactaatgtgcagcatttttgtttgcatcccttggcctcatcattaatcaccgaaactctctgcgaagagcagaggcagctcaagagctgcatcaattgaggatgttctaagcctccgattctgtaggctgcactgctttgtgcttaagagaatgtcctgatttaggaaaagtgacttaatctcattgagctttattattcccagccacaaaacagggtagatgccactcaccacccaggggttggttcgggtcaaaggagaaaaagtgtgggaagggtgttcctcccctcccaactcccctgtcctcccctcttcctccttatctgcctggcacacagctctcaacaaacactgtggttataattatttagtgcttaaacaaggaggagaaaatgattttcagtgctgtgaaagacctaagagatttaaacctcttaaatagtttgccatgtggtcatggaaagtttagctgatggagaagtgacagtggttctccagcttgggcatcatagcaagatcccatctatacaaaaaaattagccaggtgtggtagtgcatgcctgtagtcccagctactggggaggctgagacaagaggattgcttgagcccaggagttggaggctgcagtgagctgtgattgcaccattgcaccccagcctgggcaacaaagtgagaccctgtctcttaaaaaaaaaaaagagagaaatgacaatgacagatctctagacctgcaatcacagggtgcatgattgtggaaaaactgctcatttggattctggggtcccaccaacgaacgtctgacacggtgctttgcttattttgatacctaagtacatgttgccctagtcttcctattatggttcaaaggatactccctttaatccacgttgactggctctatttggttaaaagtcacagcaggtaagaataattagaaaaaactctatgttcacattgacattcctaaaagcagcggtttttcaaaaaaaaattttttttttttttgagacagagtctcagtcacccaggctggagtgcagtggcccagtcttgactctctgcaacctctgcctcctgggttgaagtggttttcctgccttagcctcctgagtagtggggattacaggtgtccaccaccacgcccagctaatttttatatttttagtagagacggggttttgccatgttggccaggctggtctcaaactcctgacctcaggtgatccgcccgctgcagcctcccaaagtgctgggattacaggcgtgagccaccgcgcctggctaaagcagtggtttttataaggtatctgctccagtttctaccttcggtagtgacaatgtgtttgtttgcatttcccacacgtgtgtccaatgtttgcttgttttcttcttcaggaaatcaactttttgtgagtgtgctgaaggcaacaggctttgccagtacacagaacttcgtgaaaacaactagaaacggtcacttgctcatctgtcctttctgtggccactgtctacagcacacacacggactgggcgaggttcaccattgtagcttcctgcctggcctgtggaacccaaggtctttcccacacaggagaaagcaggcatgggggcggtggtgaaggccatggaggggtgtggacccaccactcctggatgccccgtgtacagcctaccttccgtgcctgggggcccttactgtccagccagggctgtctgaatgcctgcagctctgcccttcctctgccctcgacgttgctgtccacactggcaaggacagcgacttccgacctcatgttaacacgatggaagtctgcgggctggaggaaacactgaggcatggcgcttgttttcttcacctggtgtgaattgtcttcctcctcctcctcctccctaccccgtgggcctttcctcgacttatgcttccttgctaacctcaacttttttccttgcattcagactgaagtcgacttcctcaggcgaatttccttgttcataaaacaatcctggctgccaggccctcgaaggattttggcttgccgcagaaggaaggaaaagggctttttatttcattttgacacagcctatcatttgcgcccatctggttgagttttaccctctaagcaagcatggcgagtacaacccatgacttcctttctttctacatcgctctgttatggagacccaggttttaataaaaagtagcccactcccaaacggtgatgtaacaataactcacgaaggcctagaccaattcagtgctgggtgaagggtctgggctctgaagtcagaatgacctgaattagagctgggcatggtggctcaagcctgtccatcccagcactttgggaggccgaggtgggtggatcacttgaggccaggtatttgagaacagcctggctaacatggcaaaaccctgtctctactaaaaatacaaaaattagacttgtgtgatggcacacgcctgtagtcccagttactctggaggctgaggcaggagaattgcttgaacccgggaggcggaggttgcagtgagctgagatcacgccactgcctgatctcattccaggctgggtgctagagtgagactgtctaaaaaaaaagacctgaattagaatcttggctcttcccagtgaatcactatcggactttgacccttcaccttcctgattctcagatacatgtttgtaaaatggaggtcttaaaacccacatcccagagttgtgataactaaagtagataatttatgtaaaggccatcgtaataagaataggatctgcattagggcctggctgtaatttgctaactgaggttagattgatggcccaaccagatattttggggacctcattaatcacatgaaaaacttatcccccttgtcataccagaactcttgccacacatcattcttaaaacaaaaatatgagatcaaaaggcatccttcctaaaggagactagattcctggaagccttatggaagctttagcaaactactggatttttttttttttttttttgagacagagtttcacactgttgcctaggctgggggagtgcggtggcacgatctcagctcactgcaacctctgcctcctgggttcaagcgattctcctccctcagcctcctgagtagctgggaccacacatgtggtccaccacgcctggctatttttagtagatacggggttttgccatgttggccaggctggtgtcaaacccctgatcttaggtgatctgcccgactcagcctcccaaagtgctgggattacaggcatgagccactgcgcccggtccggattctttctagaatggaaaatatcacagcgacctaacagactcggtggggagaggaccgggaggacatgggcattgtcggggagagtctctctttgcaaagtcaggtctctgggctgaccttaaggagtccccagactctggaacattttggtctgggagtcttggctgatacacgtgactcagtcttctgtctgatattgtgggaacaaagcttcaatgtccctgtccccctttgactctgcctttgactctaaataaaatggtgaactgcatcagggagagaaaaaaaaagattaggaagaaggaaagacgtttggattgggggccaattcaagaagtccccactctgagttcagagggaaaagtgtctaatgtcgactctaaacattttgaactttcaaatattttcctgcaaagtctctaagacgttccttggctctgggcttcagaggctgctgggatctagcagacaacgtttctgatctctggggtcagcatagaagttaccaattataattggtgcctgtgcagcttctcattctgaaggagctacaaataaccaaccagcacagcctccctccgccctgtcttagatcgtagaatggtttcttgatgtatatgcatggagagctgatggagggagggagggagagacaggcagagagaaagaaggagagatttccttaaatgatttgcacagtgaccctgaaagaagaaaaaacccgagtgtcaggggagcacctgaaccctcatggctccctacccttgctgactcgaaccactagacctcacttgtctctctagggttgataaacatcatttgggaggcctgggctttgctgaagctcttcagagaaaggaatggttggcatgtcccagtacagtagagtgtgagcagtggccaggataccagccagaactggctgcctagaaatgttatgaagctctctgtcccagccctgtcggccatcactcacccagaggccgtgctgcccatcagagatcaatcacatcgctgttctataaagaacattccagaaacagaaaggtgttgtaatgtaattcccaaagggtacgtcatcatctctgatttaatttgcgggccttttagagaatttaaacttcatgcaagtgttggccagtgatagtatgctagattaactatgacattagtaaaagatggcacgtatttcctcaagcaatttcacaaacgtggtgccatctgaccaatcactaattgaggtcaggaatttcctttgctgctaattggggaaagcaaaacaccaaggatgaaagacccacccggggtcccagagctggaaaacagaggcctccaattcccacatagagggttgtgatcctcacctgtcactgcaggctggggaactggttcctgtgagaagtgtgagggctctaggacatctgtgagcatgccaggcttcctgggaaatgttctccttctccttctgggagcgtgggcattttcttcagtccccaagggttacttttacaaaagggacagctgaaacattcctaatgctatggggcatttggttttacctcctaaaagacacgtcttgttgctaatttatctacaataatctttttttttttttttttctgagatggagtctcactctgtcaaccacgctggagtgcagtggtgtgatctcagctcactgcaacctctgcctcctgggttcaagcaattctcctccctcagcctccctagtagctgagattacagatgcctgccacgatgcttggttattgttttttttttttttttttttttttgtatttttagtaaagactgggtttccccatgtttgccaggctggtctcgaactcctgacctcaagtgatctgctctcctcggcttcccaaagtactgagattacaggcgtgagccatggcggccggccaataatttccttttgagatatacttgctgtgtcagtgagttgacctgttagcctgttcaacaacaaggcttgccaactgcagaatgagcccatcttcccgggtgcagcaggaaagccataagaacaagtttcttgaaatgctcaagagaccgcctatgcaaaaaccggcgcagagaggaggagcttgaacagccaatgctgtgctatcctcagggcgagatacaccttttcctctgtccacactgtggtacagtgcgtggggggtctgccgtcaaggggaactggcagtggggttcaggagcattgcccaatcccctaacccccaccatccatcacccaaccacagagggtgaaattaacgttctcaggtgtcgacctccaactgttgcccctggacagcaaaaccctgacacccacccactgtgtcaatatcgagcatgagtcaaaaacactttggccccatttcttttgatctaatcgagcttcaaattcctgcgctaggactaggacccatcactgccaggagagctgcggagaatactgtcattattcctaacaacagaaattctctgtcctgcgctcattcatcccagaaaatgaccaaaaagggggtcagaaagtagaggacaagatattttacaaaggataaaatgacggctgcgggggacagaccccaatttaaaactgaattatgactaaagggattgtttcatttcgtcctgtcctcttttcttcttttttttttcttttagtagagatgggggtctcactatgttgcccaggctggtctggaattcctgagctcaagtgatcctcctgccttggcctcccgaagcgctgagactacagatgtgagccactgtgcccagccctgtcctcttttctttctcttatcacctcccccttgacccccaattcgctcactctcctcttccccagaaaaagagaaaccccttaaaatatggataagatggcaaaagagaaagaaccctagagggcaccgattcagtgactcttgtgcccagtaagttgagcatcttgccaccttctcccaagaactcacgcgatggagggaaatcctccgtaagtgctagaaaccactagcccaggggcccagggtgacctcagtctgtattcccccagcccaagccagcaggatcttgagagaagctgcagggccatcttggcagggctcttcccctgagggagaatgaatgggagtggcttgtggggggctgacaggggagtctggggagacagggctggaggaagagggggcagagtgttgatataagccctgtgtgaaccaaggagacgtcatcctctcacccaccagaaaacgcagctgcgtgcccagagtcaggggtggtgacatctccttggaggaagtctgtttaccaaggccccaggctctaggtctaccttagggaaacagggtagttgctttttttttttttttttttttttttaacgtttccagttttgcattaaaaaaaaaaaaatggagttggcagttggaaccgcctgagggttttcacagcaattaccctaaacagttaggtggtgtctattcgttgagaaagattccttttttcttttcaaaaggaagatagtataccactgtttaaacaccaaaaagggcttgccttcacgctgctagaggattctcccgagggccaaaagcacagtgggaattcctcaaaaggggcctacctggctgcagtcagcggcttgagcggctctgatggtggtcagagccccctggaccaagatgcatggaatgtgccctcttgaagagctagtctcatccctcccatctgtagccctaagaggcaagcctgtatctgtgcaaggtatggacccgggcaagggacatggcgcctcccccacccatccgatcctcattcctaaactaagagaggcagacaatggcccgggcttggtgagaggtctggtcactcaccttactctgctttctgtccagatagaactggtgttggcttatggccatagcccagatggacttgatcaatgccggacatgcataccacgtgtgcactgcaatgccgctgtgcccaaacgtcctccttgtcactgaagccctggggaagcaagaatcacaaggttcaatcccatttctgttgagagaaaccatttctcagtcaacagcttctgtagagaacccactgcgtcctagaagccctggcgtaaagatgatagatgagctctcacatacacctaggcgtacacacacacacatgcgcacacagcttacagacatcattggctgggcaaaggccaccttctgattttctgactccctagagttcagaatctggccaagcctcggccttgtctgggataagatgggtcattctaggtcaatggatggtcctttttcgatcctggacttggcactgggccaagacaaacttcgcagacaggaaaaccttcaatgatgctccctatgagacaggaaatgtgcctacggtggggatgagtaaattattttctaatcaccacaggctacagcgtcccagggaattgggacttcttatataactaacccaatgttccttgaagatttggtgatcaatttccaatctattcagagggcagggagggtataaagaatcaggagaagaaaggcagagagaaatgtgcccagccccaattcccccaacgtctgtcgatacatttcatttatatttttcagatggagtcttgccctgtcacccaggctggagcgtgctggcaagatctcagctcactgcaacctccacctcccaggttcaaccaattctcctgcttcagccttctaagtagctgggatgacagatgccccccaccactccgggctacttttttgtatttttagtagagacagggtttcatcaggctggtctctaactcccggcctcaggtgatccacctgcctcggcctcccaaagtgctcggattacaggcatgagccaccgcacctggccctgtctatacatttttaaatctacatggagtaatcagactttaaaagtgaaaacgggaactgttcatctccacattcatggagttagggggagttatatggtcatgctcttagtgaagtatattttataggataggcagattattttgcaaatgaaatctaagaatgtgtgtttgcatgtgtgtgtgtgtgtgtgtgtgtgtgtgcgcatgcatgtgagacaagttgacaggaaggtgggctgggatttggggcattttacatggacatcagaaacaaaatgtatgttctcaagactaacatatctaatttggaagaaacctgggggtaatcaggacttacaaacaataacattttttttcatggctaattttcccttaaagaaaacaaagctgccagcaatatcttactttgggcgggggtcgggggtgctaaagatttaaagtggagtcttgttcaccctcacttttaaggagaaattcagatccggtggttaatgttactgagtccacacaggttttttctcccttcggttccaacaaaagtgaaggaaaaaaaaaaaaaaaaaagccagagcgtgaaagagcacacagttgaaaataattgaaaaaaggagccagggagagagcgagggggagatccctcgccagtctctctaaatttaaaagaaaacagggatctgtgctcccagcttggcttccatagcagttcttgctcttggaaataaatgaatgacttttttttccccccagaaaagctgaattagacaagaacagtatcttgaaaggtggtgcaaggctaggtacctccatttctcaggtaccgggagggcagaagaggtaagtggctggtcaggtccgggtagttccccggagcatctaaatcagatactcagagttcttctcctgctctatcattactttatctcctctcctcatctttcgcttcaagcccttcctattttacccaaaccgtagaagtgaaatattggcccagcctggagaagctcagaaatgaagctaagcattgagttaggatgcccagggggagaaagtgcacagtgttgtccagtgccccacagggaatggtgcaatcacacctgagcccatcggcccagaaagcagcctctgccctgaatcattcccatcgattacatcttcattaaatgaccgtatctggcgttgcccatcctattactgcagttctgactgccttcctggcttgggggaggggctgagcccggaacaccaaactaacgtgaggccaatcacattcctcttccctacctcaaataagcaaggccacaagcaataggatgacacattcaacttaaaaagcaccgcgaggttcacttcaaagtaactggaagagaggacttgcaatgataccaacataaaaatagtaaacactgaggcgggtggatcacgaggtcaagagattgagaccatcctggccaacgtgatgaaatcccatctctactaaaaataaaaaaattagctgggtgtagtggcgcacgcctgtagtcccagctacttgggaggctgaggcaggagaattgcttgaacctggaaggtggagggtgcagtgagccgagatggcgccactgcattccagcctggggacaaagtgagactctgtctcaaaaaacaaaacaaacaaacaaacaaaaaaacactcaaggccatggataccccacgtaccctgccttgatcattccatgttctatgcatgtaacgcactcacacgtggctcatgaatacgtgaaatagtaactctcaatacaagagaaaaaaggcaccactaggatgtgaaaaagagaactgagtgcaagaaagatcttacagctcatagctctggctctgccatgctaaataactgacctgaagccatttcctttccttgtgtgtctttaatgctgaagtcatcccgggtctccacctctggcctccctgggcctctcccccattcctgcctgtctgcaggctaactcagtgtactcagagcgagtttgcctgggacgagacagctctgcttcttcctctgggctcctccaactcccacttccctccagccagaccctccctcatttgtttatcctaattgagaagcccccacctgacatctatatccccctgaggccctaccacgtggctttaatcctagttacccctccaggtccaactcagacctctccttcctggtaagcctctcccttcctgaccagccaggcctctggtgaccctgtccttcacccttcatggcccacgacgtctggcccttctgtacagtatagagataaagggcatgagctctggagccagacctcctaggttcaaatcctgcctctcctgtatactagctacttgtcgtctagagcaggtttctttgtttcttgtgacactccatgagttccttcttctcagccaggttccaggcagtggctcacgcctgtaatcccagcactttgagaggccaagatgggaggattgcttgagcttgggaatttgagaccagcctgggcaacactgtgagacccagtctctccaaaaaaaaaaaaaagctgggtacggtggtgtgtacctatagtcccagctactcgggaggctgaggctgaggtgggagaattgcttgagcctggaaggtggaggctgcagtgagctatgattgcaccactgcattccagcatgggcgacagaatgagaccgtgtctcaaaataaaagttccttcttctgcctgtcttctcagttacactagaagatctttaaggaagaagaccctgcctccgacttccttccttccccgccacagcacccgacaaggacacagaagcttcgcaagaaacatgacattgatcactgctgtctaataggcgacaggcccactgaatagtcacgtgtgagatctagattctttcctatatccctgggctttggtaaagagagtttagcagtactcaccaatagggcgacagacgcacagagaacacgaacacacatgtgcagatatatgcgtgcgtggttaaaggatttgtccaaggtgcctgggtgttcactgaattcccagcagagcacaggcatggcggagggtctattccctgcgctcagccccttagattacccagcccctcatttttatcctatggagcatcccctttctgcatctgacccattgtggcaaagttcatttcactctttctgtacttaaatttcccctctcttacatgcctaagaacctggtccaattcagttcacctggaaaatgaacagtgagtttcttcttggctggaatcttatttttgaaatctccccgcccaccccacttggcctgcacagatggatctgtgctccatggagtggggcttctggccgcgaaaccccttgcagggccctgagaaacaccggataaaatatttttctgttaaaggctaccattttcacctgactgtggagatgcagaaactctcagctgctctccactaactattcctgtagtaaccgtggtgctgagataagctcttgccctacacaggagtggctgtttcaggcagattaccctggagggcaagcacggcttcattcctaccgggttatcatgggctgcaggaacaggggctactgcacaggtccaagccctctcactgggcggggtaactccaaatctccctcctgtccagagctcatggggagggactgcagcttgttttgagcatcagaagccatgtgtgagctggaattggtgccaagtcctccttctaagcccagggctggagcgtcaacagcgcctaaaacccacttttgctcctctgtagagtctgatcttttttctgtctccctggggctaccttcttattgtaaatgtctctgaccttatggaaagtgatttcttagttgtcaggcctggttttagggaattacgctgctgtttttggggatgcatataactttaggtccagcggcagacaaagagaggaaaacagtgggtatgagctgcccagaccccagccacctggggctccctgcattccaacctggggccccactgtcttgcatctgacttaagagtacagggactttttacaaccctggtgctctctggggtacgattttgggtggagggaaaaataatttcatttctttcacatccacccacaatactaacatcctaaaattacagctcctggaataaaacaacgtagcacaactgctttggtgacaaattcattttcgcattgaccgtcctgcctgaaatacttttagaagctctaatgagggattcttcagactcttctatagcaaaagtttcctatggggacttactggtgtgtgttacaaagtgctataaagcttccttccagtgccccggcaggtaagacaaacacatacactgacacacacacacacacacacacacacacacgagccagggacacatgtggccagatgagacagtcaggggattgctacttacacacacgtgcgaacccactgcatttatcaacacatgtaattgaaaagaaagtttcactgtctgatttgagctccattccccaggagcccccaccctcgctccctgctccaaactgaccatgaacaacgacagccccaaaataatatccataacacgcccggccgagagccacgccatcccgcaagaaaaggacttttcaagcttacctgcgtgggtcatgaacttccacggaaaacttcttttctctgaagtacaggttttccaactgtctccattggaatatctggacagaaaacagtgtagtttaaaactcaggaggggctggctcctgggccatcttcccctctctgctggttaactttcgacagctggcagtttccttatcaaaacagagaccgtagtctgtgcctcctccgcctcttgcttgacacacacacacacatacacacacacacgcagctctccagttcaaaaccaggcaatgtgggtgtggattttcctgcaggttccttaactggaacaaaacaagttcttttcaagttctccgccttcggtcggcctttgttggtttggtcgtggcagtccccagcttggcagacttttcccttccaggagagggaggagaggtggagaccggggagagggacccagcagggaaggcggcgggtgaggggagaggagcgagaggagcgagcgctcaggagggagcggtagccatctgcgtggagtgctgaactgagcttcctcccctccagtgctgaaatgggaaggcgttcaaattcccagcctcccatcgggactccacttcctgctcactaatgtgtaagagccttgcaaagggcggaggaggctgggaccttatttcgggggcaggcaactcaagatcacagtgtgagcctgtcaagcccattcttcttgctgcagcacaaagaaaaccaagagttctgtcgcccggaaggacgctgcggccagagtctctccctcaagcttggccagggagggtgagaagtggaatgaaggggccctggcggtcattcctccttcggaccagtgagctcgttaactgagaagctgactgtaatgtttggaagtaattagggctgcatccaattgctccaggaacggggttcctttcattggatgaaaaagaaagttactttaaccctctgggaaatatcacaggaggttcaacttgtgtgcacacacatttgcattaatatttgctggttactgcatcaccttccacatactgggaatttcggtttattttgcggaaagaaggggtaaagtaggaatcttgttcttgtctttctgcggggaacagcttccctgggctcccccctttctctggccactgagttaaatgcttttcagggtcttaccccagagtcctcggacctcaggctcctgaccctctctgacctgctcatgttctgcccaccttagagacgtgatggccatttcctgtatctgacccaccctgtcttcccaggctggggacactgctagtcaatggttggctagtggacctagcaccccatataaaactgggctggaataaaaactgcttctggaatggccacattcttttatcctcacaatctgctctctggaattttacaattattttgtctgcgttaagtactgggaaggagaatatctattatctcttattacagagttgcctcttttgtccccggctcagagtgcatttcactctgaagcccaaggaaattgtatttttctttcttgttaagcatcaactccaggtgggtggagagacactgcaaggaaagcaaatggcccaaagctctatgttggctgacagctttgtgtcagagattcaacagcgccttagcggagtctattactaaaatacacagacccaggtctcatggtcctgtctgatgcttggccactataaatccttccattaaaacacccaaatttcctctctggtccccaggtattatatattcagcgacattccacctgaacttagccagagctacaaaaataccagaatgaacaggttccacgacattggcctcatagcctgggggcagtacactgagcaaagcggtcaggcaggcaggctttgtggtctgactacatctgtttgaatccaagctccactactttttttttctgagacagactctcactgtgtcccccaggctggagtgcagtgtcacgatctcggctcactgcaacctctgcctctcgggttcaagcgattcttgtgcctcaaccttccaagtagctgggattacaggactatgccaccacacctggataatttttgtattttttagtagagatggggttttgccatgttgggcaggctggtctccaactcctgggctcaagtgatctgcccgcctcggcctcccaaaattttgggattacaggcgtgagccaccgcacccaactcaggctctaagctgctggacctgacacaagttacagcatttcctttagcctcagttttcccctctgtaaaatggcaaaaataacccctctaaggtagatctcagcagccacagatcgtagcacagtaccggcacaaagtgaccttagatcttactatgaatcccaaatgctcttacttctcccaaatccttgcagattaaaagagagtaactccagaacaaccagaatcattcttttcttagatttcctaactcaagccctgagttttggatttaaaaaaaaaaatatgtgtgtgctgcaaatccttaaatacagagaatttttctcccagtgcctctcccctcctctcacgtaagggatgtggatggtacttcaatgaaagggtcctgttggctgcataccacggcggtccctcagccgctatcctgcacccgccttgctcaggcaaagtgaagtcttgaacaggatcggccttctgggtgtgcgacctgagggccctttgctcagaaggtccttggcttgatttcctgctctgctgttgatatcttgaaattcctaacaggtttttttttctttctttatatctttattctttttttttgtcttgttgctatacgctttttaaaaaattaatttccataggtttttggggaacaggcggtatttggttaattagttccttagtggtgatttatgagattttggtgtgcccatcccctgagcagtgtacactgaacccacctaatgggtttgatcaaggggccctgcatttccattttgcactgggccctgctcattgtggacttgatcctggccttaggtcctggcatgtactggtgctggcaggctctgtggggtaaggtgcctgccagcctaatgggcaggcctgggaggtggaaccctcaagccctccaagagaaggaaagaaagcagaaccaggtgtgagcacgcttgagaaaacccctgtgcctttcatgggaagcccccctccccacccgatgaagaaccccagagcagaatgctccgaggggttgtttccctggcaactcctgtctcccccattccatgcaaaataaaacacaaaccaagctttgctttaagtgctccctgatgcagttcagcgtggagaactgcgcgtctgccaaagagcccgaacaaaaccatctggactctgctgcatggccccgtctgtggctgctgtagctgcccgtgggaaggccctgcctccagcttctgcccttggctgcgaaccatggagtcccggctcccaggcctatccccgggatgatgcactagacatttttgtggcagggtgcagaacaatggattccccctgatgcttgctttaagcatgaatttttgttttgcaaatgcaatcctgggaaggaagggtaagagtaaagtgaagggatgggtggttttcaggatcagattgttgcgttgagacattagaagggcccaggaatgggctgggtatggtggctcatgcctggaatcccagcactttgggaggctgaggtgggcagatcacttgaggtcaggagcttgagaccagcctgggccaacatagcaaaactccgtctctgcgaaaaatacaaaatttagctgggtgtagtggtgggcacctgtagtcccagctacttgggaggctgagacaagagaatcactagaacccgggaggcagaggttgcagtgagccaggatcatgccactgtactccagcctgggcgacacagcaaggctccttcttaaaacaaacacaaaaacaaaagggtcccaggaacagaagagaaggtgtgcatgtcagaacagtagcctgatctgacttctcttcacttaggagggagggggtgagctagggagcaggaatatgaaggcagtagggaccaggagggtggaagcagctgccccttgcccagggccggggtgcagcttgctggaaaagcatcattttcttcatggggtctggggcatttctgcccatgggcccttgaggcttagaagtcctgcctgttaaatacctcactctgaggctggcagagcaaacacaacaatcaaatcaacaaacaggagatgctccaccttgcctcccctttgtaaacagggtaaggtgggctctgactgagctggtttcggggcagccccgatggtctgcgccacctcaggggagcctcccgagcttgcgctggctcagtgcagccgtcataacccaccaccatgtaaagctgccaacacactctgcctctccgcataaaaacacagcaggcacccataatgatcatcaggatgactgggccggttcccttagggatttgtgtaacgcctatggccaattatatccaaggagctaattaaaaagctaaaatacttagttctaccaataatcaaagaatgtattaattcatacctattaaatcaaggggtttctagtgcacgtcacttaagcatctttaaaaagccctgcaaacatcgttcctttgatcttttggcatccctcaagaagatcaagtgggaaatttacttcttgggtgaaacaaggcccagagaaattaaggaaaactgcctaaggccacacagcaagtaagtgaaggaaccagaaatagaagtcaagggcacctggtccattactctaacctctaactatgttgctttccccaggagtccaccaattagtgggaacagctcttactgactaatggatggttaactttacaagtggaatgatttttacaaatgagctacaatatgactgtaagtagaaagtaaaaaagcaaatctttttcatcctgcaccatggcctggctttccttttatacggtaaatgataacaagtattctttccttctatccttggagtcctggcttcctctagttttctatacagcaatgcttcaatactcagtagctttcaatactcaatgctttccatactccaaagactaaaacacaacgacaactgtgatgaaggacagcctgggccaggcatggtagctcacgcttgtaatcccaacactttgggaggccaaggttgggggatcacttgaggtcaggagctcgagaccagccttgtcaacatggtgaaatcctatctctactaaaaattagccaggtgtagtggcacgcgcctgtaatcctaactactccggaggctgaggcaggagaatcgcttgtacccaggagacggaggttgcagtgagccgagatcttaccactgcactccagcctgggcaacacagtgagactccatttcaaaaaaaaaaaaagagcaacaacaaaaaaaacagcctggatgatctggacttgcgtgaaacaaaacttagaggaaaccaccaagtagtggcttccttgagactatgtctgtccctgttgttgggactggctgatactggatgtggattcttagtttctgacctagacttgccgtgactcccaatgcgatcacaggtcctccacttccctgttctgggcctcagtatcttcatgtatgaaaacaggaggtgggaaacacttatccacggagtgcaaacaaaagtgggtaataaatactgcctttgagacctgaatgcaacagggtccactctaagtacttaatgagcagggaccagttactggtttctattagatggcctgctggattcccacatcctgtatttagctgaaggctggggcagaggaaggggctttggctccactggacttcctccccagccagcatttatggagagctgggactgcatgtggagtggtgggcaagctcccaggacgatgtggaaatagacgcttgagaggaagctcagtctagtggctctgatgcttgactaggactttggagaacctcgtcttcccccgctgcccctgaggctgagtcaccaagcttcttaatgatctccctatgagtaacttcctgtttcatccaggggggctattacacagaatcacagcagccatctggtccacctcctccttgcacagataaagtaaccccagtagagagaggttaagggattggcagaggttaaataagtaattgatgatgggacccacatcttgtgacttctggtcctgggctctttctaacacaccatgaagctctgacaatgaacgagaacaaagttgtttcaagcttcttgttctgagtctctatataagaagaattagactcatggacaggaataatctccaagctcagaagaaaacatacaaactgaaaaactcacttccttatttcatttctgccctttttactttctagagcagactggcacttgcaaatctttagacggatttacattttcagcaaatacaaatgagttgtttcacatctagagggctgcagggcaaaagaaaggagtcactgaacccgaatcagatggaatttaaaatgtgagagcacccagaaagctccaaacctgtgctctcagaggactggatcccatgtgccctggtaaggttttgctattggagcacagccggttctaaggggcaacagaagtaggtatatatacacatatatataatatatatacatatatgtaatatatatacacatatatataatatatatacatatatgtaatatatatacacatatatataatatatatacatatatgtaatatatatacatatataatatatacatatatgtaatatatatacatatataatatatacatatatgtaatacacacacatatataatatatacatatatgtaatatacatatataatatacatatataatatacatatataaaatatacatatatatatatatatatatatatatatatataaaatatactttttttttgagacacagtctcactctatcctccaggctggagtgcagtggcacgttctcagctcactgcaacctctgctgcctcccgggttcaagtgattctcttgtctcagcctcccaagtagctgggattacaggctcccaccaacatgcccagttaatttttgtatttttagtagagacggggtttcatcatgttggccaggctggtctcgaactcctgacctcaggtgatccactcgccttggcttcctaaagtgctaggattataggtgtgagccaacatcctggcccaggtatatgtttttagtgggttgaaatcatatgtcagaggtttttttttttctatcagttttttaggcattcaatatattttactttttacaaaaaaagaagacagaggcaaggcccttgggtttcaggcagcattgaattcccattccctttccaaccattcatgtagtagtcttctactttgtactggactgttctcataggcaagaggaaacacatggtgcctaatacatgtttatatttgtagcgagcttacaatctacttgggaagacaagacatacataaagtagctgtattcatgctacaggaacccatgattcctatagccagagatggaaaccatctctggtttctgtaccaggctttacaaactctatagaagtgccgcactgcaggctgggcatggtggctcatgcctgtaatcccagcactttgggaggcagaggtgggcccatcgtgaggtcagaagttcaagaccagcctggccaacatggtgaacctctgtctctactaaaaatacaaaaaattagctgggcgtggtggctcacgcctgtagtcccagctattcgggaggctgaggcaagagaatcacttgaacccaggaggcagaggttgcagtgagcggagatcatgccactgcactccagcctgggcgacagaggaagactccgtctcaaaaataaaaaattaaaaaaaaaaattagaagtgccgcgctgcctcattcacatatatctcatgcttttgtctcaaataatcagtattcatgactcttgtttactcttgattgttttggttttcatttttaggagcaagaaccctgggtgggaggtcaggagccctcagttctagctctgactttgtagagccctctccatcttagcttcgtcctctctaaaacgagggggtgtgtgggcattcctacattctgtgcatgggttgaaggtcagcattgtaaatccagagaatgtcaagctgcaattctttggaatttaaaaataaagtagcttgagttaaacatttcctaccgatgggagacaatatagaatagcatggattaaaagcatggttttcaacgtcatactgtctgccacttaccggctgtgtattctcagcaattgaatttgtgccttagttttttcatctttgaaataataggaataatagcacttttctcatagggctgctgtactaatgaattaatatatgttaaatgcttaaaatggtgcctggtacatagtgctgaagaaataatatgagactggtgcagtcagtggctcttgcctgtaatcccagcactttgggaggctgacatgggtggatcatctgaggtcaggagtttgagaccagcctggccaacatggtgaaacccagtctctactaaagatacaaaaattagcaaggcgtggtggcatgcatctgtaatcccagctattcaggaggctgaggaagcagaattgcttgaattcgggaggcggaggttgcagtgagcagagacgtgtcactgccctctggcctgggtgacagagtgagactcccccctcaaaaaaaaaaaaaaaaaaagaaatgctatgattgtacacattcccctccgtcaattacataccaatattattgttcaagtaaaacataaaagttatgaatactttgaacacatatcagcacaaagtacaggtttgtgtaatgtttttttgaaagacaactcatatggtgtcatgagcattgcaaaaactgttttctgtgaaattggattgtttacaatgcaaggagaagttggacccagggtccccattcattcgtttgtgctggagtttgctgtattctctttggggttgtttattcctagtcttattggccaattcctccgtccactgcaatcttgaccagagtcagttttgaccattttcctgttatgacttctaatctcaaaacattcaccctgcgaaaaaagtatcccattgtaagatgactcagtcttacacagaacagagtgggctataatgggaacatatcaggccctcccaaatacccaaacaatgacggcagatcactggcttcctaaatgggtctgaggatgtcctccatcacttgcactgaaagaggcatctatcttcttcagagatggccacacacccagcacaggagacaatggctaattcttctctgcagccaggcctaatggaatcaagatgttcttccggccaattgcgtcttcctcattgtcagacaacgcgagctctaaattgatttggttcattcagtgacagatacccagagcaccgggccttgaccccttaatggatggcctctttttaacccatcaaaaacctcttagcttcctttggcttaagagtcattactaggggaaaagggagaaagaggttaacaagtacttgacaagcccattgagacgcaggccattttgtttttctccattggacttgatttccttgtaattttctccctagaggcctctctctgtattattttcttgtgtgtattttggcttttcttgcagaaagacttcaccataaagctttgatgaatgtaaatactttcaagagaagctggaattgtttttcctttcctatcctctgccccctgatgtaattccttccctcctcagagtgccccaagggactggctggggtcagtgggttgaatggctgaagctgtccagtgatttggaatatctgggtctagctttggtttttctagcaatgagcactgtgacccagtgatgtgtggcttaacctctctgtgctccagtctttccttgaaaaaaagccaaggctaattctacctgctatgacagacctcagtgggatgcttcaaaggggaattaatcaatctgagaaatacttggtacatctggggagaaaatgatggtaggccatttcacctgctttggccaaggcatctctttccagattggtgtaaagttatttttcttaaaattttttaatttttgagatggagtcttgctctgttgcccaggctggagtgcaggggcataatctcggttcagagcaacctctacttcccgggttcaagcgattctcctgcctcagcctcccgaatagctgagattacagatatatgccaccatgcctggctaatttttgtatttttagtagagatggggtttcgccatgttgaccaggctggtctcgaactcctgacttcaagtgatctgcctgcctcagcttcctaaagtgctagaattacaggcatgagccaacgcacccggctaaattttttttttttttttttttaatcagggtttgactactttggaggacaggctttagggagaaacctgttgttcttgttttttttttttttttttccaggggtggcggggggggttggcagttggcatttctcttatgcctgctccagctctatccagagacgtggcatcatagagacatcccgatctcctctgtggaggtcatcggactgtacggaagatggggatgggatagaagaaaatggactggcaaccagctctgcagggaaatacaggcatacactcacaagaaacaccgtgctttatcacccataacaaaaagaaaacgaaatgtcaatactctgccctagcgatatctgtgcgaggcaaaaaaagaaaaaagcaagcaagcaaaccagcaagggctttggcgtttgggaataattatttaacagcagcttgtttgcactttggaacacctcgtgcttccagagccggcccatcctgctggggaggggagaggtcccagcgctgctgtctggcagaccttggtttcggtgggcaccagaagcgaggcagattgcttgctgctgcaacttcacgcgtgagctccaggctcccctggttggaaggtgccagggagtgaggcgggtgagcaggcatcaggccaggggtttgtggtttgcttttcaagtcaggctgctgctgggagaaggaacgcttgcggtctcgccagctgctctgcaattgtggcggcagccagcagagataggaggcggtgggcctgccccgctccagcctggactttccacttggagggcctgacttctccgcttgacccgagacatgcagggggctgcggctgggccacggtctctgcagctggggcctttctctctacggatcctcttgcgggagcaatttggtatctgctctgcgaggtttccttccagaaagaagtgaggacttcagatctagactttctgtctttccaggagggctggtcctatttagagctctgctctttcccccagaggacttctgcagtgtgcagattgacttggggaaactgaattgtggggaagaggaggggcggaagcagaggaggaagctgaggtgtctactctgcagcctgccttaaacaactttcttttcaccagggctatcccaagcctcccaaaattcccagccctggtctgggccagttctcccagatattcatacacatacctctgccaaagcaatgatcatgtggtgccgtaatggcttttatgctctaatgtcttcctcaaccagactcaaatttccttgagtatgttttcctggcacctagcatgtacctgggggcatattagacactcaatagttgtctgttgagtgagtgaatgaatgaatgaagagctttttgagatattagctattatgacaactgaagttcagagaggttaagtcactttctcaaggtcacacagacgccacatggtgggaggtgacacttgagccctcctctgtctgctcgactccatgctatttccaccatgtgaggaacctccagtggctgaacccagatatattgttaaaaatacatttctaagctgcaagggatgcgataatagggaaatggcagttagagtcagctcaaggagggacaatggtaagagccacagccgaggagccgtagcccttctttctggcagctctgttagaactgaactctactcttccaaggtgaactggggaagtctacgattccagcagctcatggtctcaaactggaagcctactcccaacctagaggtcagatctttacaaatcatgttgcctagaaattgcctctgtctgcttgaggtggtcaagaatgaccccaggcaggtaggaccccgactgtaacacccttgagccctacttgcaggtgccgattcacagcccaaggcgggcaggcagagttgggcacagcatgttctggctgtgtaaggtttggtgttaaacaggtttacattttccggaaggtcagttcagcctgggcttcccctctgaatcaaactcattaagaagaaggagggggaaaaaaagccttacacagcttcctaagtattggctggttcagcagaaacaagctgttaaaactggccaagacaaagaggttaccagaagtcgacaagcagggtttcccaactgaacagatccttagaagaaagcaaagaagtctagattaaccagaattattcaagggtctgcagtactccagcaattcactcaagatatcctcattactctgtgttcttttggtgctatggacaaaaataaaatcaaaggagagcccagatgggagcaatttttatgcttttcattttttcatcagcaaacctaagctgtaaaaagccagtccctctcctccattctcctcccaactatcttgctctctacgtggagctctctgcaacccttccttggatgagttatattcttttttgagacagagtcttgctgtgtcgcccaggctgtggtgcagtggggtgatcttggctcactgcaacctccgcctcctgggtttaagcaattctcctgcctcagcctcctgagtagctcagactacaggtgcgcgccagcacgcccagctaatttttgtatttttagtagagacggggtttcactatgttggccagactggtctcaaactcctgacttcaggcgatccgcccacctcagcctcccaaagtgttgggattacaggcatgagctactgcacctggccccagttatgttcttaaagcatcaatcaatgaggccactatccacagacataaggaggagtctgtgaaattagcagtgggtcgcaaaaatgattagatattctgctccggcaacttttatccattcaacaaccacgtgttgagtagctaccatggacctggcactgtgtcaggcactgaggatacagcagtgtatcctgcacattcttatgaagggagaggtgggcaaataaataagaaataaataagaaaactacgtggtacatacagtaagttagaagataacaggtttgaagcacaaatgggaaccagggaaggataggacagggtttgccactgttaacaaggtagccagggaaggtgttggtgaagtgacatcgagtcaatatcagaaagaaaccaggggcaaagctgggcagctatgtgagggaaaaggatgactgcagatacagaagtcaggggcgtcatttgtgtgtttgtgtttgctgtacaagtgtagaaaatgctgaaataaacatcaaaggacgatagaatattatgcagccctaaaaaaggaatgcagtactaatgtgtgctgcaacagggatgaaccctgcaaacattctctaagtgaaagaagccagacacgaatggccacataccatatggttccatttctaggaaatgtccagaataggcaaatccatagggacacaaagtagatgagtgggtgccttgggctttggaggatggggagaaatggacagtgacaaggtactccccttgtggccctctgctcttttgcctactgaatcctagtctggattaatcacagatcacaagacagtctttgattaaaactcaatgaaactctggctgggcctagaggctcatgcctgtaatcccagaaatttgggaggctgaggtgggcggatcacctgaggtcaggagtttgagactaccctggccaacatggtgaaaccccatctctactaaaaatacaaaaattagccaggcgtggtggcaggcacctgtagtcccggctactcaggaggctgagggaggagaatcgctggaatccaggaggcagaggttgcagtgagccgagattgcgccactgcactccagcatggatgataaagtgaaactctgcctcaaaaaaaaagaactcgataagacttattatttaaaaggagctagcagtccaggataaaacagaggatccctaatttttagtggcatcccttgtccataaaaagctccccgacccttgtcagatggcactcccactagggccgtcttctcacatctgctctgggggtctctacagagggcaactcacttcttccagcctgtcagcaccaggccggctggggcagcggcacctcagggtgctgttcttctacctcggggatgggcaagcactctctcatagacacggctagtgaggagtctggccagtgatccattttgtaaatgggttttcaaaccttaaacataaactcaattatgtccttaaaaatacacatgtgcatgcctaaaaatacacacacacatacagaggaaattctctcagctgtgacttctactgctcattaaaggtaggactggggttggttttcagtcaaacgtgaggacggagagaggctgcagggcagagctcctctggctcttggccttcctgttcaaaggccagagaagagacacccatgacaaggctgtgctcgctccagggggtacagggaccccacgcagtgcagcagatgccagggtacacctttcagaaagattataagcattggcaaagagatttgcaaaatcccgtgcagcagaaacacctgttggaaaagctagagagaaagaattgggtggttgcatgaactattccactggccagggctctttttttttttttttttttcctgactcagggtcttgttctgttgcccaggctggagtgcagtgatgcgatcatagctcactgcagcctcgaattcctgggctcaagtaacccccccacctcagcctcacaggtagctgggactacaagcatgcaccaccatactcggctaattaaaaaaaaaaattttttttttttttgtagagtcgagggtctctctatgttgtccaggatggtcttgaactcctggcctcaagcaatcctcccgcctcaatctcccaaactgttgagattacaggcatgagccactgtggctggcctcattgggaccctctggtcttcccaatcactggtttgattctcacctacacaggtttgtcatgaattatgctgtctgtgagtaacttcaccgctgcctaactagagccataggatagtaaactggaagttctggctgacattttatgatgagcagtatcactagagagggccatgagcagaccattccacaggagaggtgaaaagcaagggcagggagccggttagctgggtatccacgctggttagatagatctccatgctggttagacagatctccatgctggttagctaggtcaccatgctggttaggtaggtccctatgttggttagctaggtcaccatgctggttagctaggtctccatgctggttagctaggcttttatgttggttagctagctcaccatgctagttagctacatccctatgctgcttagctacatccctatgctggttagctaggtcaccatgctggttaggtaggtccctatgttggttagctaggtcaccatgctggttagctaggtctccaagctggttagctagtttttatgttggttagctaggtccccatgctagttagctacatccctatgctggttagctaggtcaccatgctggttagctaggtctccaagctggttagctaggtttttatgttggttagctaggtcaccaagctggttagctaggtcaacatgtatctttgtttgccagtaaccctggtttgtttgatatcatggaataattattcactaatgtcccttttcatttgtagtggtatcttggtttggatattaaaaccctatggttactaaaagacaaataactttgattccacttatatgagtgttcaaactcacagaaacagaaagtagaatgatggttcccagcagatggggggagagaaaagaggagttattgtttcatgggtaaagtttcagctttgcaagatgacaagagttctgaagatctgttgcgcaatgatggggatataccttactgaactggccactgaaaaatggttatgatggtagattgtatgttgtgtgcattttatcacaatttgaaaaatatcttctggttagatgaccccgaaaatccctcacccacaattgaggtataaagtgtttaggagggtggaaactgagagagcatttttagaaatgttcttgagagggagatgttctgtgaactctctgccacccacagggggaaggtagaagatgtactcttctccttcaacctggaaagagagggttcattagggttacctggagagcttaataggtatcccctgacatcagacgaactgaagcggggatggagctcagatgggagaatggagagatttaactttagagcaagtttgaagctttgattgtcataaagaactggacactctaatttcttaataaaagcttattttgctatttaaagtgactgggtgacgttgtaatacctgggagtgatcagaaaagtcatgggactgcccgtgtttttattgagagataaaggaagagcatgttcaaaggaacagtgggagataaaagagatttgtcagccgggcgcggtggctcaggcctgtaatcccagcactttgggaggacgaggcaggcggatcacgaggtcaggaaatcgagaccatcctggctaacatggtgaaaccctgtctctactaaaaatacaaaacattagctgggcgtggtggcgggcgcctgtagtcccagctactcgggagtctgaggcaggagaatggtgtgaacccgggaggcggacgttgcagtgagctgagatagtgccactgcactctggcctgggtgaaagagcaagactctgtctcaaaaaaaaaaaggagatttgtctattcagtcccaggtggtcgatgttcttattatcctagcaaagtcttctgtcttccagctagagaaaccagatctgttcataggttactaccggttcatggcttcttttggagcgagcgaggctattggatgctcctctgcagtggtttgggatccaacgatagcatttggttttgatttgcttcttcaaattgcatccaaggtcaacggggctccctgagtaatgggaatctgcatctgtagagttatttagaagccagccagtctcagggcggctgctacgtcatctggctgggtgtttatttgcatgttataaataccaagtgttgtgtttgacccctactgtccacacaatcaacgtggctatttatatggcctttctcagtgctggtccacgtgccttttcaggggcagggagaacagcaggtcgaggagaccaggcattgtgtgggaagcagatgaatcctgggagacacatatccccaaagacatatcagctgcagtaggaaaaccgcttttggttatttaatcagatctagcttgagcactggctccacgggagtcaaagacagacgtggggttacctacttagaaactggcattttcccctcctaccactttcttctggaaaactgttgcttttcatcctttctttcattcatgactcccctctggctttaaaatgagcttgctttatttaccttgttttatttctctttgtttctagttttaagattccttcaacatcaggattcccgatcatctcatcaaccgacttgttaagaaaactgaggcccagggaagtggctcacaattgtgtagaattgtgaggtgtcttgactgctgggccaggtatccggcaaataatggcagggggcaggggcaggcgtgcagcaccccaagggtatgtcaggcctggagactgacttcagagacaacttggggagattcttggagcttgagtgtaccccttccaggaggtgcctccaagcttgtcaccctgggagagatttagacctgcccctctttaggggataattacattcctcccctcctgtgactttccagattaattactctcatgcaatagttgctctctaagaattattcacctggacagggcaatgctttttttttttctgttcatagacaggtcaaccttcctcaaaggtgacagtctgacaccagcatgggcttcaacaagaacacaagatacaggctggtgcccttgggagcttggcttacccagaccagtctcgggatggccttcccagggccctgtgggaaccgaggaaccctggcttcccaggtccagtgaccaacaaaaaaataaccctcttcacaaagagacgttgtttgcttttcgaggccatcccacctcttgttttcagtataaatgactgtaacaatatttgctatgtcaaggccaatgccacttttatcctggggaatgagaaactctgtgacaagtaaacttattcaagatggagaaaattagactacatctattctgtgtctcttagtccccacttcacagatataaaaagagaggcacagggaggttaaataaattgctaatcatgactttctaaaataaactggaagtgagttagtgccaaggaagtgagttagcgccaaaattctttggtcaagaaaattcttctttgggggcctgggcaacatggcaaaaccctgtctctgcaaaaaatacaaaaattagccgagtgtgttgcacacgcccgtggctccagctactagggaggctgaggtgggaggattgcttgagcccaggaggtcaaggctgcagtgagctatgatggcaccactgcattccagcctgggagacagagtgagaccttgtctcaaaaaaacaaaacaaaaacaaaacaaaacaaaaaagaaacttctgttttgggtcttggagtggatatggaggtcatgaaggtcgtgaatttacaaaacatctctctctttttgtttagaagtgtaactgctctaggaaagaatttgactttaactcagactaaaatgtcttcataacaacagcaaaacaacgaagtaggatctcatagaaaggtcctcgttaactgcctgtatgcagagcagtgggccttaagctccactgcctgtgctcaagtcaccttcaaggcttgtggaattagattgcggagtcccatcctcagagtttctgagctcgtaagtctcaggcggggatccttagtttgcatttctttctttcttttttgagatggagtcttgctctgttgcccaggctggagtgtagtggtgtgatcttggctcactgcagcctcaacctcctcaaggctccaaagtagctgggactactcctttgtatttttgtattttgtgtgtgtagagatgaggtcttgttatgttgcctaggctggtctccaactgctaccatcctcctgcctcagccttccaaagtgctgggatgacaggtgtgagccacctagcctggccgttagtttgcttttttttctgagacagggtcccacgatgtcgctctgtcgcccaggctggagtgcgatggcacgacctcggccactgcaacctctgcctcccaggtttcagtgattctcctgcctcagcctccctagtagctgggattacaggcacatgtcaccacacccagctaattttgtatttttagtagagacggggcttcgctatgttggccaggctggtctcatattcctaacctcaagtgacccacctgcctcagcctcccaaagtgctgggattacacatgtgagccaccacacctggccagagtttgcatttctaacacatttccatgtgatgaggatgctgctggtccaaggaccacactgagaaccactgctgtagaagataccatgcagcaccgaccagcctctttctccctgcaggactgaaggacgtacgccctctcccggaatcgtctcagctacagagaaccaccttgcccaaggtcaccaccctcttgccaagggggtcacttggatctaatgattggttaatgctggggggagggggtaagtcttggcccccagcctcaacagtgatggcggtggctccggggtcatcctagcttccgagtttcgtctaggttgagggcgccatgttgggactgcatcagcttctctctctgcctggttctgcttcctttactttaccatttgttgttagtccagggcacaccccagtaaacttcctgcatgcgagttcatcttagactgcttcccagggaatcgtatgtacaacactcgggagtagagagtcactgaaacggccctagctctgagagacccctcctgaccagccatcacccctcccgctcttccttactctgatttattgtcttcgtagaatttaactctcaggtctatggccatactgccctgaatgcgcctgatcttgtctgatttcagaagctaagcagggtcgtgcccggttagtacttggatgggagaatttagtgctcgaacactattgctgtagctttctttaataaataaatttgactgcctttcctgctagactgtaagctctgtgcatgcagggacatagtctctcttgttctgcagagccaagagcagggcctggtacctgacaggcactcggacaacacgtactgaacaagtgaatgaacttccaggcaggaagagtcacacatcctcaccaacaactcctagggtttcagagaactagaaagtctaggaatacagagggtgctttcaaaagtgttgtctgtaattggaaatgccttatgtttgtttagtgctttagttttattcatttttttttaaagcagttcattcaatattgatagcaacccatattatcataaacccccatgtggtgggcaagatagagggttgctttgaagcactgggagaagagaaaccggccttggtgagttgagtctcttgctcagccaggcccacatggaaatgctggtatcctgcctcctggacccatggtcctgtctctgtatcatcagcagaagcaaactcaagtcagttgccactgaaactcaccgagtctgactttcccccatgaatactcatatgggggccattttattggagaggatttcatattcaccaccctgtacggaattctaagtgctagctcagtgctttcaggtgattaccattctttttttttttttttttgagatggagtcttgctgttgcccaggctggagtgcagtggcgtgatctcggctccctgcaacttctgcctcctgggttcaagcaattctcctgtctcagcctcttgagtggctgggattacaggcgtatatcaccacgcccagctaatttttgtattttttagtagagacggggttttatcacgttggccaggctggcctcgaactcctgacctcaagtgatccgcccgtctcagcctcccaaagtgctgggattacaggtgtgagccaccgtgcccagccgatgaccactctttagagtttgggattattcttccaaatggagatgattcagccatgtctgatattggtgatttgagaaggaggatgtctaggattgatgctttgagaagacgatctcaattttcttagaatatgattccttttgtccttggagagttatttttaagtagcagattctgggaactccccatgccctccacctcctactcccaaattccgcccccgcccgcccccgcggccaagtaggcctggtctctagacgcatggaaagcgttcaggtccactcagactgtgctgcgatctgaaagaatgataacatacgagaaggccctttggtcctacactgtgaatgagtaaggggcagctgcaaaatgctaagaatgctgagtgcattaagtgaagtgtttctcccaggtgtgcacagggtgtggcttccaaggggaatgtggatgctggaatgagggaggcagccacctaggccggtcaagtcagaggcccagcaaggagaaagcgagccaaggcaaacgccgacagaagagaacgataaatccgcggcgcactcggcagaacgtacaccgcaccgcataatttagcggggcaatgccgccgggagtccacgccaagttaatggaatatttcctgtaaatattattttcccttcctgtctcatcatctcatttcattcaaaaatctttactaatccgggggagtgaaagtaatgcatcaatttccagagccaatgcccctgcttccgaaatacccttaggaatcactggaagccaccgcggctgcttagggacaggggggcaggccgtttactctggttccttctcctaatgcctcagaggggaccccatagtgctcctaattgtgcatctaagtgtacataaaagcccccctaattgcacatcaaataaataagtaaatgctgtctgctgaatatgtaacaaggactgatgttgctatttcttcccaggggggagatttcattaaatctgggctgcatttctaagtgatgatttacagatattgaatattctttacaagggaggcttttttggagttatgtgcttcacaatatttgctctaatgcttaaagcctcagatacagcctgctggaggtctctttattctaactcttagtgtccttttggaaagtcttttctgctttaatgtgtaatggcttccgatgatcagatggctggtttgtctgcaggtctggggactgtgcaaccccctggtctcccaatgcctcagttactgacgctgcaaacaaggcagattgtcccagagattagagctctcaggctttctcgggcttcaatcaatcaaaggaacgtaaggacccctcccctacagagagagccggacgtgagccagattttgtccagacttacttatatctgccctgtgggatcccgattctgcaagatttaataaacaatgcctcaacagatagcatttaattttcattcaaacgtttccagggaagaaagaggtaaaactcttgcttgtaccagcacaactgcccgaaacccgtgggatacccagtctgaggcatgttgctatcgacagtcatttcacacagctggcagttttttcttttctgatggcctagctctctttactccaccgtaaatgcaaactaagacgaaacttgggatttacctccggtgcctaaatgccaacctgacactgtctcattgtctcctgagcccagtaggacggtaatttgtgaaatacggagcctctcacctcagcagcgcttctttctattcccacacatatgcacatgctaaaatggaatgtggtaactagcataaaatagggtacaacaattgctgcaagatttgtttttttggctgggcacagtggctcacgtctgtaatcccatcactttgggaggctgaggtgggtggatcttttgaggtcaggagtctgagaccagcctgactaacatggtgaaacccagtctctactaaaaatacaaaaaaaaaaaaaaaaaaattagccaggcatggtgacacacgcctatagtcccagctactctggaggctgaaccagcagaattgcttgaacccaggaggcagaggttgcagtgagccaatatcgtgccactgcactccagcctgggagacagagcgagactccctctcaaaaaaaaaaaaagattttttttttctattgtgacttttctacttctgtcatcactgctgagccaagacagacatgtaagatcccgtcagcaccgtacttggatgctgcattcacaattgtgaattccaaccgtagccatgacaaaggagagaggagagctacaaagcactcaaagggatgtccccaagtgtcacatagcgtttgagtataaacaggagatcagaagtggggaggaaggcaaagagggagggggaaacatcattgggtgaaggactgaagtagatttactgagagctgatgacgggacatttaatgtcctataaaaaattctacatcttggccgggcgcagtggctcacgcctgtaatcccagcactttgggaggccaaggtggggggatcccctgaggtgaggagatcaagaccaacctggccaacatggtgaaaccccgtctctactaaaaatacaaaaattagctgggtgtggtggcacgtgcctgtaatcctagttactcgggaggctgaggcagaagaattgcttgaaccggggaggtggaggttgcagtgagctgagatcacaccattgcactccagcctgggcaacaagagcaagacttcatctcaaaaaaaaaaaaaaaaaaaattctacatcctatcctcagatagtgtttagggttctgcttgacctcttaaaaagaacttatatatgcaagcaagggctgatattctgggggaggtgcatgcattgtagattctgatttttcttagtcttgtttgctgctttttttagggtgttctgggagctgttcttccatatatgttgttccaaaatactaccgaagttggccttcagaagttcaacgtctctgaactcttctgaacacgcacaaaagccaaaatccagtctgcagggtgtccccacgtgttcagctgttcctgacatgtgtaccctgcaggcaatgaagctgtgattttcgattttttgacaaactccagcagcttgcattgagggctgtgcttctgaaggccaggaggctgtctctttagaaggtccaggtagcagagtgtggggtttaaatgttctctgttctcggagccaccggtgaggtcccttgcgttttactccaacccccaagagcctctaagctccagactggtgattaagtgactgagggcagactctgaaactaggatggcaaactgcttgcaactggagaatgagggacgggctactgttgtgctcttttctggacagtcatcagctactctttcttggtgccttttttgtttgtttgggcttttttgtggggatgaggggtaggtcatatggaaacacttaagtggattctcaaggcggctgctgagcccctgtgagtgtgccgacgggttgccaatgctgttggagctgtgcaggcagtggacgcctctgggctctgaaaaggagagggagcagactcacccctgccactgcctctacttaaacatgggctcttcttgtgttggtgcaacgtgacagagccgctgtaactgggtcagagtgtcagggagggcctctgtctgccgccgggcaggagcagctgcctgggctggagatgcagctgttactgcagaagcctccaggtgcacagtgctgggtgtcactcccttgcctgagcatccctggaggctcgaggtggcagagatgtgccaagcaccagagccaagagggagtggcatcccctggagtgccacccctcccagatggctcacccagccatgaggcccatgcatgggacctcccctgccctcggtgtgcagggacactgctggccacactagggagcctggctgaccttccccatgtctgagttttcaaagcacagagggctgccagtggtggtccttgtctccaggacatcagaatccctgtggggcttcttctgggctcagtggcctggtcggaggtgtaggtgagaaggcctgcagggggctgtggcatctagatgtcccagcagcttcagatgagttcctgatgtacagcggaggttaagagccactggcctggaggcactgaagacagacttttggcttaggtgcggacttgcatcgatatgcattcacacgtgtgtgcatcttttcagattctgagatctgggatcagggtgtggggctttttgtagcctcagaaactgacatgtcccttaaacataacacagatggcctttttataatggtgatgaggttggcaatgcaagaaaaacaaacaggcaccccgtttaggtcttcttgtagctaaggcttcttaacaatggctccagctgagtccacggccttgcctttaagttccatctgacatcttagcggggtgggggggtacccctagaagctaacaaaactaaggttttgctttccctcaagggcttttcaaaggcctggttttttttttggagatggagtctcgctctggagtgcagtggcgaaatctcagcgcactgcaacctccgcctcccgggttcaaatgattctcctgcctcagcttcccgagtagctgagattataggcgccccgcccccgcagcaggcctggctaattttgtatttttagtagagatggggtttcaccatgttggacagctggtcttgaattcctgacctcaggtgatctgtccgcctcggcctcccaaagtgctgggattacaggcgtgagccacctcacctggccaaaggcctgttcttaattttatattcagattgtacattcatttcttaaggagggccccaaattatgtaagcttcagagcccatgcaacggaagctgcctctgcatctcaccgtgatcgtcgtgattgggaaatgaactcttcactcctagctactggtgtgccaactgccaatccaacctcctccctctgtccagtctctggttcagtgatgctttggaaattcttgctactcctgagctccagctgaatgcccaactgcctactagtcacaggcacctggatgtcccatcaagcctgccgcgttgcatgtcctaagctgcactcatccctcatctgtcactcccagacctcctcttctctcagcgtccacactctggtggatcctgaagcctgggagtcattctgcattgccctccttctctcatggcctccctcttccgcctacaggtgatgagtaacacacaccttctcaacatcttggttccccttctccatcctgaagccccgccaggtgttgcccgccctaccctcatcatgtcctggtttctcagtcttgtcctgggtttttcctatccagcctccaagcagtttccggagagtgcttctacgacaatggaaatctgacactatactcctcagcttcaaatagaccgcggctaacactccctatagaggaggaagtcctcttcgcagagccttcaagcctccaggagcctgcaggccccagccccctcaccaactcctctcttttcacttgatgttccagaatgaagggcactgtgtcccctacccctgtcactgtgatttcaggcacactggcctctcccctgcatgcctccccgccccattcctccgtctgcaaaattctttgcacccttgaagaccccactcactctctgcttcctctgtggggacttctcttctccttacacccagttgacgcctgccttcttgaatcatccccgaccctcacacagattcctattacaccactcagacactggctggattatcacacatcttggaggacaggatttatgtctcatctcagtgcccagtgatgtgcttggcacctaataggtatgcaataacttttttttcttcttctttttctatttatttatttatttatttatttatttatttatttatttatttatttttgagatggaatctggctctgtcacccaggctggagcgcagtggtgcgatctcagcttactgcaacctctgccttccaggttcaagtgattctcctgcctcagcttccccagtagctgggattacaggcatgtgccaccatggccagctaattttgtatttttagtagagacggagtttcaccattttggccaggctggtctcgaactcctgaactcaagtgatccacccgcctcggcctcccaaagtgctgggattacaggcgtgagccactgcgcccggccacaataactgtttttttgagcgaatgaatgagtgatggctgtgacagattggtagtctgtccttcaagtaggaatgggctggaaaattctaacttcttcctccaaggccacagaaacccaagtgattttcaataacaacccagtttgggttagagacaatggcctggaaaactatattgaccttttgacatttttaattcatggacctggataagttccattcattattgtaaattctcttatttgatggctgattattcatgcctttggcctcttaattcttatcttgaagcctgttttagcatcttataataatagttataattgactgagccctagctatgcatcctttcctgttttacatacatcaagtgctagctcatcacctcttcactcttcattagaacctcaattagaggaataaagaaagcttaaacatattaataaattgaaccaaacaagtatgaatacttgttagcatgtcctctaaaaagcttagagggagaagagatttcaactgctggattttaattatctctgctgtagacctcaattatgcatgtcggccttggtcttccaccactacaggcaagagagagctcaatgtattgcagccagaattttgttaaaggctttagggagtattcttggcttttgcaagtgcaaaaacagtcaggcaggttgaaaagagaagagtcaggccaggtgtggtggctcacacctgtaattccagcactttgggaggctgaggagggcagatcacttgaggtcaggagtttgagacaggcctggcccacatggtgaaaccccatttctactaaaaatacaaaatcagccaggcgtggtggcaggcgcctgtaatccagctactggaaaggctgaggcatgagaatcgcttgaacctgggaagcaaaggttgcagtgagccaagagcgtgccactgcactccagcctgggagacagagcgagactccatctcaaacaaacaaacaaacaaacaaacaaaaaacaaaaagagaagggttgttctaaaaagaaggagggaagagagaactcaggaagaaaaggcacagaaaattaaaaatgccacgtgggaaaaaggcacagggaaaacaggaagaaaaatacagggaggaagaggtatggatcccacaattgaggaacacaaagccagaaaaggtaagaacagggggtccaattcatttcttgttgcatataaatggataaggaaaggctttggagatagccgcaaaacaacactccctccacccgccaaagagccaggttcttcctgaattgttctcagtcaataattcccccatcatttgctcagcatcttttcttagaacttaaccaccttactgatcaatggagtaaaaatcctcccaacatgggaacattttttcttctatcaatttaataaagaagtttgccaaggacagatgttaactggagagcctacaatccacttagatatgtagtgtgggtttcaatcctattcgaggataaaacagcttggaaagcaatctggaatgacataatggcccaatattgctttctctctgctaaagcaagtgtggttttcataggtttttaatatgtatttcagggtttggactgcataccatctcctttattctccaccgggggatctgaatgatagcactcgcctctaagatatgtttccattataatttttcaatttgttctggtctgaaaagtgtttgtaaatgaaaacagagaaaattcaaacgttgtatccctttcaaacattccattttgggtttacaaggactttgcaaaccgttttctgtttctctccctcttcagcaaataaccttattttctgatcacctttattgagccagaaaatatgtgctggatttccaggaaaccctctctctcttatttttcagcttttctgttttttgttttgagacaaagtcttgttctgtcacccaggctggagtgcagcagggcaatcctggctcactgcaatctccgcctcccgggctcaagcgattctcatgcctcagcctcccaagtagctgggattacaggcatgcaccaccatgcccagctaatttttgtatttttagtagagagagggttctaccatgttggccaggctggtatagaactcctggccttaagtgatccacctgcctcaggctcccaaagtgctaggattacaggcgtgagccagcgtgcccagcctttcagctctttttgacctgcaatctcttctttcagctctcccacctcccctgatcctgtcccagaaatctttgggagaactcagactggcttcaggattcaagagaaatgttacatcatttttccaaagaatacagccctgcccgaaattaaggaacaggatagtccctcaaaagtctctttgcctatctgctctggggagaactgagccagtcatctcaccttaagtaattataacagcttagatttccttagagacagggagaaaaaaaagaaaaaatatttacccagggaactcagatgggattgctgtggagtaatttgtatacactaaaattagcaggagattggtgagcctttaggctgcatggcgttagcatttttaaagtgactcctacgcctgttcctctctggatctgagaggagttaaacccaagcaggagaccagccttacctttcttggcttcactttatcatggtagtcatactggaagatccctttgtagctcaggcccagccaccatggtatgccctgcttgtcctaggatatcaaaaaaagtttgggtgaatatgggactggaggaagtaaacacacgcaaagtggagatttcctggctcaggggcagacgagggaaagggccatttccttggaatggatggagcccacctgtctactttgtttcttaacagatgcgtctgtcattgaaggatactctgttatgtgaagagggtgacatggggagtgccgggggctgggggcctggctctgctcttaatcagccgcacagccgaggtcctttccctttataaataaggaatgaatgccctgcttgcgctctctctctctcttttttttccttctaagaatttaggcattccatgccgggatgctcactcaccacaactgaaaatctgtgagatgtcacacctaataaaaggaccttctgggcagagaaactgtcatcgatggtcagagccagaggagctgtggagactatggaaagtgactcctctcattttaacaacaaatcacagcaaagagttggcccagctttacccaggaccttccccagctccggggagcacaggctggaaggtgtcaccctgaggtcctgctcacccaagatgacagctgggtgccaggcagggttttaggactcatgctgttggacagggtagcacagtggaagctgaaacagtctcaggactgaattagaaacaccaagtccctgtttattcctttttttttgagatggagtctcactctgtcacccaggctggagtgcattggcacaatcctggctcactgcaacctccgcctcccaggttcaaggaattcacccacctcagcctcccaagtagctgggattacaggcacgtgccaccacgtctggctaatttttgtatttttagtagagacaggatttcaccatgttggccaggctggtctcaaactcctgacctcagctgatccacccgtcttggcctcccaaagtgctgggattacagtcatgagccactgcgcctgcccccactgtttattaacagagacctcttgtcacctgagcgtaagttgcaattctatattcaaataggatgattctgagttaattagagcccccagaagctaggattttatagtgagcatatcaagcagcttttccctaattgccaagtttctaaataacctaatacaaccccatagtgggtgtctggaaaacttgaaactggcatcacggttttgaaatatttgtggggcgtgagttatttcaagatgagcaaaaagatgaaaggcaaaagagataaattttgaaatttcttttcaagcttctgggtatatgatttcttaaaactttaaaggtgggataaaatccttgtattaaacccctgcctctgggaagcagctgtgtgcactgcaacggtttcagagaacagaacaagaggaaacccaatgccactgcaacagcagattgaccagagaagggctgtcatcacaccataaaacatggcatcagtgagaccacaaggccaccagacagggagcctggtgcagctgggccaggtttcctggattcgtgctcttttccaaattagtagcagagccattgcttatgctttgaggttctaagtgccaaacacctctactcctttggcactttgaaaatcacaagccctgcttttgatctttaccaaactgaaataaagagcacagttttgaagttttcttggaaggcagaaagcatatatatcagaggcagcctttctgttaagttctagggctgacaaagaaatggaccacaggttgaagcaagttaactggatgaagttttctgtatttgaaattgtctccccgcagtgtgcaatcttcctgaccaagtcctccacaacctccattcccaccaggaattataaagaaaaaaacaatgagggccaggcgcggtggctcacgcctataatcccagcactttgggaggccgaggcaggcagatcacctgaggtcaggagttccagaccagcctggccaacatggcaaaacctcgtctctactaaaaatacaaaaattagctgggtgtggtggcgcatgcctgtaatcccagctactcaggaggctgaggtaggagaatcgcttgaacccgggaggtggaggttgcagtgagccaagatcgcaccctgcacaccagcctgggagacaaagcaagactctatctcaaaagaaaaagaaaaagaagaaaacatataacgagatgttttgatttgtttgcttaggggaggtttggtaaccttcaccaaatgagtctactcaccttcactgcataatagtgaaccccgtaggttgggagagactccacgatgctcatgtagctggaatgacaacacgaagatacacaaacacacacacaatgcgcaaaaggctagttattcagcagatctggtatcatatatatatttgtgtatgtgtacgtgataaagttctcggagtgattatttacttgaaaattaaatggaaacatacaccccccactcccagatatgtctttggagaggaactgaacaatcctgacatacgatatattaacacacacaaacactgtccccatgtgagctgggaaggggccacttactttacgattgcttgacctcttgtctgaccgttcagtttcttgtagtgctcaatgactctgtcttcactgtaattagaagaaaagaatgctgttgttggagtctctaggtcaacagccaagcttcctgccagtaagatatttctcagccccatctcataagaagctccaaggcaccaacagctcctggaaaaatgatttgtcctggagtggtatttccaaactcggtctgagtgctatctatttggatgtagatttactttaaaaagagtctgttttccccacaaaggacttgcattctctttgtcttggatgtttgtttttttttttttttttgagacggagtcttgctctgtcacccaggctagagtgcaatggtgcgatcttggttcactgcaacctccacctcccgagttcaagcaattcttgtgcctcagcctccagagtagctgggactacaggtgcgtgccaccacacctgactgatttttgtatttttagtagagacagggtttcatcatgttggccaggctggtctcaaactcttaacctcaagtgatccacccaccttggcctcccaaagtactgggattacaggcgtgagccaccatggctggcttatcttggatttctaatcaagaaatataagactggagcccaggccgggtgcagtggctcacccctgtaatcccagtgtttagggaggctgacatggggggattgcttgagcccaggagtttgagaccagcctgggcaacacagtgagaccttgtctctatacaaaaatacaaaaattagccaggcatggtggggtatgcctgcagtcccagctacttgggaggctgaggtgggaggattgcttgagcccaggaggtcaaggctgcagtgagctacaattgcaccactgcattccagcctgggtgacagagtgagaccctggctcaaaaacaaaaaacaaaagaacaaaaagactggagcccaggttttgggatcagctccttggaagaaatggtaccgtgggaacaagaggaagcagacagcagagatgacgcatgaatgcccgggctgagctccctggggcccttcttatcctcatcttcccagtcctgttcacacagggcctcatgggggaatggcaggcattgaccttaaccaagtgcccacagcctacctgctctgaatgcgtagtcaggaatggaaggctttccaggaggatggaatgttctggaatttgggcttggttaatatgaaccatgaagcaacaaaagccccataggaatgcttggagaacaacagcaaaccagctaccagaattagacaggcgctccctccttttttgaaatcttaggtgtttttgtttttgtttttgagacgcagtctcccttgtcactcaggctggagtgctgtggagcgatcttggctcaccgcaacctctgcctcccagtttaaagcaattcttgtgcctcagcctcctgagtagctgggattacaggtgtgtgtcaccacaccttgctaatttttgtatttttagtagagatggggttttgcatgttggccaggctggtctcaaactccgggcctcaggtcatctgcccacccctgcctcccaaagtgctgggattacaggcgtgagccaccgcgcccagctgaaatcctagttctaatataacaagaggttagctggctccttggcagcagtggcaagcccgcctcctgagaagtgactctggtgcccatgaggtaggagatacggccgctcccacccccgctttcggaagggcagagccaacctggggaatcccagggaagcaggtgcaggcagaaagccccaaccccacctgctgaggtgtggagtcgacacctcggtctccctggtctggccccagagccttggaacctcagttctcactctcaggtcttactcctcttcaccctccctgtcctctgtcaaagctctgtgaggggagctgattctaggggtgtaccctcgagatctcaatagaggatctttattatctattatttttgagacaaggttttgctctctcgcccagactggagtgcagtggtatgatcctgactcactgcaacctccatctcccaagttcaagcaattatcctgcctcagtcttccgaatagctgggattataggtgtgcaccaccacgcctggctaatttttgtatttttagtagagatgaggtttcaccacattgaccaggctggtctcaaactcctgacctcaaataatctgcccatctcagcctcctgaaatgctgggattacaggtgtgagtcactatacccggccctattatctattatccatcagcccaggatctacctaaagccttcttttacccacctttttgttttcagttttagcaaggccagtgttgggggtaacaggttctacacattcatcacctagtccttgggggtaatttatttctcttccaatgactaccttaacctccaactagtatcttttaattttaatactctggaatttgatgcatagaggacagtgagaggtcttgataaagaagggtctttataaatacccagaatgaggaccagccagctacagggggccttgcctcagttggagagtcacttctgtggggtctggatatcctctattcagaaaggggcagacccagccatctctctccttggctcccacatgccgaggaagttctatatcaagtgtgacaaggtcgtctcctgaagacgattctcgaaaagcatgctccccaagggcaggcccagcctcactaatcctgcagaactgcgtcaggaggttcagcggctccacttccttccatcccactcactaaatcaacagctgccttggcgtgtttcctaccacgtgacatggggttttgtgaagtcgactcctagatccagggtcaagcaactcagtgtagatagggacctttttcctttgcagcactagggagagagggtccctggggtgagttcaggaggtgcaagtcaacatagcactgtagccatgaacacacagaaggctcaggagaaacaccagtgaaagaaagtcaaaaccactgtcagaaagccgcgtcgctgtttaaccacgacatgtcctgaccacagggttctgggtggccgacagcagcagaaatctttgccgccccctgtttgccctgtaactcctgctctctgaggccatctgtgaagccacaataattgccttctccatcctcagcttttcctgcttgttttgcccccttaaacatggtgggcttatcctggaagaacaggctcaatcctgaccgagaacctattctgctcccagcctgtccccacctctgctctggaacttgccagagggctgaagtgctctgagctttgcagacaattttcccataccctagatttgtagcagggactcaaggggataactagcagaaatccaggaagcagagtaagtgctgcctggaggacacagggttacatggaggaaaaaggcaaatgatcaaagctgcctgtgcccaggtcgctggctgggtcatgttgttaagtcaaatgacctctcagcagacaaggggatacatgaaatgcatgggtgatggaaggggaaacagggatggtgatatgatatggttccccgtcttggagcagctgctggcctgctgtgctcagtggtttcggggttaaaaatagatgtccctgcataccttattgaggcgataggggtggtcaggtggtccagcatttacaaactaggcccgcgaggcagaatccaggtcagggtcctgatccctccttgttctgtggccctgggcacatcattctaactttctgcctcagttgcctcctcaacagggaaatcgcacggtgtgaaaagtccatgcttgttaaatgcatggggagaattagcagaaaggcttcttgcaccataactcagcattattatgctgctttcactgctttttaatgacataatgtgactatgtatttcctctcttaattaccgtctcaagtaggttggtgtatgtcatcccattttgcagaggagaaattgatgaaagctacctggctagtcactgcagaggcttggctgggatgctaagacccactgccttggttaccaggctgcagcctgcaggttgcccatccaatgtgcgaactccagcgggggcaggaaagcccccgaagaatggtgagtacagctccttagttcaggaatgatcaggggaacttgacactctgggtaactgtgatgagacgggtaaaaacgtctcccccaccagtgaggggtcctggttaaccttgctgagtggtgaatctgaggcccagagggaaaagcagtgaacaagctgtgtgcacctgctctctcttcattctgtatctgtaggaaggaggaacagcacttatccctctccttgcggctttgctttttaaaaatctatgtatatatagggatatgaaaatagttagctagaaggaatatgttctagcatttgatagaacagtagggaaattatagttaacaataatttgttgcatatgtcaaagtagccaaaagtgaagacttgtaatgttcccaacacaaagaaaagataaatgttcgaggtgatggatatcccagttaccctgatttgaccactgcacattatgtacagatatcagagtatatatacgtgaaaaatatgtacaactattatgtatcaataagaatcaaagtccatataaataaggttgaaatattagagccaacatcaagtagccaaccacagtgaaatgaggtgaaagggcctgttgtggttgtggttgttgtttttcagtagggtatcgtcaggagggtccctgtcattgacttttatacatcgtctgggctgtgatgctgactgtgatacacgtggctcccccgtcctgccacactctcagggcatttaacactggcttgggcacttatgggtctgaaggaggctcagggaaagcgctggcctggtcgtgatggtatgggatgttctgccaagccagctataggtgaagatgttcatatgcagaagagacagagagagtgtgtgtgaagggcgaggtgcctctgggttagtaatcatgtgtgagtacagagcagataatggagatggtgaaggagaaatccagagacacagggaggagagaagaaattcaaaactctcagatgagcatagcagtgttctaaggtttggaaaggaatgaatgaagggatgactaagagacccacaacaggacaggtctcagaggcaaagagattcctccctggtcctctctagttaccttctcacatccccagggccttgaccattggatttttggaagtgaacagccaggaggctacagagggatgaggcccagtggcacaaggaattagggaggtgggtaatagggtccatgaacaaggaaacgggaccatcatttttgggggttcggattgcaagtctcgacatttggaagctgatgcatgcaaaatccctgcaagttaacagattttgctctttgggggcaggttataattagagaaagccatcatttatttacatctatgtttccaaaagaggagtggcaataaaacagctcagagagatgaaattagggacgccagacacggaagggagctcccagcctcgggtcttggggccagctccctagtgatgtggtctctcagagagatgtgatttatgagccagagttgtttttttgtttgtttgttttgagatggactctcgctctgtcgccaggctggagtgcagtggcacaatctttgttccctgcaacctccgactcccaagttcaagtgattctcctgcctcagcctcttgagtagctgggacaccaggcgcgcgacatcatgtccagctaatttttttttgtatttttagtagagacggggtttcatcatgttggccaggatggtctcgatctcctgaccttgtgatctgcccgccatggcctcccaaagtgctgggattatgagccagagttcaatgctgctaatgagccctgcatcaagacatgccctaccccagacacacgaatcagtgaacaactaggtcactgtctggataagtgtccagacaagacaaaatgctcataatccatacagttcagaagttgtcatcaaaagcacttacacaagtcacgtattgtagtttattagaatcaacttggtctgtgctttttgttttgcttttaaataaaaggagttgcaatgatttctgttaggggatcagaaggaacatcagagaagaggtattacagttattaaaggtcagtggccagggcttaggaacccagtaggatttcaaaacattatccaggaatgcaagccctgcccaactgtggcccaaaccacaacctgggagtctttcaaatggcttgaatcattcagaatcagccatttagggccgacagatgagctatggcataatgttacatagtggctaaatcaggagatgtgaaacatcgagggaaaataaaacaatcaatctccctcttctgaaagaagaaaaccctgtggttctcccacgtctcaaaacctcacacatgctgtcatcaaatgacaggtgttccaaaatgaaactctagcagcacatgaaaggctctcgaaggcggtgaagcttccaaagtgaaattttagaaggtattctttttgaaaattaaaaaaaaaaagaagaagaaacaaaaaaggagaggtctcaggcacagtgcttcacttaagtaaatgtagaaaacgggccaggcgtggtagctcacccctgtaatcccagcactttgggaggccgaggcaagcggatcacctgagtgaggtcaggagtttgagaccagcctggccaacatggtgaaacccggtctctactaaaaatacaaaaattagccaggtgtggtggtgcgtgcctgtaatcccagctactcaggaggctgaggcaggagaatcgcttgaggcagaagttgcaatgagctgagatcatgccactgcactccagcctgggtgacaaagtgagatccgtctcaaaaaaaaaaattaattaattattttaaaaataaataaataaataaataaatgcagaaaatggtttcaggaagacacagggtacttaatacagctgcaagtccaggctggcacgtgggagctggtggagggagggtacattcagttgtcctgtgtcccctcgcaccccgagagggactcgctcctggggaagactccaggggtcttaccagtaggccagggaagggtgctccttcagggcttgggtgggaagggctggcagcttcttcaagtcactcctcacaacttcattgctgaaagagagaatgcccagaaacgcactcaccctctgagaaaataatcgcactctctgataccacttgggccgctgtcttgtctgagagaccccacatctgcttccctgttaataaaaagcagtggggggaaggggcgctctctttttatttccgaaatacagatgtaaacgaaggcagaacacaccaagcccagtaaccgcctttcaccgtgcagaaagcagggcaaaacaccttcagatggccaggggtgtcttcccaaaccctgctctcactgaagggcacagagtgaacgcccctgagcagccctcagcaggaatttggggagaagaagtgtccccaggggtcccccagggcaggatcttagaagaagctccccagaaccccgccgttaggctcacagagctccgagaatgggcaatggcgccactgtctccctaagagcatttgcgctgctaatacacaaagctggttttcatggcttacgttgaccacatgctggaaactgttttctgaaatatgacaaataaatactgatggagtctcctttatcggaaatgcttgggagcaaaagtgtttcagattccagatttttttcagatgtttgactgtttgcatttatatacttactggttgagccccacaaaacctgagcatctgaaatccaaagtgctcaaatgagcatttcctttgagcgtcatgtcaacactcaaaaagtttctgagtttggagcatgttggatttcggattttcagattagggagactcaacctgtaacttttgcttttgaggaggctcagaaactacttagaaagtgtgaactgcgttgtctgggccaggctgagcatcccatatcccaaaatcccaaatcagaaatgtgccagaatctaaaactttttgagtgccaacatgacgctcaaaggaaatgcttattggagcactttggatgttggattttcagatttgaggatgctcaaccagttggtatataacacaaatattccaaagcctgaaagaaatctgaaacacttctgctcccaagcatttgggatgagggagactcaacctgtaccattaggcagttttatgcatccggtcctgaaaccagaaattcttttccctgtagactcacacatgcttaggtttggaagatgctttaaactcccctagcttaaccagccttcttcaggtgactgactcctccttacacactcagcaggtctgcatcccctctgggccggaccatctgtggcgtctgcacccacttactacctccagagcaacaaacggcagccactttgggacagttttgatactgaaagagcgtttccctatcctggtccaccaaagagccttggaagccttagccggggttgcaaaggcacatgtaggagcattctgcctttgattcgcagttctgacctgggctatgttagcagcttcgaggttgcttatattaaccaaggcaaatactggccaccaggacactgggcagtgccatctaaaaaggaatgaaacaggtataactgtttcatttttagcaatgtttttcattgctaaaaagcaatgaaacaaggtataactctgaaggaaggaaggaataccgcagccatagaggggagttcctcaggtgcttggatggtggacactccagcacctatgctgctaactggaggatgcattgttccctgtgtccccggcgagaaatacagccaagggcaatgcaatgatcagcgtcaccattggatgcccagtgccactgggcaaaaccacaccaatacactaatacattacgtctgtgtgtggtgataaagaaagacatggaggtttggtgacattagagcactcccagaaaaagcatttttctgttgccctaagaaagaatgaggccaggcgtggtggctcatgcctataatcccagcatctggggaggccgaagtgggaggatcacttcagtccaggagctcaagatcagcttgggcaacatagtgggatcctgtctctacaaaaaatacaaaaattagccatgcacagtgatgcatgcctgtagtcctagttacccaggatgaggttgcagtaagctgtaattgcaacaccacactccagcctgggtgacagagggagaccctatcaagaaagaaaagaaaagaaaagggaaagagaaagaaagagacagagaaaaagaaagagagagagagaaggagagagagaaagagagggaaaggaaaggaaggaaggaaggaaggaaggaagaaagaaagaaagaaagaaagaaagaaagaaagaaatgaagaaagaaagaaagaaagaaagaaagaaagaaagaaagaaaagagagaaggaaagacaatgaccatgaccagtggtgttggtgaatcctgaccatgaccaactagagggaaaagctcaaagtgtaactgtttgaatcaatccatccaagtacttgaactgttagaatctaaatggtaaggccaggacagatcaactgataatcaataagctgaaggtgtttatgaagcccctgccattacatggaaagaattgtagaggatataaaaaatgatgagatatggtccttaaccagaaggtgcccacgatttagctgagaaggtgagaggagctcctacaaagctcactgaccacaggggtgatgtgtgatcatgtcaatccaaacagcagacacgaaagctcagaggaaataaaggcacccttgggctctgatgtaagactggctttgggggaggccgtgcacgaagaaaaggataggaatatcactcttctcctgaggggaacacggacagacatggaagccacatgaactgaagaaatccatcagagtaagaggaatgtcaggggcaatacactgaaaagggcaggtcaggcagagaattgtgaaactttaatgccaggctaagagggttcagcctctcctgggtttgatccaggaggcagacagcaggacagcacctggtgattttcaaacgggtaaactcctagtgttcaggaaaactcaattccaatcccaagtacagtcggtaatttttaagcacatgctataaaggcatagtttcagcaagtattcaattcaccaaacactcgagggcccacactgatgaatttccggatcttctctccctgcgtcatggtaagttccctgagaaaagggatttgatttattggtccatcagcacacagagggctggcttcaatgtgaaaggcacttttctcagatcaactttattggatgaaaccatgagaaaggcaattagtggctccctgaaggagctgaaacttgagtttgggtttcactcacacccatcacatctaaagtatatttggggaaggaaggaactccaggaggaagggatcgttttacccaccaaacccttgcttgttggcaaacaagttgccctgatgacagccacaggtttgatttcctcactgaagcctgcagtgagttctctagctctgctccagggcaaggttacacacaaaaaaatctaacaagaaatcaccaaggcgtgaaacctgtccaaatccattatattctggaagggatccatggcccttcatccttccccgaggacaaatctatagaaatgttctgtttgcttttctgctgtttataaacatctgcaataacttaggggtgtctagccctgtcaatctggccaaactctgtggctgaaaatcagaaagctcccctaatgggaaacttggtcactctacccccagagcttgcaaggctgtggcctaacgaatgttctagaagttcacagcttcctccctcaatgtcttccacttcgacattttccccagagttcatgacatatgataaatgccaacttataaaacaccttaagacagttcactgtggctgcattccatttttagaaaaatgcaaaaaagagctggatgtggtggctcatgcttataatcccagcactttgggaggccaaggtgggaggactgcttgagtccaggagtttgagaccagcctgggcaacatagcaagactccatctctttaaaaataaaaatataaaaaacagccaggtgtagtggtttgcacttgtagtcccagctatctgggaggctaaagtgggaggattgcttgagcccaggagtttgacattagagtgagctatgaccatgccactgttctccagcctgggcaacagagggagaccctgtctcaaaaaccaaaagaatagaaaagaaaaagaaaaatgcaaaaagttctcttgaaaagccagttgctaaactgagaataacatccaagtcttcttatctttaatatgaatcagtttttattaaaaactctccggcagttattaacgttgccaggataaaagtggtatcaatgctgtattggtcttcgatttagtggtgtttttttctttgagatgatgtgcctgtcttctgcagcctatactcctcacgaaacaaggaaagttagaatgatctactggggaaaaacaaagatttctagcaatatatcaaatagagaatttgccacagtgaacagcagatttaaccaagatgccacaaagtgaagggagcaaaaattaaacctgagagggaaggatgaggaaaatccacaatgtgtttgcttttctttaaaaaacctggaaataactttttcaagaaagtccccctgggtcaaatgagatgtatgtaatttgtgggagaaacttgggacgaacagaataggcttagcgtgaaagaattcttgctaaaaccagtcgtttctgtctgcactggtacaaaaacagcagagcacaaaacccagaatgtgatactatcgtaacagaaaggaacagcctgcaattcagaaacagtaatataatgctagcattggcctcactcctccatattttatgagcagaatcatgaaggtcaagttctcaggggcgggatatttcataagtagagtgttgcaggtccttcatccattatcacaattccaaaattcaaaaagctagagtctaagaaacatttcttaacccatctggcggcaaacttcatctttttgcatgaggcaatgatggacctttctatttgcgcccacttgctgcgcatatccatgttttgggctggaggtgttgatgtgtttaattccaggtgctgccctaggccctgcccagggtgtcgtacaagccctgaattacctgcctaaatcctgccaagttctgaattcgtaaacattgagaccctaaagttctagatatacatacgtggctctctgttcctttgttcgatcatacagtggacctagaaaactgagacagattaatgagggaagttatagattttcattctttgctgatctttaagaaatcatgcaggaaacaatctttaatttccctttcctttcttcctcctcctttttttggtaaaccaaggtgaagctgaggttacaacaaagaaaagagagcacctgcctatctccgcccaatcacatgcttttttccccaggtgtgtaggaaagaaatgttgcaggggtcttccaccattgggttgggtcccatctgtctgagaaacttttcctgccatagtgtgtgaccattcacagacaaagggaatcacttggaggccccaggaggtttttccagcatgggattctgaattctgggcatgaatcatagataaatcacatgaatttaccaactgtttgttgggggcaacattgcaaacacattgatgaaatatgtacctttctatttttttttttttttttttttgagacagggtctcgctttgttgcccaggctagagcgcagttttgagatcatggctcactgcagcctccacctcccaggctcaagtgaaccacctgccttagcctccaagcagctgggactacaggtgcttatcactgcacctggttaattttttaaatattttgtagagatgaggtctcactatgttgcctaggctcatcttgaactcctgggctcaagcaatcctcctgccttggcctcccaaagtgctgggattataggcgtgagccacagtgtctggcagtgcctttatttctgttgctaattgttaagttatataagtaaggatttcttccttgattaccgagtctcgttttctggggtgaaatgaagttttatgaatttctaatttatgttaggtataaacatgtaaaatttaagacaaatttaaaaattgtttcataagtctacaatttcaggcaaataattttctcaaaaagcccaagaagaaacgattaactttctatatttctcagtatcaccctttagtttcagaatttccactctgaaaaactgacacagtaccatagccatgaaacgttttgctgttcacaggtataactgaaaatatgatattttaatatgttaaataaatgcctaacaaaagaagtaagctgtcataatacaaaatttcctccttacttggcttctaagcaattcgcatagaatttgaagaatatcatcctgcaaaaaaaaaactaccctatccctatccaaatacttttttatgctttgaaaatgtgaattacacacttgaaagctccatcaaatagactttagtgcacaaaacaaagctttctgtaacaatttataacttttccacttgaacattttgcttcaaattttcacagattctgttcctttcaaaagctcttgctggtgtgaaagattccatctgctcttcaattactcatggcccttaaagtcatttttaaatcatgggaaaacgccacacacaattctttcgtgtgtgtgtgtgtgtgtgtgtgtgtgtgtgtgtaaaacagtatataaatagtatatgagaattatattaatttcaattcttcccacaaaaactcttctttgggctgttaggtgtgtttcaagtttaacagatcaacttttttttttctaggatgtttccaacagggaaatttgaaagtttaggtagatattaaagttactgttaagttacataagttatgttcccaatgttaactatttcagacataactgagtattttttcaggaattatctaaaagcctcagcaagtctatttctcgtaccatatgatcatgccagctgtttattttcaagtggtcaatttaaaaatcgtagggaaatatgccccaaatgatctaataacgatttgaaaccgagctagctagagctagagctaaagctgtggtagtaaaaccacttctgtaagtgcagggaaatgatattggtatactaggaattgtgatttacagactgctgctttagattaatcaagtctccatgttgtagctggcaagaaaatgactttgtcatctttttaaagatcgcaatcgatataaacgtttatattactcaaaaaaagtcttttagaagaaaattagttcttcgtgttcttttcctgttgatcatctaaagctcttcctctagcctgtgacttcccaaaaggcaccctctggcctggcaaaaaagacttacaaacctggaattttcggataccagtaagttgagttcagtttatattaattcacacatggctctttataaaggcagaacagatttcaaagaaagaaagagaaaaccaagaaggcactctttttgggccataaaaatttctttccacactagtgagcacaccatcccatggtttatagaagataaaatactaaaaggtctttacatttttgcctctaaccgctcccctgggcacctaataacatgtggtttgtggaagttaatgggaatttttcagcacaaataaatactccaactcctcttctaaaatggaggtgaaaatcaattttccttgttaatgagggactgctactatttgtttccattgattgggtgatgcattgttctgtttctaaaagcaagctgtttttcattttttgttttaaagaaacagaattagtaacttgcagactgacaccacaggtatacactaagatttcttagccgacactcactaagctctgataagctgatattctctcacttggactggcatttcatcttgtagagatgtcatgtaaactggcccccaagtattcaatcaaaacctgagttcttttcctttggtggctatgtttatttggaatggtgagcctgtagacacagggtcccttccatcgcctcttaagcatgtgatgggttctgctgaacagagccaggtaggcaaaacgtggaccaagaatctttacacggaatttccttactatctgtcttttccaggtgctgtttgctttctggtcttaataaatctcatgctgggagaatcctgttttagtgattagcatcagtatatccagtcctcggaaacaaaaatatttccaggtcccagaagagggtccagagtaacacagctttactgatctggtttcaataaatcttgttaacaaaaaattctatagaacagatgttttttacttgtctctgttaatgtatggacgattctttatttcaaaggtagtgtgattttggcatttgtgatttgcattgtttagcgcaaagcattttaaaagtacttcaatattgcaaaatgctaaacgttattttttattttattttttgagacagggtctcgctctattactcaggctggagtgcagtggtgcaatctcggctcactgcagcggcagcctctgcctcctgggatcaagcaatcctcccacctcagcctcccaagtagctgggactacaggcacacgccaccatgcccgactaattgtttttgtatttttagtggagacggggttttgtcacgttgccctggctggtctcgaactcctggcctcaagcaatccatccgcctcggcctcccaaagtgctgggattaaagacgtgagccaccatgctttgcttaaagttattattttaagaaaatttgcggcacatttttagaaagatcagaagggctggcagaggtgaagtgattctcaaaatcagggtaaggagattggctgataaggttttcagttaaggtcccttatagacaaaaaccaaaaaatcaagtttttgtatgtgatatctccctcagtacagtgttgcaatgagacttctgttaaattaaattagaatataactagaaaattggacgtcctatcagtcgattaaatgaggtattctctgcactgaactttttaaggaagagaacattagtttttctatcataacccaagagtttttaaaaaagctttgaaacagaaaacatcagtgctccattctcaaaaccctgcactgtttacgatgaataaagtatgtaagaatcatagataatgtctgttagttagttggccaatggtcaacagcgattatcgaaagacaattttttgtttttaaactgcatcggttcttgtcttccaaatatttggcccacagctgcctttgttaacagcttggaggctactgaattgtttttaaagagaaatgccaactctactgacttcctgattgtcgacagacatgaggttttttgttttacatgtatatacatcaggaaatgaaatgagattactacatgctgtgctaaggaaaacaataaaagtgaaaaaatgttatttttagataagactatttcctaaacctttagaagtatcgtacaaatttgtcctccatttggtagaatatgaacatgtgtggtctgtatctcttctatggcaggcgatactaatcatctatctagataacagtcattttctctcagcacgctaaacctgacatttcagtgtaaagtccaataagacaaggaagtgagctattttgttagtgggaaagaaaagacagttatgtaagaataagccttcaggcatctgctgagcaaaacagagagcccaaaagaagaaacggaagagcaagtgagtttcatgagaaagagtagctacggttcacagttgtctttatatagttctctttccattaaggtgtatcagcacttttgacttcgtcttttttttatttgagagggagttttgctcttgtcacccaggctggagtgtaatggcacgatctcagctcactgcaacctccgcctaccaggttcaagcaattctcctgcctcagcctcccgagtatctgggattacaggcgcacaccaccacacctggctaatttttgtatttttagtagagacagggtttcaccatgttggccaggctggtcttgaactctcgaccttaggtgattcacctgccttggcctcccaaagtgctgggattacaggcatgagccaccacacccagcccttgacttctcttttgtaaaagcaatccccttttctcttgtacctcaaggaaactgctcccataatttatgaattaatactcattccacataaatgtaatttggatatagtccctgaaatgtaaatatctaggataatagtatcctgaagaaaatagccttttgggaagttttagattcaggacctttcaggctatgaaagagttactttatcttttgtgtgtggccattcatttaaaaggttattggatcctctggattttagaagatctttgagttcagccctagaccctgtgttatatctagaaaagccttttctagggttctgtgtgttctaagctggtattttattaatgtggttcaggaaaacatatctacagtatggaagtcaaagccattcctttaaataaaactgaggttatatagtcatgcatttaataatagtgatagatgcaggaggcatgcagatgcagataaggaaacctgcacagggtcttgcccgggcgtgcctgcaagggactggggcccacatgtgcactaggagaagggggtggagccaccaagaattcatgccttatgcaggggaggagactgatattcaatctgtgaggtgggagcctgttggcaggaccctctctttttttgctgagagccttcttttcgcttaataatccactctcctctcccttcagtgtgtccatgtgcctattttttcctggtcgtgagacaagaagctggattttagttgaactaaggagcaaaaaatcctgcatcaatagcaaaaacaactttctataataaatcataaataaatttatttatataaattacataagttatgagaatgggacatctaaaatacctaatgtttagccactgaaccgaatgtggtcaatttcgacgtgttgggtatcttcccagaagcagatgggaaggaatttggaattacttctattactccacaattttaggccactcaagtgtactagtttctctggacctctgaagatggctttactagcatgggcctgctacagaaaaagggtgtttatcagagactcccatgtaacaaatcacccccaccgtccatggtgtaggttttaggctgtgagataaactgaccttttggataaggtgtctgacctctcccctctcctgacagtgatttctcttcccagacagctgcgcttacaaacaaactgctaggtagcagtagcactttgacaaatggagcacaacccggatcctttgtttctttgaattcagccaacaagctggcattccagaagctcattagggggccatgaattactgtggaggccaagcctgcacttccttctccctggcaatccatgtggccacacgttcccatgatccgtggggccagatcatgctattcccagttcacattccatcccgtcagggtactctcaaaataaataatatttacagcagagttcagagctggcgaaagaaatgtggagggaaaaatgtgagtaagtagactagacactggaatccattggatttgtggtttttaaatcattttttcatgggacttcagaaatctttgtaagtagatatggactggcacttatcaaaaccccaaattccaaggccaaattaatgtcataaaaaagtgacaaataaaaattgtaacaagatttagtttctgtaacctgaaaacattatgtttagcaaattcggtaaatggttactggccacctacaaagttcaaggtctccagccaaagctacttacagtcattatctatttaaaaatttgactaccactgctttataccaaaaacttggagaacttaaataaaaggggcctggaggtctctttatgcaaatattcaaacagagctgaagagatggcatttgagatcagagtcagcaactacaaccccctagacaaatccagtcctctgcttgtttatgtattacccatgaactaaggatggcttttacacttttaactgattggaaaaagaaaccaaaagaagaagaatattttgtgatacatgaacatttatatgaaattcatatttctgtatccataaataaagttttattggaacacaatcaggctcatccatttacttatcctatggggctgcttttgcacttaggaagagttgtgtaattgaaacagagatcgtactgcgtgcaaaactcaagatactgacaatctggccctcaacaaaaaaagctcgccgatccttgttttagactgtaaaataattttttgcttttgctgagatgtctgactgagaacagtcaacatagtgagagctcatctctacaaaaaataaaataaaataattagcccggtgcagtgactcatgcctgtagtcccagcaacttgggaggctgaggcaggaggatcacttgagcccaggagctggaggttacagtgagacatgactgcaccactgcactccagcctgggtaacagaaggagaccttgtctctgaaaaaaattaaaaaataataataataaaaaagcaagcatgagaagtgtacatggagagcaaggagaaagcagttgagacctgaaaaaccagtgacaaagacagccaactacaggtggccaccaacagaagtagtttttgctgcatttacagataaaatccctcaaagcatggggaaacagacaggttcttagatggagcagaggtacgatctgtgtttctttttaataccaatttgctaatttcctgttaatgggccagaaccttacgccttgatgctttcctttcctgttcatgtggttcactctttttgcctctaaaccttgattctccagaatgggctaccctggccttttttttttttttcagaggagcttgatcaaacagaatcccaggaataacgactatctttgagcagatagtcctgctagtggttggctacaccctctgctctgtgcagggtctggtgatgatcacaagagatttcagggcgatttcagggcaatttcagccatactgatcaacatatggtgatgaatgaaataaatgacaagtttgcagttttacagggttattaacaacattcacagattcccagtagttgtctgtttatgttttctccaacacaatatcctaagacagaaggaaagcagaggtggggtatttttatgttgtaacattttcacgaatgaaatttccctgtaagaaagtattttgtcccttgaggggcagggactacattgagagaaaaaaagatgtccacctacttgtcaggactgacaggttatctgcaatcatatttacaccacagtggtgattccagcctctacgagacatttgagcagcctgtccaacctcaggacaatgggcatgtgtgacgctgggcctaatgtcagctttccagtaatctccgggctttgcatgtagtggagaatatctcccttgctattactatattttctccacctgatctatctgtttcagtggacaagttgagagttagatctcatcattaacatataacatgaataaattgtccacctaaaaaggacatcctgattagtttcttttaatagagaagcaagggcttacattttaaacaacacaacaacaaaattgtaaacttacctagaaaaatctccctttgcctcctgtagaagaaaaaattcaacatcagcgaaatacactaagccaatgttagagactctaaagtacattctataatcatgagagtttctctactgaatgagatgagttcagcttcctgcagttatcatcctatttgctgcaggaatacaattaaaactgaatgcacacctttgccatttgaatatgaaatatgaaactaaactctagaaacttatatacaaagtaagtgattcataatgacaaaatgcacatctccacctctaagcctgggtctgacatgttctagattaaagattctaaatatgaacatgtatctggatagaactgtcgatttctagggtcagtttttgttttggtttgtattttatgctagttcccaattatactgaagactctggaggtagggaccagagaaactttagtgaatccagtataatgccctgaacatagtagttgctcagtaaatacttattgaaggaataaagaaatgatatcattttaactcatcttgccactattaagctaatattctataacatctttttttacgttttatttttgcataacctaaagggctttaccttgtctttctagggggcagaacatgattttttggccactaactctagctattcacttggctttctccagggtggaggtaccaaacccaaagaaaatggggtcagtaaatgatctcagtttctcccaggctcaggttaaacacacaacttcgctttacagggattttctgtcttaacattttgaaatactacaagcccctgtttattgctatggtttccgtcagtgtctctaatagctctatgcagcttgtggctaaaaaaaggtaagacgacaaatagtgagtagatacagctactggctatgcctggtaagtcttacttcctttcttctgtgtatggccgtgggacataaagaggaggagaaaaacaacttacctgtaaaatataggaagctaattcaaacaccacttcgctgtcaacgtcaataagctcctgaaaggaaaaagcaacaaacgaagacaagtttggtatttaaccaccatttttttcttttattttaaatgacagctcttcttcgggaggattacttgagccctggagtttgagaccagcctgggcaacataatgagatgctgcctctacagaaaatttaaaaattagctgggcagggtggtgcacgtctgtagacgcagctgttttggaggctgaggtgggaggttgaggttgtagcgagctgtgatagtaccaccgcactccagcctgggtaatggggtgagtgagaccctggctcaaaacaaacaaacaaacaaacaaaaagccttattttctgaggaattgctcagaatccccaatattcatagaacatcttgagtctctgagaccacaccctgaattattcagtcctaaacactcccaacatcgtttttactgctcttagctgggatggactaggggacctgggcctacccgactatctcaagggcctcacctttaaatctttagagaaattaagaggcagactaggccccagcattttacaaacctgtttgttaatgttattaatcactggaatagggatgcttgacaacaaaatgcattttctttaaaaactaaacttcagaactttctttctataaagaaaggctttcttgaaaggctgttttttgaaaggaatgttacagtgggattgtaactccttaaaattaaataaaatgtaaaaatatagttcctcggttgtactagccacatttctttcatgtgctcaatagttcagtgtcgctagtgactaccgtatcgtcagctcagatacagaacgtttctaccactgtagaaagttctattggtcagcaactgttacacagtgtaagtttaacaatgtttctgcctattagttcttcccccaaatacttaattgtgatctagggacgtggtcttcaaagcacttaaacctctccttggtttttgaaaaaattccttttctctctctctctttatatttatatttttgaaatacatatttcaaaatgtatatagttcatatcttttaacagcttttttctttctctgagacagagtcttgctgtgtcacccaagctggagtgcagtggtgcgatcttggctcactgcaacctcctcctcccaggtacaagtgattttcctgtctcagcctcccgagtagctgggactacaggcatacaccaccacaccggataatttttttgtatttagtacagacggggtaccaggttggccaggctggtctggaactcctagcctcaggtgacctgcctgccttggcctcccaaagtgttgggatgattacaggcatgagccactgcacccggccaaaacagctttattgaagtataactaaaacacctcaaaaactgcatatgtttaatgtaaacaatttgatgagtttggacagatgcatacacccatgataccattaccacaaccaaggtaataaacatatcgatcacatccaaagatttccgtgtgtgtgtgtgtgtgtgtgtgtgtgtgtgtgtgtatggtaaaaacacctagctgggcatgatggctcacacactttgggaggcagaggcggatggatcacttgagcccaggagttcaagaccagcctggtcaacgtggcgaaaccccatctctattaaaaatacaaaaattagcctggagtggtggtgtatgcctgtagtcccagctacttgggaggctgaggtgggagggtcccctgagcctgcggaggttgaggctacagtgagctgtaatcatgccactacactccagcctggtgacagagagaccctgcctcaaataaacaaacaaacaaacaaacaaacaaaacctaacaacaacaaactcactaaccatgaggacatgacctaccttcttaataaacttctaagtcttctaagtgcacaacactctctcattatacatagctcacatgttaaagacaaagagaagcctggagtccatcagcatgccagaataatacacaatttaattgatatcctatgtctggtgtcaagcttaagcacaaatatccattttatttttctttccctagtatcacaagatcccatagtggctgactggatgacagagagctagaggtaaaagagatttagagaccagccagcctgaccctgtgcttttactgagaatggaacccaaaaacatcaagggactttgcaaaaccacagggccttaatggcacttaaggggccgggaacagaccccctactacttgtccagtgtgtgacctcccttaggacttacatttccacccaaatcaatagagaatcagtttcagccaatgtattctaagaacaatatctataatccaatttgcttagcaagagtttctattcacttgcattacaagccagactctgattcaaggattgattttttttttttgtttttttttttttttttgagacggagtctcactgttgtcgtccaggctggagtgcaatggtgcgatctcggctcactgcaacttctgtctcccgggttccagcaattctcctgcctcagcctcccaagtagctgagattacaggcgcccaccaccacgcctggctaatttttttgcatttttagtagagatgggatttcaccatgttggccaggctggtctcgaacttctgacctcaggtgatccacccacctcggcctcccaaagtactggaattacaggcatgagccaccatgcccggccgattcatggattttgtaattattttttgagaggtccagaattggctcctgcaatttaaaacaatgcattcaagcacacctggatcttttgaaggagagatatctttcaggctcctttgggcctgggaatttcacagttggatactaatatttgccctggaaccaccttagaagtacgggttaaaagaactcatgagagcctacggaagaattggggacaataattccttacgtttaaccagctgaaagagctttacggcggttggaattgatagaggctgtcggtgctgggatgcggaagaatgtttggaattgcagttccgggattagcaggtcccatcagaatgtaaatcatttaacagtgtacagatggcttcacagaaacactgtccaggatttccacaatagatggtttctactctcactctgtgcgtttccattcccacctgaatgccttggggtgcacttgttagcgtgctgttgtatgtgtgcttttctgtcaaacatttacaccttatgttacagccaatggtcgactgcgggctaatatttaacatctgctgagaggcttatctgatgcgcaactcaaaaccaaccatcagaaaataacacttttaagtgtgaacatagcttttagtttgctatttgattcatccgctaaacgaagatgtctctacctgcgcggaggcgggtaacacgaaggaaggtcttttattctattttacacagcccattatgtggtcccaggagagtatcattggtgaacattaactgtaacataactgatatccacaggaaagctaccaaaaatatccacaggaaagcaccatcaaatatctaacctgattgattcaacttctctctcaccatagttgttctcgggttaagtgagaactggcacctttaactgtggtgacttttcgggtgaaaagcctgaccttgactatctatctcccagtgaagatatcaaaaacaggaggaggtgaaatgtggccagtgggagggaaaatgattaaagattcaagcgccccaggcattgcacatgcttacaaaatctgatggaaagagctgcattattatttctgacctcgcctatttaacatgcattgaatttaaggatcatttcattggatgttctcataggactcaacacaaagaccaaaacggtgtggataagaaccaatctagggtggtgggaagacatcctgagagtctttgcccaattccccaatgtcacttgttcatgatactgtttcccccttatacacctcatccttccaggtggctttatccttaagattctaccacgatggagcagagctctagacttccggcttactctgaaaatttcccatggtacttcaaaacctgaaagctggccgggcacagtggtttaagcttgtaatcccagcactttgggagaccgaggagggcagatcatgaggtcaagagattgataccatcctggacaacatggtgaaaccccgtctctactaaaaacacaaaaattagttgggcgtggtggtgcacgcctgtagtcccagctactcaggaggctgaggcaggagaatcgcttgaaccctggagatggaggttgcagtgagccgagatagcgccactgcactccagcctggtgacagagtgagactccatctcaaaagacaaaacgaaacgaaacaaaacacccctgaaagccaagttccacacaggggagttattagatgttttcaggggtcttcctagcagaaatgtgctcccatatgacattaagaaaatgactctcccttttccttatctgacttctccagtggtccagaggtggcttttcatttattttttttgagacaggatctcactgtgtcacccaggctggaatgcagtggtgcaacctgggctcacagcaacctccgccttctgggttccagcaattcttgtgccacaacctcccaaatagctaggattacaggtgtgcgtcaccatgcctggccaatttttttatttttagtggaagcagggtttcaccatgttggccaggctggtctcaaactactgacctcaagtgatccacccacctcggcttcccaaagtgctgggattacaggcatgagcctccgtgcccggccagaggtggcatctttcatgggtttctgctcaagcagaggaactacactgaaggagaccacacagagtgtgcaaaaatcccatttttttcctgggattctgggctttccccataactgtaactaaggacaaaatgggatcataggaggaggagcagaagacacttcccggaggcttgagggtggcttccatctgccttatgcaggggctgaggtgtaacattcctctgcgcttatgcaatccacagctctgcggtgaagccccccgtgctcttgcggccattggagggaggggtttctgcagtgtctgagctggaatctagcctgggaatcttgggctgtctggtgggcatggaataattactttgagactctagagaagcccagggcgatgctggcaggaggaagtgtaaggtcctttggtgactgtggccactgggtgtgtactttaggcatctgctttccttactactgaataatgcatgctgcttcctttgatctttgagaaatggtatggaaagacgaaccgtgaccgtctgcaggtatgtgtgtgtgtgtgtgtgtgtgcgaacgtgctctgagtaggggtgggaagggctgccccacttcctcccacgccgtgttgttttatcccaggtgactgaactgccgaaggaagaggcctgaggtcatttatcagcaacaccatgcctaacaatattctcagaaagatttccatctgagggtctccaagtgtttctaacaagtgggcccgtgggaaccccaaatggcaggtgttacggatgttctccaagagtcctgagagccggagggcctctttgctcagagggacttggtggtggtctttacatttaaccaagaatcttaatgacaagcagcccaccatggtccggaactgcaggaattccaactctcatgtaagacaaatgagataattccgtgagaaaatgtaattgacaaccatatagtaggtcgagaagattttgacaaggacagtctttgcaaagtccactcggaaccacttgtagggttaggaaagccaccaagcgttttcctaacgaattctcaccagttatcaccacgtttattcttacccacaaaacatctaaagataatagtggcatgccattctccttaagattatttctactgtcccctgaaagtcccatattctggtcttaaccccccaatgccttgaggacatggactgaaccacctgaccttgagtttgattttccttatcagtaaaatggggataacaatttcctttccaattattttactgggtttggtgaggcataaatgaagtgacttggaaatataaaacacactacaagtattagatctatattatttatttctgctgatgagtatctatagataatctgaactccacagttttgcctttgttctttagtatgtcttagcatttataggaaactttactagattttttttttttttttttttttgagacgggagtcttgccttgtcgcccaggctggagtgtagtggcgcgatttcggctcactgcaagctctgcctcctgggttcaggccattctcctgcctcagcctcccaagtagctgggacgacaggcacccaccaccacgcctggctaattttttgcattttttagtagagatggaagattttgttttaaaagagatgggttgtgtgtgtgtgtgtgtgtgtgtgtgtgtgcgtatgtgtgtgtactggtcaccgtgtctgtggtgtattttatgtgtcaacttgacaggccaagggttacccagattatttatttttgagacagggtcttgctctgtcacccaggctggagtgcagtgacaccatctcggctgactgcaacctctgcctcctgggttcgagcgattcttgtgcctcagtttcctgagtagctgggattacaggtgcccatcaccacaaccagctagctttttgtatttttaatagagacgaggtttcaccatgttgccccgggtggtctagaactcctgggctcaagtgatccacccacctcggcctcccaaagtgctgggattacaggcatgagccactgtgtccggccccgagttgcccagattaaacagtttctggatgtgtctacgagggtgtttctggatgagatcagcatttgaatcagtggactcaatagaccaccctccccagtgtgggtggacatcacacaatcctggaaggcttgaatagaacaaaagatggagggtggaggagcttgccccttttttcatttttctttctttctttttgtcccttgctttttgagctgggacatcacatttcatcttctcttgtccttggactgggacttataccactggctccctggttctcaggtctttggactcagccagtggactgacaccactggctttcctgggtctccagcttgcagacagcagactgtgggatctctcagcccccatgatcttgtgagccaactcctcataagaagtctctttctgtatatctatatatatcctatcggttctgtccctctgactaatacaccgtatatcattaaagtgggacacaatgcccatatttagcccaacttgctctcttcttgtggctctatgcctcattgcacaactcatcataattacgcaaatttgcccccggggcaaacaggggctgtggtgcaggatgagactgatgcgatctcgcacaattcctcattcttagtcctctgccagtttttcagcatcaagtcacttcatgtttgtctaatgatccacgaggtgaatgccactcatgctcagccgcaaccctaactctgccgcgttgggatttctcatgctgtccaccccaccgcagacagcccatgtcaggatctcaaggaatcgttcttttattaacttatattttaaataatttttacttttatttatttatttttgttgagacagggtcttgctctgttgcccaggatggagtgcagtggcaccatcatagttcactgcagccttgaactcctgagctcaagtgatcctcctgcctcagcctcctgggtagctgggaccacaggcacacaccaccgtgcttagctaattttagtttttttgtagagatgggggtctcactatgtttctcaggttggtcttgaactcctgggctcaagtaatcctcctgccttggcctcccaaagtgttgggattacagctgtgagctactgattcctggcctggaatcattcttttagagatcatgggcacagccaagacgacagatccatgtaagcttgtttcttgaaagttgaaaaagaaggtacctgtctgtccttctctcataccccctctgtcctacaagggcatgctctaaacctgcagatatttatgttgtcctctagaatgtgattctgggctttggcttggttctcccacctacagatgagatgacgtcatctgatcattagcaaagcatgttgaaggtattgaataaagaccatttatttcaatatcaacaagagtgatagcatttagacctaaactgcaaatgtggcccaaggatgattacttaaactccatttttttttaagagatgagttctctgtcatccaggctggaatgccccagtgtcatcctagctcacttcagcctcgaacttgtgggctcaagtgatcctcccatctcagcttcccaagtagttgggactacaaatgtgtgccaccatgcctggctaattaaatatatttttttgtagggttggggtcttgctatgttgcccaggctgatctcaaactcctggcctcaagccaactgccttggcctcccaaagtgctgggattataggtatgagccaccacgcctggccagcagaggctcccagaccaatttggacaagatctgcaccctcccaagaacacccataaagcagaaattttaagccttttcctttatgtcatgatttgttctcagtgcagtgtaggcaacaaaactcggtgatttctcaggaaatatgcaaatccttgctcccttggaaagtaaccaattaaaaaataattttctgagcatcggctatgtgcctagtacagtgataggccatggaagatgagcttaaaaatccactcagaaaaatgctggtaccaacttctcctccagcctaaagaagcatatttcagcccatctccagatggcaagcacagtcctgtttctttggttatcactgctggggaaggttagtgcttttagacgaagcataattgaaatgtgatgaatgtccctaaagagtgcattgccagctgggtgcggtggctcacgcctgtaatctcagcactttaggaggccaaggaaggaggatcactggagccctggagttcaagaccagcctgggcaacatggtgaaaccctgtttcactttgaaacaaaaccaaacaaaacaaaacaaaacacacaaaaaaaacaaattagctgggtgtggtgtcgcatgcccatagtagtcccagctacttgggaggctgaggcaagagaattgcatgaacccaggaggcagaggttgcagtgagctgagatcacgtcaccgcactccagcctgggtgactgagcaagactccgcctcaaaaaaatatatatattatataatatataataaagatatataatatataatatattatattatatataattattatataataataaatatttatttattattattatataataaataaataaagagttcatagctaatccctttgggcaagggcaaacttatacaggtgaaatattagattcctgatgtaatcttagagaccagaatagatgcccctttatcaactacaccagactctaaggttaagttacctacaggtcgagggttcagggccagctggcctagcaaatttctcaatttctgtggctaaactctctaccaataggagctgtcaatgctggtttacaacccagaccattacaactctgactggacagagggccagccttacaaacattctcttctgaggagctactgtagactttaggccagtttcagcagttcgcagaggctgcacacaaaccatctttgtgtcctatagttcacctggtgaggtaaagcgcctcaaattccacctcattttaatgctaaaagccatcccaggaaggaatgggaggtcatgatgtaaagtgaaataggccaggcacagaaagacaaagttcatattttctcacttatttgtgggagctaaaaatgaaaaccattgaactcatggagacagaatagaaggatggttaccagaggttggaaagggtagtgagggtgggagaggtggggatcgttaatgggtacacaaaaatagaaagaatgaataagacctagtatttgatagcacaacagggtaactgtggtcaataatgattgaattgtacattttaatgtaagtaaaagagtagaagtggattgtttgtaacacaaaggataaatgcttgagggggtggataccccatttgccctgatgtggttattacacattacatgcctgtatcaaaatatcttatgtaccccataaatatagacacctactatgtacccacaacaattaaaaatttaaaaaaccaaagtaaacatggtaagtatgtcaccaatatgtctacctatggcacacacactcgacactccttcgtaactatgcataacttttccccaaacctgctgaatgtgtatgactctattatgtaataagaacaccgtgagtcataaaacccgacctgcccttctccttttcaaaaagagcaccttcagtccacgctggagactttctcttctcagcttgcaaaccggtactgccaatacagccctttctcctagttagccacctcggtggccttttggatgatactgatggtgcatctaggcattctgacagccactcacgccacctaacctcaatcaaggaactatcaaagtacttctctgacgaactgaatggaaaggtctttcgacatgagcaccaattttcttttctctctgaaggtttgcatgtaaagaagattgggagctggtgatttcttgatttctcttatagctgtaagatgtataatttgtggaaatctttctgataaaaaaactaaacagactctgtcattttacgacctatgtttgcaaagctttcagacatcactgtgatgactaatttttgatggtggatcatcttcttctgtcagtgcagaacccagaataggcaggattcaatcctgcagccagaaagtgcgggaagagctgagggtccacattccctgactcgctcctgtctcatgggacaagtccgctgcctcctgcaggggctgatggatgggcaccttcagttggctgttggaagccacaccggaagagggagaggagcagatggaaaaggcttggcgggaaagctgtgccgtcttattggtctctttccagggaacacgcaacgttccaggcaggcttcctgtgagagtttcccatgggacgggactcacatttctaaatgagatgtatccacgccctggccaatgtcctctctatcacccacctgtctccttagtgagttcaagcacatcagaaacactgttggaccatgtaggaatcctattccacacttcctcctgctccaccggaagcacacaatgacagccccgctgtctcatatccatattttaattttctgcaacttggatagattatgactacattttcctgctctattgtataaagtaggggggtggaagggaagagaaagtgagaggggcgtctgctgtggccatgcctcctgcctgctgggaaagagagaggaaggtaggaaggcagtgttcacagtttgggaaaaatagcaaaacaaagccaaacacctttcctcgcctttctgctattaaagagatgagaggttcgttctctgaagaagaacaggaagcagggatgaagtggaccggaagtgcaggaattacatggaattctatacccagtgtggagactgttccctcccgatccctggatgtgggaggacatgtcccaggcaggaagggaagggttttttctggagagaatggagagccagagaggaaagatgtccagataccaagacactgatattcggggttccccagggaaagaaccagcttgcgacgggatcacgtcacagggacacccactgggggaccatcccaccctgaaatggagcatctgcttagtttctaagtgtgaagcaacagaccagggccagcagacaactgaggaagcctcgtacaggaaagagagaccaacacaaataaactggaaaaaaagagctggaaggaaacatagaataataatgataactaatattatcagagtgataagagaggatattatgttcctgaaacaataatagcataatattaaaaaatcagataatataaagaaactcttagaaatttaagaaaaaaaaaaacaacaaaaaacaaaaccataatggcaaaggttagaaagtccagagaagagattaaagtaaatactgacaaagcctcccagaaagtagaataaaaagacagagatagacagctggagagacaagtataggagtgggaggccatgcccagcatttgataaataggaattctggaaagagaggacacaggcaagaggggagaagatgtcaaagaaacaatccaaaaagaacctcacaactaaaaaagaatgcatgtcacgtctccagactaaaagtgcccatcgaacacagagtacaatggatttacaaagacccacatcagggcacccatcctgaaattttagatcagaaggagcaaaaaggagttcccaaaggatcccattgttggggagcccaagggggtgtcacatacaatggataggatggtgggcttttccagagcaacgcctttggtattctgagagaaattttttttttgtatatttctatatccagtcaaactattcattagatacaaagctagaataaagactttttcagatatgccagtatccaaacattttacttcccatatgcgctttctctggattgattgcaggatgttctccagcgaaacaatggtgtaaaacaaaaaacaggaagactccggatccgggaaagagaggacccaatacagaacgagggagaaggaaagaccctgatggggatgcggcatcccgggttgagactctgcatgagaccaagtccaggctggagcaggaggttggaggagtctaagagggaggtcctggaaaaacaacagcagtagcagctgccacagcaaccaaaatcaaaccaaagaggaacgagaactacccgacgtagctggaaattaatattggtagacatctgagaatctgtaggaacttttgggagaaaagtgaagggtatgtagtaactaaataagtgaaagcaaggcaagtattccctttgggtaaaacaatgggttgtctaaaaaacgagctgcaaccacaggatactacttggattagtcacgataatgtcatgcttatgactacggctttaagccagaattatgctatcaccatactaagaaaatggaaaaggaaataaaatgtgggtggttataatctaaatctacatccttattttttttttctttgtgacaaagtctcgctctgtccaccgggctggagtgcagtagtgtgatctggactcttggactcactgcaacctccgcctttggggctcaggcaatcctcccacctcagcctccagagaagctgggactgcaggcatgtgccaccacacccgactaatttttgtgttttttgtagagatgggatctcactaggttgcccaggctggtctcaagctcctaagatcaagtgatcctcccacctcagcctcccaaagtgctggtattataggtgtgaaccactgtgcctggccgtcttcatccatttttaacaggaattcaacaacctaaaagtgaatcaatcaaggaataatgccctgtgtcaattatttatctatatggaggcaaatactagaagaaacagctaaaactgttgcaagtggcaggagttgcagggaggaagctgtttgtcataatcagccttgtggaaccatttgacttttaaatgatgtcatctattactttgatagaaacaaatattaatactttaaaaagtgaatgaaattgaactttgaaaaagcagaaataagcggcttattttaccttgacaacttagattttaacatacagtaggaaccgttccccaagagacagggagggagcagatactaaacctacgctgggtaaacccaggcatccgggtatcagcatcgggatgggttatctgggtctaacactaccctctgggctcttcaaggtccccaaagcaccagggggctgtgtgggtggcacaaagagaatcacagccaagagaaaaaaactcgggtctaaatccaacgagctaatcacatgcctggcatgggactaagaactttgcatgctttatctcactgaatcttcccaagaaggttgtggttagagccttataacatccttgctcaattagagaggaaagggaagcttggagacgttacaggaggtgcccacatttatcccttttaccaaggggcatgcctgggaaaagaacctgggtctgcccggcagcaaaagctgaactgtcaaccactcagcagtgcctttcatgatctttacactgacacaggttacacaggctatccagccatcccccagtcctttgtctctgagtcacttagcctctctgtacctacttcctcctctggaaagccagcgattctcgctccatctcacgcagagatgctgaggctcaaatatcatagtatatataaaaaatttaaatggcaatttgtacaaatgaaaatattattcttgatcacaggagggagacagggggccttgggatgcgacttggtctcctatatcaacttgaaagatgctgtcccttggtcatttgtggtcatttatgtgcccaagcccaaggaaagattttgagaagagagggctgggttctggagtgacattcagcatgtgggctgatgctgtcgggaccttgaacctaaatgtggctggctgcaaaggtgtcatcacctccactcagggcatctgtagtatttagttctgacatttattctttttaattttccctgaatcgcaaagtcctaggcgtgcatgatgttcagaggccttcagtgccagctcagcatttgggacaagacagtactgaacgcaactcctctccctttccccaagcgtctgcccaagtaggctttgggtcaatttttttttttttttttttttttttgagacggagtctcgctctggcacccaggctggagtgcaatggtgcgatctcggcttactgcaacctcagcctcccgggttcgctcaagcaattctcctgagtgagcctcccgagtagctgggattacaggcgcctgccaccacgcccggctaacttttgtatttttagtagagatggcatctcaccatgttggtcaggctggtctcgaactcctgacctcttgatccacccgcctctgcctcccaaagtgctgggattacaggcgtgggccggggacaattttttacttgccctgctggagagtgatttcgcggattcagccttgccatgcatttacttcgctgcccaaggctgccacctggtggagactgctcacctttcatttctgaacttggtttcaaagcgctttcacatttatttaaaaaaaaaacctgatactcttacaatctgtatgtaagttcagtattattatttccactttataatgagaaagtggggtcttagaggaaagaatctaaaagtacctggaactgcattatggtatcttttccctccattcggcaaaaccccaaaatgctgtcctcttagtgtgctgggtttgagcccagtttaagtcctggctcagcaactgtcccaaaatgaggtcttttcacagaactgaatttgatcattaccaggccctccgttattctgaacatttgtaattggtggaactattctgtgcagtgaatgtgttgaggtagttacagaaggaaagtgatggctgatactaccattccaacgtgtgtgtgtgtgtgtgtgtgtgtttgtgtgtgtgttaaggtttaatgggtttttgcaatccctagggcctgagtttaattacattttaaaatccaggcagcggtatctccctagactcctttgaatccatccatcgaacacctcacagacaagcgcacgaggagagcctccctccagggtgcaccatagcctggccattcattaggcatgtgatctcatcttcattcactgggaaaacagggataaaaggctgcatctatctcttgggttgatgggtgcagcaaaccatcatggcacatgtatacctatgtaacaaacctgcacattctgcatgtgtatcccagaacttaaagtataataataataaaacactttttagaaaattcaggacactctgggctttacatttatttatttatttatttaaaaaaagaattggctgggtgtggtggctcatgcctgtaatctcagccctttgggaggccaaggtgggtggatcatgaggtcaggcgttcgagaccggcctgactaacacggtgaaaccccatctctactaaaaatacaaaaattagccaggtgtgatggctggtgcctataattccacctgctcaggaggccgaggcagagaatcgcttgaacccaggaggcagaggttgcagtgagccgagattatgccattacactacagcctgggctacagagtgagactccatctccaagaaaaaaaaaaaaaagacttatttaatcttccatcaatgttctgacaaccaagagaaaattccttactgagatcacaggaatggctaaacccatcaaatcttcacttgaaagttctctggtttgtccatctggaatttgccctgactgaatgcactacccttaaattccttagtagaacttttattctaactaatcctcacacttcaggacttcagacgagtccctgacattttacccaggtaagaggtagaacttaagctgtgaattcagaaaaacatctgttaatttgctttctgtggccctacattagtcagctggtgtatacctcaaactcttccgcttcttgttaattacatttttagagtaaggggaaatcctaggtttagtattatttgatttatttcaaggtagaatgcattttggcctccaaattaattaccatcaataaacttatgcaaaattcactctcaaaaaaaaaaaagcagtgtctatctcaaaaggcgttgtgaagactcagttaaacaattcacataaagcactcagcaacaagcctacacatcatgtgaactttgtaggaatgaaccgttcttgtctattactgttaatgagcagccctaagggggtgtgacggagattgcattcatgagacattcattgcattcgttatgtgcatgccgggggtagccagtggagtgggtgtttcttttttaaaatgttcttttagggccgggcaaggtggctcacacctgtaatcccaacactttgggaggccaaggtggatggatcaacttgaggtcaggagtttgagaccagcctgggcaacatggcaaaaccccatctctattaaaaatacaaaaactagccaagcgtggtggtgcacacctgtaatcccagttactcgggaggctgaggcgggagaatcgcttgaacctgggaggcggaggctgcagtgagctgagattgtgccattgtactccagcctgggcaacagagtgagactgtgtctcaaaaaaaaaaaaaatgttcttttagtcgcagttcctaacctcagtgatattccgcaagtccatcttccccgggaggaggtgtgtgctgtaaaggggtgtaggcattttgggtcatcccacaaaaggagacactacaagcttatggagcaattggatacaggacaaggggctgtcgctctcaattaggaatcatctcttgaacaaacatttttgtaaagaagatacacaaatggccaacagcatgcggacatatgctcaacatcactagtctacagggaaacgcaaatcaaaaccacaatgagatacacctcacacccattgggatggtcatcaatttaataaagcaaaatagaaaataacaaatgttggagaggatgtggagaaactggaacccttgggcactgttggtagaaatgtaaaatggtgcagctgctatggaaaacagtagggatggctcctcaaaaaatgaaaaatagaagtaccctatgatctggcaataccacctataggtatataccctgaacaactgggaatagggtctcgaggagatatttagacatccatgttcataacagcattattcatgataggcaaaaggttttggaaataacccgtgccttttgatgtatgaatggatcaacaaaaggtgatctacacagacaataaaatgttatttagccttaaaaaggaaggcagccaagcgtggtggcccacttctgtaatcccagcactttggaaggccaaggcaggcagatcacctgagcccaggagtttgagaccagcctggccaacatggtgaaaccctgtctccataaacaaatacaaaaattagctgggtgaggtggcacacacctgtagtcccagctacttaggagggtgaagtaggaggatcacttgaacccagaaggtggaggttgcagtgagccaagattgcaccactgaactccagcctgggcgagagagaccctgtcttaaaaattaaaaaaaaaaaaaaaaaaaaaaaggaaggaaattctgatacacgctacaacatggatgaacctttttttttttttttttttttttttctgagacagagttttgctctgttgcccaggctggagtgcagtggtatgatctcggctcactgtaacctccacctcccaggttcaagagattttcctgcctcagcctcccaaatacctagaatcacagacacaaaacaccacatctggctaatttttgtatttttaatagagatggggttccgccatgttggccaggctagtctcaaactcctgacctcaggtgatccgcctgcctcggcctcccaaagtgctgggattacaggcatgagccaccacacacagccaacatggatgaaccttgaggccattatgctaggtaaagtaagccagacacaaaaggacaaatatatatgattccacttatatgaagtactagagtggttaaattcatggagacaaaaagtagtggttgccagtggctgaggaaaacggggaaggggaagttgtttaatgagtacagagtttcagtttagcagatgaaaagagctcttgggtgaatgacggtggggatggttatacaacattgtgagtgtactgaatgccgctgaactgcacacttaaaaatggcggagactacaaactgacttccgtgtatgctgctcgagtgaagggtgcaccaaattctcacaaatcacaactaaagaacttactcatgtaactaaataccacctgttccccaaaaacctatggaaatataaaaatattttccaaaatggttaagatagtaaatgtatgtgcattttacaattttttttaaaaaagaaactgtctcaaagtgacaatagcgtccctttgaaagatgctgctagaccaactaaaaatggtcaaatatacacgtatttggttataagaagctcattcctatctgcaagacctgtctaagttgactggtgcatttgtcatacttgtctaggcttttcacctttgtctcagttgacaaagaaatctttaaaatcaggagacctttaaaataaggttaggaaacatgtccacagagccagaaacacagccatggatcaaaggaatcacattattattattattattattattccttttttttttttttgagatggagtctccgcctgtcaccaggctggagtgcagtggcgtgatcttagctcactgcaacctccacctcccaggttcaagcaattctcctgcctcaccctcccaagtagctgggactacaggcatgtgccaccatgcctagctaatttttatatttttagtagagacagggtttcaccacgttggccaggataatctcaatctcttgaccacgtgatccacccgcctcggcctcccaaagtgttgggattacaggcgtgagccagcgcgccgggtcaggaatcacattattaaatggtgccgttagcttcataacattccatttatttatagtaattaatttataaatgacttctcctaatcaataaaatggcctaaggggtaacactttggaatttccagcttcaaatgatactttcaggtttcagagggaaattgagggagagggagttcctaccttgtagatgcaggacttcgcgttcagaaagaaaagctcaatggtagcattatccttcaggtatgaaatgctttctatatagaacctgaaagagaaaaatggtgcgtgaaccacagaaacagcaggtgcagaaaataaagtgctctcttgagctacatgatttgagatgaaagctggcattccccatcctaaataaacaaaggaaaaaggcaccatccatggtttttctatgattccctagggaggacaaactgtttttggagttttgatagtggcttagggtcacgcctaatgggcctcaccataaccaaagaactgggtctaccaccaatttgtaagaacaaattctaaaactaggcctctgatttctttgtcctatctgctttataattttacataatgttatttgttttcatcacattgcttgtttgtcctaaattgtcattgagttggattttcttttcttctccttttttttctttttttagacagggtctcgctctgttgtccaggctggagtgcagtggtgcatggcttactgcagccttgacctcccaggctcaagcaaccttcccgcctcagcttcctgagcagctgagactacagttgcataccaccacgcctaatttttttttttttttgtagatacggagtcttcctttgttgctcaggctgggctcaaattatctgcccacctcagcctcccgaaatgctggggtaatagatgtgagccactgtgcccagccaagttggatttttaaaagataatttcttcttaatcacagctttctttgaaatggttactactactcccgaaggtggtgaagtgtgatttgatttctgcacattcggagagctatgctaagtgctcttaacactgtgatatgaatgcatattaagccaaatgagaatcggatttcatctagatggagcttatagatattttcaagatgaaacatgctgccattatttaagtttacactaaatgtgcctttataatattgactttggagtttattaaattctttaatgagataatgcgcttgtactgtctaatgaccagccgcactgaaggactaggagttgaaaggaagagaggggaaaggttgaaatgcaacatcttggagggaagaaggttctgagcaggtgtagcaacccttagggtggactaggagggtgctgggtacctggggctcttggaaactgggttcaccaagaagaggcagaaggtgaggaaggtgaaatgagaagaaacaagtactacagttttctagaatagtgttataatctgagggccagaatcctctggagggagtcagagagcagtgatggagtccccagctctgtgtgactcagggcagtcacatcatcctgctgggcttctgttcttcagaccgtaaaagaagaagtggttctctacctaagaagtccactggtttttaaatattggaaactgactacaatgtaaacaacaacagcagcagcaaaaacaagagaccaacatcgtataaggtgaacaaactgatgcccttagcttcaagaagttctattcatttatagtaattaatttaaaaatgaattcttctaatcaatacaatcacctgaggggcaacaacttggaatgtccagcttcaaatgatacttttagattccactgggaaatggaagaggaggagagttcctacactggagatacaggacctcatgtgtctttttagaaaggaaagctcaatggtagcgttatccttcaggtatggtaaaagataaaaggatttatccataattggccaggcgcggtggctcacacctgtcatcccagcactttgggaggctgaggtggggggaatcacctgaggtcaggagttcgaaaccagcctggccaccatggtgaaacccctgtctctactaaaaatacaaaaattagccaggggtgggtgtgggtgcctgtagtcccagctacttgggaggctgaggcagaagaatcgcttgaacccaggagggggaggttgcagcgagccgagatggtgccactgcactccagcctgaacaacagagggagactctatctcaaaaaaaaaaaaaaaaaaagtatcttttaccatacctgaaggataataatgctactgttgcataaacatgaagataaaaacccacgtctgtaggctacatcaagcccatggcccaccagcttgcaacctcttgtctacacactaaataaataaataaagctttctatcatttttcaaatgtgtgcagaggctgctgtgatgaatacaattcaagtttttttgaaattggtgagtgaatttggagtaacttcagacattaaattttctcaatccacagatatcattagtacaattcttatcatctcaggttctacaaaatttggaggaattacgcagtggtcctcatacttgtaaagcctgaaaattaatggactggctgatctctgcccataacccctgcccctgccaagcacctgccccctgcttctggagcaggtgtcttatatcaccaaggtcttcatatagggcccaccatggtctcagaggcacagtaaagttaaacaacttttagttctttaagaatggagagcaaaattgcagtagcaaattttacatctcaaagcaaaataaatttgatatgatttgattttcttttttaaatttttttatttttataatttctttttattttgttattattttttattacactttaagttctagggtacacatgcacaacgtgcaggtttgttacgtatgtatacatatgccatgttggtgtgctgcacctgttaactcgtcatttacattaggtatgtctcctaatgctatccctccccctaccccccaccccacgacaggccccagtatgtgatgttccccaccctgtgtccaagtgttctcagtgttcaattgccacctatgagtaagaacatgtggtgtttggttttctgtccttgtgacagtttgctcagaatgatggtttccagcttcatccatgtccctacaaagcacatgaactcatccttttttgtggccgcatagtattccatggtgtatatgtgccacattttcttaatccagtctaccactgatggacatttgggttggttccaagtctttgctgttgtgaatagtgccacaataaacatacgtgtgcatgtgtctttatagcagcatgatttataatccttcaggtatatacccagtaatgggatggctgggtcaaatggtatttctaattctagatccttgaggaatcgccacactgtcttccacaatggttgaactagtttacagtcccaccaacagtgtaaaagtgttcctatttctccacatcctctccggcacctgttgtttcctgactttttaatgatttgattttcaaaaaataaatctatatcgtagctcatgcctgtaatcccagcactttgggaggccaagatgtgtggatcaactgaggtcaggagttcgagaccagcctggccaacatggtgaaagcctgtctctactaaaaatacaaaaaattagccaggcgtggtggcggacacccgtaatcccagctacttgggaggctgaggcaggagaatcgcttgaacctgggaggcggaggttgcagtcagctgagatcatgccattgcactccagcctgggcaacaaaagcgaaactccgtctcaaaaataaataaataaatctacatcctttgcaaagggcctctggcaaagggtaggcagaataataaaagaaactaaaggaaggaaaagaaggaaaagcgaggaaagggagagaaaggggaggcaaggaagagagaaagcaatcctaacaccagaatattaacagaagcctcctgaagttgacggtggcctttgtgctctaatgatgattttgagtctaaattcatataaggtctgaaataacttaattttcaaagtaatgccatatgtttcttaaaagaatctcatttgctttagttcttaaaaagtaaagagtaaagacatcctgcctcttccaccccaattttctcctgaatagtatattaagaaaatataacgcttcccttttcgtttccactctcatatgatggaaaactgaattgaggtggcaaattctacatctctgtgactgccttcatttccaccaagctctctgttgtctagccataaaaggggcagagaaggtacaggaaataacacgcatattctgagatgaagagaaaaaaaatcacctcctctcgacggaagtggaaagcagtttcctgttaacttttatcaccaagacgacagcctggaaaaccccgtgagctccgggcctgtcatatcattgttctgttaggggagggtatggagctcatcctgagctttccctccctgccagggaacggctgagtcaaaaacgcctgcagagaaacagagctcagacctctccacccgcacgcccagagaggcatggtgcacaccggtggcaccagggacaagagcctcctgggaagatggggagggctgagggtttggattcaaagtcaaaatttttttttcttttttttctttttgagatggggtcttgctctgtcactcaggctggagtgcagtgtgcaaccacagttcactgcagcctcgacctcctgggatcaagtgacctgtctgtctaagcctcccagatagctgggactacagatataagccaccatgctgactaattttttattttctgtcgagatggggtctcactatgttgcccaggctggtcttgaactcctgagctcaagtaattatcctaccctgacctcccaaagtactcaggttacaggccagcctcttcttcttttttttttttaatccagtttttggctgggcatagtttttggccgggcatagtttttggccgggcatgcctgtaatcccagcactttgggaggccgaggcaggcagatctgtctcaaaaaaaaagaaaaaaaaaaaaagtggcttctttttctgattttcaggagagcctcagcagtaggtggcaatgttgcatttccttaactaccagcatggagcagggagtgcttccagggttcacaaagaacattccaggtctctgggtaaccagggaaataaatgaaggctatgtctcggattcagagggtctgcatggacagttccgagtctggctgtgtattgaccatggctttatgatgcttggatgtctgtgaccttgctgggcctggagggactgctggtgccagggttagccaatttccagaccccaagacttccacatgtcaccatggatccagggtccacccctcccaccacctctcggctctcacacccagggccactatttccctgccctcaccaccctagggacacgtaccagacaactagggggcagcccccatgctgcagagcccgctgaaattatttaaactagccaatcccaagcctgctctcccagccttgcccgttcctccccaaagaaaccacaaaaaatgctcttgcccaattgtttcccggctccccaatgcctcccacatggccctgcgtggcatggtgtggccccttctcccaggaactgagtgacaatcttttcaatgtctgtcctctcctcatctgctggcctcaccacagctgaatcataatcagacctacattttaaacgggttttgggggcacacttagcaggactgaatcttagggcatctatttgagtctaaaggaacactctagatggagcgcagaccttgctaagaggtttcctgactccacaagcaacagcccacccaaactagctcagatgatcccgacccgagaatattttatcagagagtctgaaggagaacgaaataggtgctctgtgtttatgtgtttgagcttattaaatattaaacagcctctaaagcctcggggagtcccgtccccttctttgacaagtgaaagcctctggttgcaatagactgaacactgcctagtcagatggcaagggcccagccagatgacatcagccaggtctcctcctccattctccctgctctccctttcccttccccatccagccctgggcacttgggaatcactgaatatttacagcaagtgttaattaaatggaccagtgatttcattttgtaatgaacacaaatgtcacatttaaaatgcctactcttggtggcaaataagagccatgataatgaaagcaataagctgtgagtttctgcagccaagcctctgatgcttagaatctcaatgcctctaaaatcttaactgggacacctagctgaaatatagcaagttctggttagcaggaacctcattttagatccatgccatcattgttattgcgagtgacaggaagtagcagctgctgtctccatcagccagggaagataccaagaatccggcctgtggacttggctgtaaaatccttcctccccgatcggacttctcctctcttatttttttgctgcttgcttcagtttattgtctgtgaaactcaaattctgaagaggcaaatctaatctctgtttattttcttacaaggagttgagatgatcagaactacaggacacttggtagaagaaaatgtaattaaagaataatccagacatgtaggcttcattctgagcacaaagttgtgcctatgaaaagaccacacacacacacacacacacacacacacacatgacgcagacttccttgggttgtgtatattttccttatatttttttcttgacctatttctaaagcttgcctggtgaacaatatcagagagacattgttcccaagccttatagcactaaacaatggtttgcagttcaaggtgctcttggtcatatattgaccgctgctggctgcttataatgtgtgtgtgtgtgtgtgtgtgtgtgtgtgtgtgttgtgtggtgaggggagtgggaagaggtgaggctggacagttaagcagaagtcacatcatgcaagtcacgctaaagatgtccttttctgaggataatgggaagctggaaaaaaattatgagcaaggatcagatgagaattctagaaagatgctcagtgtcttcatataggggagtttggaaggggtcaaggccagacgcagagatgaacaaggagatcttgagtccaggagaggtttatggaagccctaattactattaggctgtgtatggagagtaagagatggatagggagctgtttaagatgcaggaataacagcgagtagtgactgagggaacaggaggaggcaagcgggagggagcggtgaggtcaaggttgactcccaagtctctggttttgggggctgcaggggtgatggtgcccatcacaaagacaaggaggtgacaacgaaaggggagcacatttggatgcagaaagacgacgacatcattagattccagctgcatctgtgaggaaatgccagtcagtggagatggcctggagctcgggagagaggtcaggactggggcagaggacggagagtctccagcaaagagactgcagtggcagctgtggatgggggtgaaatcacaccaggggaaggtgcagggagagaagacaagcaagacacgacctcgtggacaccagggctcaagggacagcagagcagagcagggaacctgccccgagccagggacagaggggacaaagaggaggtggcccaggagagtgtagtgccacagagccgggggaactgaaagggagcatgttcgaatgagcccagagccacagaagccacatgggagcagggcagaagcacgcctgtggagctaggggcgagagacctccagtgaccagggggtacgatggcaccagaagctggacgaccacagaatgaggaacgagaggcctgtggggagggggtgacagcaagtgcagacccatctctcggcggttgctgtgagcagagcagaaggggtagcagagggcactggctggaggaggctgtgcatcacagaggacgttttcttcagttagattgggacgtggtcacaaaggggaggaatccatggaggagaagatagagaaaaagagaggaaaggctcgagggagaagctctgtgaggtgacagaagggactgggattgaggtacacgtggatcagtgcgtgctggatgatgggctaagggtcttcctctgagacgctcatgcatttgcgtgtgtgcagtgagtggactgagaagccacaaaaacacaattaaagatacaattaagtttgtggataaagaagtaggactaggagctccctggtgctggcttttattttctctgcagaaacataagcagcaacatcttcttagagcaaaagccttgagtatctgggacctgaagcaagaggtaaaaccacagtggggaacagagaccctgagcaggcacccctggcagaactggctagagatatgatgatctgtgtggggttcatcacaataaccatgaaccaacctgaagttgcatgaacattttcctgaacacactcagaagctcgggggtagaaataaaaggtgtgtgtgtgtgtgtggcaggaccagtccaaccctgcgggtgggtgtgtgtgtgagagaaagggagagagagagaaagtgtgagcagcaaagggaggtgtggtccagggtcaggaagtagttggaagggtgcacaatggatttgcactgaattggccaaaaaataggacaggcagggctgataggatctcagaagctggaggaaatggacgcgaaattgcctgagaacagggtttatcagttttgttcgctgctctgtccttggctcctagagcagtgcttatgccaagggacatctgtgagcccataaatgaaggcatggatgatgatgcagaaacagcccaggaggagcagtgagcaggctgctgcatgctacagctgggatgatggtggatttgggcttgtaagtctcgggagtgacacagctcagggtgatgaccaggtgcaagtggaccctgaagttttctttctaggagacagaaaagcacagttcaaagaataccttccggcgggtctccacagtgtcagataatgcagaaaatggcaagaccttctcaagtgagaccaacagcagatgtctgaggtcctgaaaattcttgctttaccatttgagatggctcttcctcctccagtgtggtatttccaagatatccagtgtatcccttcagagtggcagcctgccaagacctgtgactgtgattgtccctgtgcaggggcactctgccaggggagctctgggttgggtagtgctggaaccaggctggcaggcctggcggtggctctgtcactcatggtggtgtgcacttgtcctgaacaccatctttgcaggaggatgctggttctgcaaacatggccaagcgtgggtcacaaagagggctggggtcgccgcatttgacttcgctgctcctggccctgcctatacagggaacagtggagacctctggccacaggtcttggcaggctgccacactgaagggatacacaggatctcttggaaatgccacattggaggaggatgttacttttcccctgtggagacagacagcatgcagtaggggaggacagacacaaggattggagtcagacctgaccgaacagatgagacctcatctcgccttcgtaacttattagccatgctggggaagaatttatggaccatcctgggcccccatctccttctttttaattcggaataatcagacctgcttccagggttgctgcaaagattaacaatcagccttagcaatggacaggtgctgaataatggatagttcccgcctctccagtctttatcctttttgggtaattattaagaccctgaagccacctgggatcattcctggtgatttgctggttgaaaaactggatggaccaggcccctcttaggctgaatgatgggtcaatgaaggcaggatctgagtcctcccttccactgtccccaaaacctcctgcagcctgatacttgcctcagggcctctgcagaggaaatgcttatagaggagatgctatctggcttcgtggatggagaggggttctgagttccaattcatgttatttaatatatttgggtcttatattttcctaatctgttgaatggaggtgatgattctgcctggtgttttgcatatgtattatatcagaagaatatataaatcccaaataatagcccaacctgggttactcagccatgcagtgttagtacctccattctctgactttctaaaatgtaccttcaggtagttagttatcttttccatgaccctctgtttctttttttttttttttgtgagatggggtcttgctctgttgcctaggctggagtgcagtggcacaatctctgctcactgtgatctctgcctccctggttcaagtgattctcctgcctcagcctcccaagtagctgggattacaggcatgcaccatcattcctagctaatttttgtatttttagtagagatggggtttcaccatgttggccgggctggtctcaacctcctaacttcagatgatccacccaccttgccctccgaaagtacaggcatgaaccaccatgcccagcctaccatggccctcttttatcaggtggctcgattctgctttgccaacgaaggctacctagacatgtggtatgtagatgtaatatatagacatttacaccaaaggagaaaggatttgaggaatctgggagtcaggctgcgtcaagatatgcaggtgccatggctggagtggggaggctgctcagagcccaaccgtgcttctgtttagaaacacactggaaaggtacccagctggacagaagttcttttatggactcaagcctatttcaagttctgggcttttgatgaagatgattctcttaccactcctttggagaaaactgcctgtgagcatccctaggcagatgtcaggttataaatagaggattcttcccaggatgaaaagcaaggtaaagagacggaattcacctatatagagaatctgcctcctctcttagagaaaacaaatgattggtgttttgttactgcacttcttggccagctaagaagtgggaactcagggtagtgagggtgctgggatcctctgtggctgggaccctggtgatgagccccaccccacccttggaggctgcttcaataggtcgactgactggtgagggcctgagttcaggtaataaggaggagagggcagtacagagggagattttggaagcagcagcagagaattaatgcacataaaaattctaggttgggaggccgaggcggatggatcacctgaggtcaggaattccagaccagcctgaccaacatggtgaaacacggtctctactaaaaatacaaaaattagctgggtatggtggtgggtgcctataatcccagctgctcaggaggctgaggcaggagaatctcttgaacttgggaggtggaggtcgcagtgagccgagatcatgccattacactccagcctgggtgccagagcgagaatccgtctcaaaaaaaaaaaaaaaaaaaaattaaaaaattccaggaagaagacagaagacttcaagatgtgtagcctatgtgactgagtggatgacgatgccacagacttgatgggaccatggaaggtcaagggaggagagagaagataataaatttggctttggacctgctgagtttgaagtactcaggtggggctctgcaggaaacaagtggaatgtgacacttccagaaagatctgcttccataggagctggagaaggagcacattctgccagatggcgtgtataaagacatagtggagaatggctgtccctaaatgcggatttggaaattcttctctctaaggagtgttctttgaggttcttgctttggccgaccatcaatggtgatggtggaagcgtctattatggctacggatcagaagtggatgttacatctgggtcttcagtcatcccattccccaattctctctattgctagcacctatttaacctctgcaatgctaggttacctgcttttatgcatagaagacaggcttgcagtgatttggaaagatctgtgtatcttagagactgacacttccaccaccaacgtcaaggtgccccaagctctcctgcaaggacgtccacaaataattcagacacttggaaaaaacacctactaggcagccaagcccaggattttctcctcttggctaatgttggtgaacatcaccagggaggtggggagagcctgatatatggtaaatgcactcatccacctgcgatgacaggttaatgacctgcttccatgcaactggagtcctgcctgataccacctgcccctcccagaggaattgttactatttgctttatatggttgctttgccataaatctgagaaactgtatacaccattaaagagaatatggcattgaaatcatccccatcagtaatggaaatagctaagatgagcttggatatgttcacagctgttaaacaaatcaaaaacgcattaagcgcaagttgaaatttactctgccagctgaggaaaagtcatacactcgagcctgttaagtggaccctttaactcttgtttgaagcccttctaatgccttgtgtggcttaaggatgcctatgtctggaactgcattcctgatcatgctctttaggaatgacagaattgcatatcatttgtatctcgctcctgaatttctgttagtatatttcaaagaacagagttgtatggcatgggtgtaagtgttagtgtccatgtaaagactgaggcatcagcacttaatgcttctgtaattgtgttgcaatcaaggttctggacagaaagaacctggtgcctccatagactgggtgtttcggagctgctggactgggggctcagattctgactttgccaccaattcagactttgcccctgaacccctgacctgcccagcctctggcttctcacaaccttttgcaaacggaagtggtaagtcctgttgtcttcataagacagctgcaaatattaactatttaaatcactatagcccacaaatcgttccctttgcaagcacaaaacaaaatttcttagactagatttctgaacagaaaaatgcctattgtttctgaaatgttattaagctgtatcctcccttggcaggaaatgcagatgggcctgtggtttgctgctgggtttcgaccactcctatttgggataaactacccaggtttcacgagattcaagtggcatcccctctaaaaggaaagaatacaaaggcttttgttatgtagtttcaaattgcccccagaaaagaatcccacggcctgtgctataagatactcattgtttgagatatgtgaccctccccaaaagtgcagaaaaaagtttttctcatcattccacacaagcatcctagtgcaaatgcataatacacacatccttgcacactcacaggcacaccctgcaccctcgcaccccgcctttccatctatgaggcatgcagctctactacaacctttatccctggcaatgaaccaagacaaacttgagctctctttccttggaatcactctgccctcccagacttccctgataaagaacacaaagaagcaaaagtatagacaccaggtgtacatacctgacacaaaagtataaaaccacgggtcctgactttttagggaagtcatgttccaatactcttcgatctagctgaagccagtttaagtgtcccctgaagaaaatagagacaaattggttaggggtttgcattttgcagaagtttttttggggttgaaggtatatatgaagcagaacgtgctggatcgtagataaatttgaaccttcaccttatttttaatttttttttagtttttatttttttgagactaagtcttgctctgtgacccaggctggagtgcagtggcatgatcttggctcactgcatcctctgcctcctgggtttaagcgattccctgcctcagcctcctgagtagctgggactacaagcatgagccaccatgcccggctaatttttgtatttttggtagagacggggtttcaccatgttggtcaggctggtctcaaactcctgacctcaggtgatccgcccacctcggcctcccaaagtgctgggattacaggcgtgagccactgtgcccggccaccttcaccttattactagcttttcagtattgaagaacccagtgggattaggtaggggataccgagtcagcagtggatactgtgtggtgtgaggggaagaataggaactggaaagtgaagggattgagacctgctgtttcccagggaaacactgaaacgaaaatgtaatcagaactctccttcttgtcctgaaccgcctttccaccacactcccaggtgccttttttcctgaaggactgaaagcacacttgaaaacatgttagcaatcctcacgacatcttgctggagtgaaaagcaaatcacacacagtgtctgaaaacgttaaacttaccgccaggggcagtggctcatgcctttaatcccagcactttggaaggctgaggcaagagatcctcagaggggaaccactttccaggcagaaagaccagcccgtgcaaaggccccggggtgagggaggaccccagcgtcttagtgtcctgtgagtggaaagccatgaggctagggagagccctgggggccatgtctcggaggctggtcttggaagagtggggcaaagccatggaacaaccaagctgaagaatcctctctttcctttccctcctctctgtatccaatgtcagcccatcatcctggagaagacagtcctataatcactttatggagtaaagtcacatggaacagacccaactgaccccactgcatttcccccgtagctaatgctgtgtggcatgtgtgcaagactgtggataatgagaaacaaaatctgtctgcatcattgtctaaaaacgcttgttcctctcagcacatgcttaaacctccaacaaaggaaagagagaaaacacacaagtgacttccaacccctttttgaggcttcactcaaactgcacctttcgcacaagaaaaaaaaaaaaaaatccccctccacaaagcccatacctgtggctatacggaagacttttggatctgccttagaatagtgaccacctgaagaactttggcctgtttttcctctttctaagaatctccagttggataaaaaaattccattaactttatctttttattaccttgctctgaatataggaaaagtaaaaaaaaaataatgaaagggttgggcgcagtggctcacgcctgtaatcccagcactttgggaggcgaaggcgagcggatcacttgaggtctggagtttggtatcagcctggccaacatggtgaaaccctgtctctactaaaaatacaaaaaattagctggacctggtggcaggtgcctataatcccagctactcgggaggctgaggtaggagaatcgcttgaacccgggagatggaggttgcagtgagctgagatcgcgccattgcactctagcctaggcgacagagactctgtctcaagaaaaaataaataaataggacgggcgtggtggctcacgcctgtacgcctgtaatccccacactttgggaggccaaggcagacagatcacgaggtcaggagatggagaccatcctggctaacacggtgaaaccctgtctctactaaaaaatacgaaaaattagccgggcatagtggcaggcgcctgtagtcccagctactcaggaggctgaagcaggagaatggcatgaacctgggaggtggagcttgcagtgagccgagatggcgccaccgcactccagcctgggtgacagagcgagactccgtctcataaataaataaataaatggaagagagtattgtaagtaaaataacaggagcaacttcttccagaaagctgggataaattctgttctgactagaacacaagatcaggaaacagaaggcctgggtgccaatgtcatctctgcccatgcctgataatgccccacaggttccatgatatttcaaacttctgttccttagctcatgctgttccttcgtcccagtaggcctttcccttccttcttccccagtgaggtccggcccatcccgcaggactcagctctcacgtctccgctccagaaagtcttcccacaccacacaccgggtgggatgggggggtcctcctccgacccttacagcacccaccctaggggctcacccatttctgcacttcccagtctacagaacttgctctctatgcattcattttccccagctgactttttaaaatttatttttattttttagatggagtcttgctctgttgcccaggctggagtgcagtggtgtgatctagtctcattgcaacctccgccctccgggttcaagtaattctcctgcctcagcctcctgagtagctgggactacaggcgcaggccgccatgcccagctatttttttgtattttagtagagacagggtttcaccgtgttgcccaggctggtcacaaactcctgaactcaggcaatccacctgcctcggcctcccaaagtcctgggatgacagaggtgaatgactgtgcccagcaccagttgactttctatatctggaaaatgccacgagatctacctcatgaggagaaagtgtgcatgtctggtcaactggaaggtgtcagacaaattatcttaagctgcaaccacttccttcctgcctctgaaaatgcccccaactctgtgggtcttctcttggggctcagcctcctgcgagtacaccatgtgtatggcatgcgcctggccttcactcatgctgcctctcctccttggaactggagaactgtctctccatccctttatctgaatgtttagccattgtgcaaggctgagttcaagtcttactttcagtgaagtcttccttgattgcctaagtctggggtttctttcaaacttctccagggcttctggtgtgtgtcatcttcaaggcatttggcataatcttgtacaattagttatttttaaaaaatatgacctaggctgggtgaggtagctcacacctgaaatcccagcactttgggaggctgaggcaggcggatcacgaggtcaggagttcgagaccagcctgaccaacatggtgaaaccccatctctactaaaaaaaaatacaaaaattagccaggcgtggtggcacatgcctgtaatcccagctactcaggaggctgaggcagaagaattgcttgaatccaggaggcagaggttgcagtgagctgagatggcactactgcactccagcctgggtgacagagcgagactccatctcaaaaaacaaaacaaacaaacaaaaaacatgacctatctctcaacgatcagttttcaacatttacagaaattatcccccaaaacctagcacagtgtatagcaactgttaggtgctcaaaagaagtatttgctcattgatttgaatgactgcctgcaagagcaagccatccaatgacaatgtaggcttaaatattcatcttttgtcttaccatattttatgataaacagtctgatgggaataaccttttcattattctcacaagacaaggctttcaatcacccacagactggaatgatacaaaaatacagtgatttttctctggccaccagctcaaagaataaggaggacctgagagagagagagagaatattccatttgtggaatattcaagattagtcaatggtccaggcttgagatatcctcataccactccactggcatatgagtgaccacacacactgcaagagattagacttaggtccctgggggtcaccattcacatgtgatgaacttcaaggtggggacatgtcgcatgaagggacacagacagatgtcatttggattccagtctgttgggtttacgcactgccaattcttcttcatccacagaggacaaacagacagatggattccccctctagaaaactttattccccacattaaactgtctaaaagaatgactttttaagccatgaatctgactggcaattcctttgttcccggccatctattggtttaacatttatcaagcaattaaatagactagaaaggaaagtaagaaaatgggccaggtacagtggctcatgcctgtaatcccagcactttgggaggccatggcaggtggatcacgaggtcaggagatcgagaccatcctggccaacatgctgaaaccccgtctctaccaaaaatacaaaaactagccaggtgtggtggcacgtgcctgtagtcccagcttcttgggaggctgaggcaggagaatcgcttgaacctggaaggcagaggttgcagtgagccgagattgcaccgctgcacttcagcctgacaacagagtggggccctgtctcactgacaacagagtggggccctgtctcaaaaaaaaaatggtcaggaagcaaagagaacatggaagctggaatgacacctatatgatcctacatggaatagttggcctctgaggacaaatgaatttccttcctccacttcccctgcttgaactcgtccactccaatcccatgaggggatcacgatgcatggccttgcgtagctccagtggctaatggagaggcagactttcccaaacctggagtcctcggattctctgaaggaaggaggtcagctgcctccactttaaaggcttgtagaagtctctcaatgaaggctgcttataaaggcagactgaagggacatgtgacttatccaagaccctgatgaaaactgcccactatttgggcaaaaactgaaagatggattaaaaagcaaactggaaaccataattctggggccaccacttttggctggagcacttgttacaatgttgttttctgctcatctctaagtcacacttcctgtactctacagggtcaagaattccacactgctaaaggcttttgctttcctatttaaccttttacagtcctgacatcaagtgcctccctcaaaccttttatgtttcttttgcattaggatggaatgggacgaaaagtcataaagaagcatttccttaatacagtttaactaagagatgccttatagcttggttttcatgattctcattgatttttcatttgagaatgcacttcattgcctttgccaataataatgcaaaaaaaaaaaaaaaaaaagcatcccagcagccactcagagtatttttgttattatgtgactgataactatctttaaagctgagcaagataacgctcatttggtttatggttgcagtaggtcaaactgtcaggtcagtaataaatatgcaattgcttccaggcaatagaaattggacgcattcatttaagatattgcttttagcttctacatataaaacaaatagatttttggttcaagtgttggcaccttcaatagagatggcctcagggagagctttgtttatagttactggtgggtggaggtgtgtgataagtctatctgaatccgtcactttccagacccagggggagaatgacactgcacagcttctagatgtttttattgtagacaggcaatttcatatggaatgagtttctacagaaatccaaagcaagagatgaagttcttatatgtttatctatttagagacagggtctcactctgttgcccaggctggagtgcagtggtgcaatcatagctcactgcagccttgaactgctgggctcaagcgatccttctgcctcagcctctggaatagctggaactactggcacataccattgcacttgggtaattaaaaaaaaaggttttttttgtttttgtttttttggtagagacagtgtctcgctttgttgtccgggctggtctcaaactcctggcttcaagcaatcctcctacttcagccttccaaagtgctgggattacaggtgttagtcaccacacgtggccaagtgtatgaaatgcttatagatgttgctggatggaggggaggagaggagctcttcaaatggaagaatgttgatatatttagtatccttgtcttatagtatgtgtgttcatcaaggacagaccaggcactttgggaggtcaaggtgcgctgattacctgaagccaggagttcgagaccagcctggctaacatggtgaaaccccgtctctactaaaaatacaaaaaattagctgggtgtggtggcggatgcctgtaatctcagctacttaggaggctgaggcatgagaatcacttgaacctgggagacagagtttgcagtgagccgagatggcaccactgcaccccagcctgggtgacacaacaagattccatctcaaaaaaaaaaaaaaaagggacagaccagtgatactgatttcactataaacctttaataatacaggaaggttaaagtagggtatatactggggaaaccagattactaaatcatgggctctccagcccaggataaattgttgtctccactatgttttagtaagcctattccaaattttctttttaaaaatgttttattttttagagacagagtctctttctgttgcccaggctggagtgcaatggtgcagtcatagctcgctgcagccttgaacccctgggctcaagtgatcttcccatctcagactcctgaatagctgggactacaggtgcacaccaccactcctggctaattaaacaaatttttttttttgtaaagtagaggttttgctgtgatgcccaggttggcctcaaacttctggcctcaagcaatcttcccacctcagcctcccaaagcactgggatggcaggcatgagctaccatacccagcccccaattttcttttctagcgcttctacaccacgttttgtgaatcacttcctaatctacaaacacaagctcaacaaggagtcaagggccagtgctttctggatctccagtggttaagagcagatgctaaataaatatttgttaagagaatgaatacagcagcttcacaatatgccccacagatccatattcttgtaggttcagggactgctgtgtagacacagctcccatcctaagcaaacagtctccatattaagaattcactccgctcacctgtgccaggttcccagctccctccggtcatttgcattgggaaggaaaggagggagaaagccgcatccctaagctttccttggagggcaccgttctttttgtttatcttagctgcacacagaaagagctatgctcaagcacttctctggtcactaaatataaggtactgttgtatgtttgccgttgtttccgacaacacagcatgggtcgtctgagaggtggtaatgaacaccgaatgccgcgttcccagaagcagttattacaagccaggcacggaggctgcagccactgactttctcctctctcactgtccagcagataatacgtggaaatcccaaacctatttccaaataaattgctttcccagagctgtgtcttgtggttgtttcttctgccactggaaaattgcttttctattttgtttatttttaaattgtagataagcttgtggccaggaatgctgaatgactgaacccttttcagaggccccagctgatgccagtcacagttgaaacaaacgcgaggacctgaggacagcacagacccaagctcgctcccgtgcaccagccttcctggcagtggttctaaagatgcatcttcaatgagtcaggactttttctttctttctttctttctttatttcttttttttgttgagacggagtctcgctctgtcgccaggctggagttcagtggcatgatcttggctcactgcaatctcccgcctcccgggttcaagcaattctcctgcctcagcctcccaactagttgggattacaggtggctgccaccacacccagctaattctttttttttttttttttgtatttttagtagagatggggtttcaccatgttggccaggatggtcttgatctcttgaccttgtgatctgcctacctcggcctcccaaagtgttaggattacaggtgtgaaccaccgtgctcagccaggccattttaaccttaatagtttgggtaaatcagactccccagacagcaccaatcaggcaattcaattaattaggatacagtctgctgaaagaaaagatccttaattgtttactgtctaggttcttaaactaacatcctggccgcagggtgtctgtgagtgttgtaaaatgtaagcaaaaatttattttgtatgtaaacttttatgaaggaaagggaatataacttcaaatctcaaaggcggtgtgatgaaatcagaggttaaaagctactcgttttcttttctttcttttttttttctttaagagatggggtcttgctctgttgcccaggcaggagagcagtggcgcaatcatagcttgctgcagccttcaatacttgggctcaagcaagtctcccgcctcagcctcccaacgtgttgggattacaggtgtgagtctcaagcccagcccatattattaattggtatgtgaaaataaattctaactatacttgtcttttaaatttggagtaatggctaaccaagtttcttttctttcttcctcatatttctaaacacttttaaaaggctttttttttcttaaaaaaaaacccccaaaaaatcaatcacaaaagatacttatttacagcatttaacaagcaattcttaaaatttatgacaggagattcaaattaaaatttaaatagattatgacaatcattaattcaacttgggtgtgtttgactgtttctgctgaatagcttaaaagttggttagttataggctatagcttctgataacgggatcttccattcccaccccaccccctggctcacaagctacttcttgattttaattagttttgttgttgagacgaggtctcactctgtcaccagggctggagtgcagtggtgcaataatagctcactgcagtcttgaactcctgggctcaagtgatcctcctgcctcagcctcctcagtagttgggactacaactgtgcaccaccatgcctggctaatttttaattttttttttttttgagacagattctaactctgtcacccaggctggagtgcgtggcgtgatcttggctcactgcaacctccacctcctgggttcaagcaatgctcgtgtgtcagcctcctaagtagctggaattacaagcatgtactaccacacccatttaatttctgtatttttagtggagacggggttttgccatgttgccagggtgatctcgaactcctgacctcaagttatctgcccacctcagcctcccaaagtgttggtattacaggtgtgagccacaatttttttttttttgttttgtggtagagatgggggtcttgctattgcccaggctcgtcttgaactcctcctggcttcaagggatcctcccactttggactcccaaattgctgaaattataggcatgagccactgcactcagcccacaattaagaaaaaaatgaaatttgagtcttaaaacagcaatagaaatatttcaaaaaaaaatgtaaaaatgagtttctctaagggatggatgccagtgtttgataaatgaaaatctcagttaccctatttgtacacctggaaacattaaacctgaacttccaagcttgttctcctactgttaggaatggaagctagaagggagatggtctgtaactttacaggcccctgggatgagtcgttgctagaccccaacattcaacgctgaagtagaatcagcttttcttctttgctctggagggagagagcacaggaaatactgcaacatgcccgctgtctagaacaggggttttcaaatttgcctgcaagctagaatcagctgagaagctgaggtcacacccaagctgattcaattggaatttctgggggtaggtcccaggcattggtattttataaagtgtcccaggtaattccaaagtgtaactaaggttgagatccctaactctagcaaaatataaatactttttttattttttgagatggagtctcgctctgttgcccaggctggagtgcagtggcatgacctcggctcactgcaatctctgcctcctgggttcaggtgattctcctgccacagcctcccaagtagctgggattacaggcatgtgacaccatacccggatgattttttgtatttttagtagaggtggggtttcaccgtgttagccaggatggtctcgatctcctgacctcatgatccgcccacctcggcctcccaaagtgctgggattacaggtgtgagccaccgcgcctggccaataattattttaacattggatttataactggctcttggttagtttcaggatgtattaaagggtgccaaaatgtctttgtttgcatgtatcaccacgattcagataatttatatagatgaccacctgtatctctttttctgaggacagagttagtaaaaataaaaggaggccagatgcaaacgaatcttgtacagaagagagcactcgtaaaaaattggggaaatctgaatcaagtctgtagtttagttagtaatataatgccaatgttcatttcttagttttgatgaaagtcacgtcgtttgcaagatgttgacatttgttgaagttgggtgaagggtataaaggaactctaatatgtttgcaattcttctttaagtctatttcaaaactaaagttaaaagattaaaaaaagaaagcagacttagcattaatgctgcaaaactgttgattgctaacaatattaaacattcttgggcataagttcttacactgtgacttagatgctttattaatgaatacaacttatggagtgagagaagcttagagaaatttccaatttcctgtctacattctgctttatatatattttctccagtttcatctagatcccacaaaatgtcaacagcagttaattctgaaagagtctctgacaatatatgacctagagtcacacgttctattatttagaaattctttttttttttttttggagacagtgttttactctgttgctcagggtggagtgcagtggcacactctcggctcactgcaaactctgcctcccgggttcaagcgattcttctgcctcagcctcccaaacagctaggattatgggcacatgccaccatgcctgactgatttttgtatttttagtagagacggggtttcaccatgttggccaggctggtctcgaactcctgacctcaagtgatctgtccacctcagcctcccaaagtgctgggattacaggtgtgagccaccatgctcagcctactattagaaattctactctcaggaacaatcatgctgctggtaagagtatcttgcacttgtacggcacttcacagtttataagtgctttccacgtgatagccttgttttatttgcattaggaaatagacaaatacatgtgatacaccacaggctgtcataaagaatggaactacgattgcattttactgtaaaacacacagtgtagcacctgtataaagcacagacacacacatgctcacaatacacatgcagaattagaaaacacggttataaaacaattttgctgtagtgtcccgtgatacagagcaaggccaggggatgtagtactgtaaggctagcgcttactacctaggaatcaccaagccagagcaggtgaacacccaagggcactattttgcaggggcagcttttgttcttctttcctaccaggaaaaggagaaaagttcagatgaacaaagaggcactcccaatgtctgttggccctggcattgtaccgccaggactgacagcccttgagtcacggcctcaccactgcccagccttgcaggagccagctcttcacctcctctgggctcctgacacctgccctttcccctggtgcaccaggcacatctgctagttctttttcagaaatcttttgccagctccagtggttttctagtgacctccagctggctggccgccactccttctgtggctggagagaccctcccacctagactctggggcaggtgatggaaatggctgcactttctctggatcatgccagaaggatggctcactcctcttcatcactgccccccacagagcctccacatagccagctccactactagagggggcaagacacttttatccagcctggcttctacgcacgcacacacgcacgcacacacgcatgcacgcacatgctttcctggtcagcacagagagccaggagaactcagacatggagtgtaccagcttagctggatggggaagctgaacttgggtgtgtgcaccccctgctgtgacgtgtggttttggtgctctcaaccctcctgggagaagagtgactttctacctaggtccgattcctgccagtcagtgctgttagggcagtgatctgaaatgttctgcagactcacatcatcttccccttcagcccaggatcacacgttcgtttttcaattcttgtttattcaaaagggaagcctaatcaggcctcctctagagttcacgggatcttttagtaaacttacgtgggaaatgtgaacaatggggctatgattaattgaaacttagggtttccttctgattagtgaaaatagtctcaacagcaatttaagtggtttacagtgattctcaggagaaaggggagagaataatctacatttgtaaaagtaattgttctacatgtgcatttgtttaaaagcttttaaaaaaattgcagtgctgggtccttccccgcacagccctgaacctttcccagctgggcttacttggccctgcctgcaattcctcctgcccaccgacggccactcccacctgcattccagttccctgcaggctccaggacgaggggcccaccttgctcctcccagctttcttgaggaagatgtggctttgctcctgctgcctgctctctgaacacaccacagcctgaaatgtccctgatttacagggtgaccagatggtccggtttgcccaagacagtcccaacgacacccccttttgttcagtgtctcaatttggataataagtcataagaccaccccttccacttgcatctcaccaaggccaagtgtagccatgtgcagggacacctggttgcctctctcactggcccatgtggatgcccacctgttcttgcttcagtggcaccacctgattcccagggcctcggctcccctgtactgtcttgcctggccactaacctaacactgatctattagtagtttaggaaatcatctctgtatttctgaagatctggaagacagagagagagagagagagtctgtgtgtgtgtttgtgactgtacgtgtgtgcacagaggaaagagaattatgaactattttcttagaatagctcatttttatctagaaatctatacaggtattcagtatactcttttgataacagtaccttaaaaagaaaatggaaattttagtaaagattttccttacttgtattacacaacaccactttatagagccaaactgaaaagacccttgaaagcaaatattcttctcatcagatcagtgatctgaattttttattttcatagtcgctttatttcagtttagacactgaaactgcacaggttattttcattttgaatttatcatcaaattcacttcctgttattgttatcccaacagtagagagaaatgtttcatttccagaagttttcatttaacttaaatagaaaacaaactcacatagatccacttaaaaaaaaataaacatttcagtctgaacacaaacctgcttgattattagaactagtttacctaataattttataatattagtatcaccctaattatatcctttggctgtaccaggcatgaccacaaggcctttgaaattcagatgatgaacttggactgaccccagaccatgggacccaagtggtctgcagctgatttcgctgctaacagctggagtggagcagtttcgggttctgcactgactctcccttcgggctgtgagggctcaaggcagtacttacgtttcatctgtgaatgctattccaaagtactccttttccttcagattgaagtgagaagccacaaggtcaagaagctccttggccaacagcttgggctgcaagaagaatacaatggaagaagggtaagtgatgagagactgcttttcctaaaatatgcaatctcaggtttccataattttttcaatgaaatgtcacaaagctcaagtattttgaagcaaatgatttttataaacccaaacaaatagacaatgacactgatgagcacacagccaagtcaagggtcatcaacagatagagaccttctgttttgtttcctagaagggtttttttttttttaattgagatggagtctcgctctgtcatccaggctggagtgcagtggcatgatcttcgctcactgcaacctctgcctcccgggttcaagcgattctcatgcctcagcctctgggattataggcatatgccaccacgcatggcttttttttttttttttggttttaggaaagatggggtttcaccatgttggccaggctggtctctaactcctggcttcaagtgatccacctgcctcagcctcccaaagtgctgtgattacagacgtgcgccatcacacctggctaatttttgtatttttagtaatcccagctacttgggaggctgaggaaggagaatcgcttgaaactgcaaggcagaggttgcagtgagccaagatcacgccactgcactccagcctgggtgacagagtgagactctgcctcaaaaaaaaaaaaaaagatatctgccagtctaaagaagcacaccagagcgttaggcataaagtcatggtagatgtttgtattgttaacatgttattcaccttggtctgttactactgaagtgaccacagaacaccaggcactgaagtgggggagggaggaaaggctgtctgatgcggaaacagggccggaagagaagagttatttctaaactagcttccaggtcatgcatttgaaaatacattgcctctatgaaaattactccattccaagcacactcaccagatattaggaaagttatttcattatctgttggtttttttttttttttttgagatggagtctcgctctgtcaccaggctggtgtgcagtagtgcgatcttggctcattgcaacctctgcctcctgggttcaagtgattctcttgcctcagcctcccgagtagctgggactacaggtgcgtgccaccatgcccaacgaatttttgtatttttagtagagacagggtttcaccatgttgtccaggatggtctcgatctcttgacctcgtgatctgcctgcctcggcctcccagtgttgggattacaggcatgagccactgcacctggccgacagttggtttcttatttcactttttgggtactgccatggactgaattatatctccccaaaatgcatgcgttaaagctctgacatccagtggtatttggaaatgggacctttgggagacaattaggtttaaatgagtttatgagggtggggcccccaagatgggattcgtgtccttataagaagagacaccagagagcctgcttcctctctctgccatgtggggccaaaatgcaaaggtggccctcaccaggagctaaccatgctggcaccctgatattgaaatgactgtttaatacaacagacatttatttattgaatgcctactatgtacagggcactgcccacatgctgtaggagacagaaaaataagcaaggtgcagcacaggcccatagggaccttagacttttaacagggacacggagtaagagctagcgctgagtttaaaaagccaaagaagatgctccacccttttctgtctcactcctgggctcctgggtggcagcctcagggcctagatgaccatcaattcactgatgaaaaccacttaaactgaaagaatgggtttgaagcttcctccccagcagacaggaatggacaggagaacccaacgtgataaatcaataccacctcatagtctatacttccattcatactgaattttgaaaaagtgaaaaagcaatctctataaccaacagggaattcaaggtgatacgtcagaccctccctcactcctggtggaacgtctactctgcgagaatgcagtggagtaaacgtggcacatctcagaaggtcgctgatgaattacgaagtagaatgcaagatgggtgctcttgaagcttccggtaaatgctgtgtttgccatgggctgtggccagcactagctccacccccaggaagtattcggctgcccaataacaaaggctttgctggatcacttgtgactatgaggtagtgtggctgctttttaaattgcaaggtagtggccgggcgccatggctcacgcctgtaatcccaacactttgggaggccgaggtgggcagattgcgtgaggtcaggagtttgagaccagcctggccaacatggcaaaaccttgtctctactaaaaataaaacaattagccaggcgtggtggcgtgtgcttgtaattccagctactcgggaggctgaggcagagctcttgaacctgggaggtggaggttgcagtgagtagagatcacgtcactgcactccagccttggcaacagagcgagactgtctcaaaataaaaataaataagttgcaatatacatatgctcctcgaattatgatggggctacatcgtggtaagctcattggaagttgaaaatattgtaaatcgaaaatacatttaatacaccttacccaccaaacatcacagcttagcctagcctaccttaaaggtgctctaaacactgccactggcctacagttgggcaaaatcatctaatgtcaagcctgttttatcatagagtgttgaatggctcatgtactttattgaattcagtacactgtagactatcagttgtttactcttgtgactgtatggctgagcagcgctgccagagcgtattgtaccgcgtactgctagcctgggaaaagatcaacattcaaaattggaagtacagtttctactaaaagtacattgcttttgcaccagtgtaaagtagaaaaatcataagtcagaccatcataggttagggacagtctgtgatataatttacctgtccaaatgattgctaccgctttcaaagtagtcactgtatttctctgatgcttgctatttcttgaaacatttttgataatcttttgggtttgcccttgaggcttgtgtcagatttgtcaacgcgttttcactggtgataaatcttcctgtgctcgagaatggatttgattttttttttcaaatgccaaaagtcacttaaagtcaagtctagtgaacagagatagaggaggaggaatgggtgattatgcctggtcaacccagtttcataaaatgaagtgtgactacaaagtaattattgtgggttcttggggattatggtgagaggtctggtccaaacttgaaaacaataaaaataagattttgttctttttgagattttaactttaaggctgggcacagtggctcttgcctataatcccagcactttgggaggctgaggcaggaggatcctttaagcccagaggcgatatagcaagaccccatctctacaaaaaaaaatttaaaaattagccaggcatgatggcatgcacttgggactagtcctagctattcaggaagctcagaccggaggattgcttgagtccaggaaattgaggctgcagtgagctatgatcatgccactgcactccagcctgggcgatagagtgagaccctgtttcaaaaaaaaaaaaaaaaaaaaaaaaaaagaaagaaagggaaagagagagagaaaaaaaagaaagaaagaaagagagacagaaacagagagcaagagaaagaaagagagagagaaaaaaaagagagctaaactttaaagcctacatctcaacagatttgatcagagatacataagtttgcccagaaagagaaagaatgattcccagtgctggcatagtttatctagaacatatgttcatcactccatagaatgattgggcctgaatggaagggggtaagtggaggcagggtgggaggtgcagttggggaagggagatgaacccaggaagcaaacgtgatcttagccaataggtgttgaatatttgggtcccttaccgggtggtaaggccttttatgtggcagaaatggaggcttggggttactttagctgatcatgttacattgaactctcctaattccatgcctcccaaggaacacctacatcctggatatgtccctcatatatgaactcattatcatccagaatagagattatcattcttttgccaaagaagattctgagactgagagataccaggcaggctgtcctgggtctcacagccaagctgggattcaaaacaaggttgagatacacagcatggaatattatttcgccctaaaaaggaatgaaatcctgacgtggatggaacctgaagacattatgctaagtgaaagaagccagacacaaaaagacaaatattgtatgattgcacttagatgaggtaattaaacaggcaaattcatagagacaacagaatagaggttgtcacgggctgaggtggtggcagatggggggttattgcttaatggttacagcatttctgtactggatgatgaaaaagtgttggaaatattagtgattgttacatgacattgtgtatgcatttgatgccactgaattgcacatacgaaaatggttaaaatggtgtttgatgttacatgtattttgacacaattaaaaaaaaaggaaaaagggggaaaggaggtctgatagtttcaaagcccacatgtgtaatccctctgccactctacctctgttgaccctgcttccagggtgagagcctaaggatcgtgcctcaagggccctggctgagtgagggctacatgactcacttgaaaccagtgcactgacattatggatttatacatcagtactttcaacctggttaatgtgagtcttcccctgagaatgaaaaatcaggtttctgagcctgcagaataaagagatggcttaacacactgaagaattcaccagagtaatggataccaccatggaagccttctggagactgagtttttgccttaccatggtgatatgtctctctgatttagcctgtcacactacaataagaaaacaagttttcttggtgactcataaactgaagtcaaggaaaaggctctgagcagtagctgcctggctggaacaaacttcatcttttcaaataaactttttcaacaattgtacctatctggatttatatcttttgttaaaaaatttaaaaggtcagtcccattactttacacaacagttattatagaccatatgtatcaatttccaggaagaaaagcctacatttattacttgcaatttacaaatggagaagtaaaggccgtgaagagggagaaaatagatcccagaagatgttgaggttacaactcctgactcttagctgcttttaaagccacacacattttttctgctgtcatggtgactggcaacagcccagaaggtggctgctctgtcaatgagagtgagagttgatggatgggcatgtagtgagagtgagaaatacacatcattgtttcactgtttaagtcacagagacattgggggttgtttgtcattgcagcataacctagcctatcctgattgattcaggcactgagtcttttattttctgtacagttgatttaaaacaatttgtggcatcagctccttgatttcctgatcttgcaaatgaagacaatatcccccgctgatgtgacagtgattaatatactacattgttctgaaagtttcttaaactccttcagagaaagttgctgggcaagcagaaagcaatctgctcttatgtgctttgaagggatgtttacagaatcccgctgagtataatttgccaattactggtgctgtaaacatttgtggagctttgcagggatcggactgggagcaaggccagaaaggcagctagtagcccaatcgcattctattggacaatctgggcaggagcccagaggccacgtgagcaaggcagcctgtgctccctgggtttgtcagaattagcctcttgtgggccatcagccgtcctggccctaagaggtcattacatctaagactggctttctcttagcccataattagctttgttcaatcaaatagtttctctcttttctttttgtatctcaaaatctttttccattgtccctcttagcttttatttctcctgatacctgacaaataaaacctccttgcaaacatccctccttaacatatacttctcagtggcaccactcacagagctaataggacagtctttccaacaccaactgggcttagaaacctgggcttcagccatgtgctttagcaaggaaaggaaagcactggttctaaatacttagggaagaaaggagaggagctctcagtcagtgctttgtggctccaggacccagatctgagttcttgagaacactggatgattccagtgggaactgttcacgttcccagcatattacagggttccagatcaggtcctgactacttcctggcctgcttcttccaggcaggacacgactaactagaatgatcaaaacagcacttaacgtgttgcagggctgtaaagcgctctaggcacactgatatggtttggctgtgtccccatccaaatctcaccttgaattgtaataatccccaggtgtcaagggcgaggccaggtggagataactgaatcatgggtgtggttcccccatctattctgatggtaatgaataagtctcacaagatctgacggttttataaacgggagttcccctgcacaagctctcttgcctgccgccatgtaagatgtgcctttgcttctcctttgccttccgccgtgattgtgaggccatgtggaactgtgagttcactaaacctctttcctttataaattacccagtctcaggtatgtctttattagcagcatgagaacagactaatacacacacccacatgacaacatcctttcaggtgacttccatgagcccttcaggtaaattctggggaaaggaattcaaggatgaggtagcacccaggcacctcaccaattcctcacagaatactatattccacagtatactatactacatacagtatcaagctctaaatgctagcctggtatttaccatcacttatatattatgccaccaacttaaacttgacatgtgtctatccagatagatgatcttagacaaattacgcaagctctctgggcctcagttttctcatctgtacaatgatggactactgtaccataaaaagaattcctatactaagacattatttatgttattattattattgtttttagatacagggacttattctgttgcccaggctggagtgcagtggtgccataatatctcactgcagcctccaatcctgggatcagtgatcctccagcttcagtctcctgagtagggggggactacaggtatgtaccaccatggctggctaattaaaaaaaaatttttttttgtaaagatggattctttctatgttgcccaggctggtcttgaactcctggcctcaagtgaccctttttctttggcttcccaaagtgctgggatgacaagtgtgacccaatgcacccagcctttattccttatgttattattaaatttagcttcttcctttcctacaaacgatcctgccttcctaagagtgttattcacccattcgaaaaaacttgaacaccatctgcatccttcatgatctcttgaatctagtcagttaatatatcctgtctttcttatataatttcaggtaagttactaaacctctctgtgcctcagtttcctctcagctattaaatgaggataatgactatacccaggtcacaaggctgttttgagaattaaataaattagtctgatctatatgaagtacttagaatatgcctggcatggaacgttacttgtattcattatttcagatcctaatcataaattatttaaaaaattccatgtatggccaggcacggtggctcacgcctataatcccaggactttgggaagccgaggtgggcagatcacctgaggccaggagtttgagactagcctggccaacacggtgaaaccctgtctctactaaaaatacaaaaaaattagctgggcgtggtggctcatgcctgtaatcccagctactcgagaggctgaggcacgagaatcgcttgaacctaggagatggaggttgcagtgagccgagatcgcaccactaccctccagcctgggtgacagagtgagactctgtctcaaacaaaacaaaacaaaacaaaacaaaatccccactccatatagtatcaagttctaaatgctagcctggtatttaagaccaccctatgaacccagccccagtttacctatccaacctcacttttgcccagttccctacaaaaatatccatttctgttcaatctatttgattgaactaaagaaaacactgatctcatttttatttccaaatctttgtacattccattctccccctcccccttcccatttaaattttatcctgctcaaagcccacttcctccatgaagccctccctgaccatcctgcctacaaatgctctctccctcctctggatttctacagcactcaacacaggcagcttagtcacacttggcacatgtgctcttgtgttgtggtaaactttgtgtgacatgatttgttacactctatagcaggttgaatggtggtccccaaaaacatatgtacccatcccagtcactggaacctgtgagtattacctttcatcacaaaagacgtgatccttgggaggaggaactaatcctggtgggctctaagtgccattatattgtctccttttttttttttttttttctgagatggggtctggagtgcgggctggagtacagtggcacgatctcaggctggagtgcagtggcatgatctcagctcactgcaacctccacctcccaggttcaagcaattctcatgcctcagccacccaagtagctgggattataggcatgtgccaccacacccagctaatttttttgtgtttttagtagagatgacgtttcaacatgttggccaggctggtctcgaactcctgagcgcaagggatccacctgccttggcctcccaaggtcctgggatatattgcctccttataagagagatacagagggttttttaaaaacagacatacaggagagaagacagaggcagagacctgagtgatgagtgatgaagacacaggcgaggaaccccagtcactagaagctggaagaggtggggaagcgattgtcccctccagctgcctccagaaatttgggagagtgagtttctgttattttccagccatcaggtttgtggttatttgttatggcagacacaggaaactcatacaccctcagatggaaaccccgaagacctcgtttccgtgtaattgaagggaactcagcactggttggttgtgacatgagtgatctcagtgcgaagcctgcattgacattggtgttctctctccactgtccctgtggcactctgggctgggaaggcaggcgggccttggtctcagccgaccttgggtcactccatggtgaagcaggccccttaagcttcttcttgttaacctattcccttggggcatctcacagattctaagtcaaaagagttgccacttctgagttaattgtatctcaaaaaaaaaaaaaaaattcaaacagcaaacaagcagtaaccatcaggtgactcccatctgtgctttgggaggaaccacggtctcctctgaagagtgacactctcagctcctgctcttcgccaagggtgttttttgacaatccctttgtcactgcagagcccccagtgactgctaagctgccagggtttggacacgcatggccggatggcacagccacagccgccgctctgtgcccagcactgcctgcccatccactctgcccgggaccccgggacctgctggatgggtggctccctgccctttaggagtgggtgcagctgtgggatggcagacaggggctgtctgggagtgactgtgaaacgtggcccgtctgcccccatctctctggacaggaggggccggggttagcttttcggaaaacccagagggaaagagcaggggaaggagcgcagctttgaataaatgagcctgagcaagctgccgggtctgaagcctgggctgtcactgtgtgtccctctccatccccatgggggctctgagcccagcaatggctcagcggctgctcattattcccggggaggggaagctgctgcggggggtgcatgaggtgactctgtgcagctctgtccactgtgtggccagcaggtctgggcggcgactcccctccttgtcgccctgctgcttagctgggaaggctggtttccttcctgcctctccagcacagccctgggttctgtggcaggggacacagggaggctacttcctgtaggcagacgggtgtgaagaacaatggagttgcactgtcttggctctcaggcacccagaacaggtaggagagaccccgaagccaagatcagagacccgcctgccagaggtggcatctctttacccagaggtccctgcccagcctgaaccgggatccattcgtgcacatgagacaaatcctttacctctagtctaggagtgacagtggcatcacatcgctgcagcagaacagcaaagctgccaacaacactgcccacctgtccccgcctgcagctgctacttcacatgaattcatgcagccagccctagaaaccagaaacacctgaagtagacaccaggattgcccccatgtgatagagggaactgagatacagccagagaagcaactcgccaaattcacacagcgaatcagtgggagaactgaaccgcggcacacaggtgggcatgggtcacccaggattataggaagagccagagagaccatctgcccagcccacttcatgacggcagcagaaaggaaagcctagaggaggccagaaacctgtccaggacgagggtgggcaccttggttaccagcataggtgaggtggccccgaagtgcccgccacacctccatcctttgcccccgctaatgttacacttaggggacagagcaggtctcgaagatccgaagcaggaaggaaagaaacaaagtacatcaaggaaaggggtaaaagtggtcactgacagaaatggaaacgatatatatatatatacatacacacacacatatgtacacacatagatctatatgtatgtatctatttgtgatgtacaacatgatgttttcatgtatatgcacatgtgggctgacccatcaagctaataaacatatccatcacctatcatacttacgatttttgtagcgagaacatttccaaactactctcagcaattttcaagcattgaagacatcgttattagctacaataaccacgatgtacaatagatctcctaaacaaagctttgcttgcttttaaattctggggttcagatctagcaaataacagcctctcctgaagtcaaaagccaagccaccttttctaaatgcaatagaattttgccagacagtaagttcctggaagggagggatcacatttgatcgacatttgtggacttacaccccaatacagtccctgacacacagtaggtgcctaatgaaagtttcctattggtagaatgggacagaataaagggtggcatatgcagttgttctaccacgagacaggatggaacctggacaccctcttgagctggtttgaaggagagatctgctaggcagagactgcggtgctgcacagagccagatgggaccaggtgtcgcatgctcactgatgccagagagccactgggtttcaatcagatcacacagctccaggcagccatgaaggggcctgtgacagatacttgtgtccccaggaaaggatatgtcatgtccctattcccaaaccctatatctgtgccctcttcttcctcacccaactcctccccaaaccaacaaagtcacagctccctttaatagctccttctctctcccctccttctctctctccttccaagtgactctgccatttaacccaggggtgaggtctccctgggagcaatgcttttagtctccccatttgtccctctccttcccctttatgcttttattccctgggtgtcatcttcttatttccacatagtttcttccatattttcctaagatgcagtctggtccctgtgttctctgaaaagttgggactgatacccatgtgggagggaggctttctcatccatgcatttgaatgatgcccaatgggaaggctttgacaggcgtacataatgattgctcctctagaaatgcaaagtgctcacaagccagccagccggctggggagcctgctctattcatgatccccgggggactctgggaggcgggcaggtgttcattagggaggcctcctgatgaatagagcaacccccagactccagcctgctcagggcaatgtcaccaggactgtgagtctagcgtggctccccttggcaagcctctctgcattaatgaaatgataactgtttcggtaaggagaaaacagaaaaagacaggcagtgctcaacctgcctctgccagataggactgccaagtctgcagcccaaattctgagatatttatagaaaatatggggatgataaacgaagcaacatcttgggattccaagctccatcttccatggccatctggtctgccacttccatttttttgttgttgttgttaaaagaaagcctgccctgcagactctgtgatgaccccatcttgtcctgcagtgagtaataaatcactatttctgataaaagctgcccgtgcactcactgggaggtgaggtatgttctataagatcaaatgacacattggcagattggtacctttccacggggccaaatgacaccaggaccaactcaaactagatatcttcatgacactgcacactgaattattccatttgctcgatgttcaaggaagagcagagaagagtgtctgtcaaccaagaacacagggaccagccacttgctacttttccagtgtaacggacggaaggtgtggctcgtatgacatctgctatcctcagctgtggctggcattcgaagactgtgtctctattgccatcagactggaaagggaaagcttgccttttagcaggatggtggtgagagccaagttcagagggggttaaaaaataataatatatcacttccaagattaagttacagaaaaaatattagtacagtcaaccctgcatatccacaggttctgcatctgtatattcaaccaaccatggatcaaaaatacttaaaaacaaaaaaaccaggctgggtgcggtgtctcccgcctgtaatcccagcactaagggagaccaaggagggtgaatcatgaggtcaggagttcaagaccagcctggccaacatggtgaaaccctatctgtactaaaaatacaaaaaaaaaaaaaaaaaaaaaattagctgagcatggtggcacgtgcctatgatcccagctactcaggaggctgaggcagaattgcttgaacccagcaggtggaggttgcagtgagctgagattgcactactacactccagcccgggtgacagagcaagactctatctcaaaacaaaaaataataaataaataaagataaaaataaaaaccaatacaccaataataaataacacaacaatatagtataacaactatatagcattacatcacactaagtattaagagtaacagctgggtacggtggctcacacctgtaatcccagccctttgggaggctgaggtgtgtggaacacttgaggtcatgaatttgagaccagcctgaccaaaatggggaaaccccgtctctactaaaaatacaaaaaaattagctgggcctggtggtgcatgcctgtaatcaaagctactcaggaggctgaggcaggagaatcgcttgaacccgggaggcagaggttgtagtgagccgagattgtgccattgcactccagcctaggtgacagagcaagactctgtctcaaaaaaaaaaaaaaaaaaaaaagagtaatcaagagatgatttcaagtatacaggaggatgtgtctaggttatatgcaaatgacatcacactttgcagtcatttttccctcattcctgggggacactttccaagactcccagtagatacctgaaaccatgggtaacaccaaaccctatatatactgctttttgtcctatacatacatacctatgataaagtgtaatttttaaagtaggcagagtaagagattaacaaccataaccaataataaaatacaacaattctaacagatgccagcatcactacacttgcactttgaggccattatgaaatcaagtaaggttgacttgaacacaagtgctgccatcctgagacagttgatcagatcactgagatggctactaactgactaaaggtggggagcgtcaacactaggggtccccaaaccccgggccgcagaccagtactggtccgtggcctgttagaaactgggttgcacagcagtgggcaagcgagcattaccacctaagcagcagtattagattctcccgggaacccgaaccctactgtgaactgtgcatgcgagggatctaggttgtatgctccttatgagaatctaactagtgcctgatgatgtgaggtggaacagtttcatcctgaaaccatccttgcccctccccaccctggtccatggaaaaactgtcttccatgaaactggtcccttgtgccaaaaagcttggggatcactggtctatacagtgtggcaatgccagacaaagggatgattcttgtcctgggcagggtggagcaggacagcatgagatctcctcatgctactcagaatggcacccaatttaaaacctacagatggtttatttctggaatcttgtattgaatcatttcagactgtggataactgaaacgtggaaagtaacaccgcagataagaaggaactactgcatctaacggacttgagcatctgatgattttggtatcttagcagggtcctgcaaccaatgccctgtggatgccaagggataactgtgctgtgattctcctaaaacgtgtctgtttcatggaatctgggtggtgaatttgtaatcggccttcagggctctgaaagccagttctacccgatgtgtaccttgatcagcatctgcctcactttgaacattgcaacaataacctctacctcccaaagctgtcacgaggactcaataaatgatcattcacaagggacctggtacatgagaggtgctcagtaaatgagggttccccctttcttcttaatcagtaactgaatccctattaaaattatcccctcctcactttgacaaagaccttctctgatcagaatctaaatacccttcagggtgagctgtcatccttcatctcgggaaccatgaataaatcatcactacacggtgaggggaatagaacgcaggccacttcccttggaattaaacttatttgagcagccttgccctacacagcatactttcttattcccagtgtctgctcagaaatacccgctgcatctactataggatttctcctccttgcacctgtctctgcctattggttctttggggttaaaattccatttattggccagaagaaaaagaagtccctctccggccccagtgatacgcccagagacatggcactggcttttcatttaagttggaagttccctaagtgctctcccctgtgaatcctctccctaaagcgttacctccccatggctcttgtggatgactggcaggtgcatgttagagagatacattttgctcagctgatgatgtcgttttcgatacaattaaaaagacacccttactgggctagaagagtaatgaaaaagtacagtaccgatactgctctcccgggaggctaaagagggaagatcaactctgggctgaaaaatatttattcctaaacagcattttcatgaaagtcaggcgagcaaggatgtaaaagccacacagccccttcccttctggcatgtaattaatggatgaaaacagacacgtgtcctcgggtccaaagaaaacttgagtctgtaacaccctccatcctggactgaaaatattaatttattctatattctacatacttccaaaggtttagaggaggtttacggaattcaaaatagcacagaatagggggattaggaacttaagtaagacaaagtccattgaagacggtgaggcatttatgagacaaatgaatttctactgcagggcacagaattggactctgtggagggagatctcgcgaggttacacaagcttcgttagcagacaaaagaaacgggttagctttttccaagaagtacacataaggggtatcaggcatcatggcttcaacacagtttcagagaaaaccagaaatgtggctggcatgaaatgtctcatggtctagcccccagcaaagcccagcacacaagcacgatctgcgccgttcccacagcctggggcagatttcaagcccatctcccgaaacccgacaggatattctgggtgagacctgatgttagacatttacataagcgaatttggcctgaaattttggaggcgatgttttattaggtttttaacgcatgctaatgtcggccattaggcagcttggcactgacattttgtcttgattctgaagccaaaccacataataaatatgaagtcagtctcaattcaggcaaagcgaaacagcctcctgcagactgataagccaagaggtaggaatgttcagaaaatcacggtcaagaaagcaaaagcagatgagctgagccaagggccctgggatctgagagaggggttcggaggttccggcagtctgtaagtctgccaggaagcaaggaatgggctagatctccaagcctacccccaggagattggagggtgaggcccgcacgccaggaggagtgggagaggaggagggagaaggggcccctctgctcctgcctgcttcggggagccctgctctttaatgctgggctcaactgctgtctggctgctccgagccccttgggctcgaagcccctcccctgtctctactgcccaaataccatttatgcaagaccccgctctgtagcccctctgcagagagagctgccttgctcagctgctcatggcggggctctcagagtgctccaagctccagcaggcctcgtctgaggcactgtcctaccacatttccatctttttttctaaatccatgccttttcaaggatggcaacatcttgaaagcagggatggtattatccacatctctttttttcttatttctgtacattgaagtggtacaagtgcagttttgctacatggatatactatgcagtggcaaagtctgggcttttagtgtatccatcacccaaatagcatccgttgtacccattaggtcatttctcatccctcaccccctcccacactttcatgtcaccaatgtctattattccacactccacgtccacgtgtgcactttaagtgagaacatgtgtatttggctttttgtttttgagctatttcacttaatgacttccagttccatccacgttgctgcaaaaaacatgatttcattctttttgatggctgaatactattccattgtatatgtataccatgttttcttctttctttctttcttttttttttttttgagacggagtttcactcttgttgcccaggctggagtgcaatggcaccatcttggctcactgcaacctccgcctcctgggttcaagcaattctcctgcctcatactctcgagtagctgggattataggcatgtgccaccatgcctggctaattttgtatttttagtagagacagggtttctccatgttggtcaggctgctcttgaacttctgacctcaggtgatccgcccgccttggcctcgcaaagtgctgggattacaggcgtgagccactgcaccaggccaccacgttttctttatccaagtgtccattgatggacacttaagtggattccatgtctttactattgtgaatagtgctgtgataaacatacaagtgcaggtatctttttgatataatgatttatcttcctttgagtagatacccagtaatgggactgctgggtcaaatggttctttggtttttagttctctgagaaatctccatactgttttccatagacgttgcatgaatttgcattcctaccaacagtgtataagcattcccctttctccacatccaagcctcacccaaatggtgagtgttaaatgatggcctggatggatcaatgaatgaaggagtgaatggtgaggtggaataggattttagcaggagaagctttcacattgataaacaaaacgaaaaacattcttccggcagggcatggtggctcacacctctaatcccagcactttgggggtccgaggcaggaagactccttgaggccaggaattcgagaccagcctgggcaacaaagtgagaccccatctccacaaaaaataaaaaaattagctgggtgtggtgccgtgtgcctgtggtcccagcacaggagtttgaggctgctgtgagccatgattgtgccactgcactccagcctgggcaacagagtgaggtcccatctcaaaaaaaggcaaaaagcaaaaaccagtgttcccttgagttctgttcccacgtccaagcccttctcaatcttcacaggagccttcagtgacttcatatgtcctgctggttctaactcctgctcaattcaatgcttcctaatgctagggatgccttctctctcagtaggtttcagggctgtctttcaccactggaaacctctatttgtagatatgggtgcagcctaggtccatcacctttagccccaaccacccttagtaagtggagctgaacatgtgcagggaagacccatctgtgggaattcaggagagccaggagaaaggcatggatccccatctttgcttctgtcacctgcctgactcttcttgccataagtgtttcaccaaaataaatcgggggcctggccaggccactggaaacactgaccttgaagacttttcaggaaatgatttgcatgcagtgcagaagacctctgaccccttcctgtcgctggcacctgatcggatcctagcagtgacctcacctggggatttgactgtgtgcttccccacatgccctagctctctctctctctcttcctttctcttagccttacatgttctctctggaggagataacgcgctttacattcataacagtgtgtcagtctgcagagagagaaatcatctaaggccatgacctcactgccacaagtgtcactgactgccaggcagagcatccatcgggcagggcgctgtccctcctcggccctccttccctccatttgcaggaggaagggtcactaccatccaggtcacaggcacaaaagagattttgttgtctgggctgctgcttttccagcccctctgacagactccagaaggagtcaaggaattgggaaggcgacagcgttagaacaagaaggtgaaaaaacagcaagcatgcatctttctcccagagcttctccaaagccaaactatagactctgaatgagccctgagccaagatgagaggtcaaggttcttgtcctgactgtgggccacagagttctatggttttaacagagaaggtgggatccatagcccacttccagtggctccctttaaccagtgctgccccctgcagaaccagcacaaggcgacacgttaatgtaaccccagcattgccattgaaggctttatgggaggccttgccctacttaccagagaaagcaaagcgggaggtgtagagaaatgggaagcctgaccatgtatgttcatgttccatgtcacgcagcatccctgtgtgtgtgtatgtgtgcacaggagtacttggtgtcataagttttgcttattattattagagacagagtctcgctctgtcacccaggcaggagttcaatggcacattctcggctcactgcaacctctgcctcccgggttcaagtgattctcatgcctcagcctcccaagtagctgggattacaggcacccaccaccaggcctggctaatttttgtatttttggtagagacagggttttgccatgttggccaggctggtcttgagctcctgacctcaagtgatccacctgccttggcctcccaaagtgctaggattataggtgtgagccaccatgcctggccaattttgctttttagaaatcactccagacctgacacttcttagctagacaaagaggcacacacacacagagaggcaggacgctcacttctacagtccctgtggagttttagaccaaacgcaatgcctctgaccttctttggatgacatcaactttaccggtcttcatctggggacctgggcatcaaatcccagcctgaagatcccaggattggccaggtatggtggtgtatacctgaggtctcagcactttgggaagttgaggcaggaggattgcttgagcgtaggagtttgaggcctgcagtgagctatgattgcaccactgcactctaccctaggtgacagagcaaggtcctgtctctaaaacaaataaaataagaacttaagattgctgttaggaaacaagaaggctttgaagtcacagacttggactggcattaaggttttctgaactgttgtgggatcaggacccagtagcttcacttcccagagtttcagcttcttttctgtaaagtggacatcatatctccaactttctggacaccatggagttaaataagatggtgtatgggacatgtaactcagttcttgacacataattattacttactgcttgttaattccttccacacgtccactgtgcatttcccttccccatgccaacctcttaacaacatcctcattacatccttatcctgcttcctttttgggtaggagatctcccagttgccattgtctgggaacacccaggcattcaccgggggagaggctgagctactccaaaatggagacagtgctgggtggactcctgcctctatcagaattcatccaggccaagagctcagggcttttttagccaaacaacagcaatctcctgctggcacgtaatcttcaagactttcacttcctctgtcagagtggagggaaaaatcaaacagaacaaaagcaaaatgaaaaccctggcctggacttccattctaatgtgcatgagtgaggtgggctctgatgatcaattacaccagcagaaccaatgaattacaccaagagaaccgagttgccggcccagctcaccgggggtgaactcagacactgcttttcctgcctgctttcggctgctccctctcggccactcttccaagctgcatcccaagctgtcctttctagctgcttgattgaagtgcctttcccgtgtgtccacagcaataccagcatcaaggattgtccactgccctcttaggattccttcctccaaacagaccctcgtgcttcgtccagagtgagaggtttcagaacaggaagcaggaggtctgtgcggaaatgtcacctggatcttctaaattagtgatttcagccttgcgagcacattagaatcagcggggcagtttaaaaagccagagatgcctggggcaccctcgggattccgacttgattggtcttgggtgggtcgaggaatctgtggattcttttttctttttctttatttagagaaagggtctcactctgtcactcaggctgaagtacagtggtacaattatagctcacagcaaccttgaactcttgggatcctgctaggaagctgggaatggcctagatctccaagcacacccctaggggactagagggtgaggcctgcaggccagggggtaggtgggagtgatcctcccacctcagcctccgaagtagctgggactagaggtgaatgccaccacacccggctaatttttaaattttttatagagacagggtcttgctatgttgcccagactggtcttgaactcctagcctcaagcaatcctcccacctcagcctcctaaagtgggaatcggttgattctaatgagtgcaactaggaatgagcatctggaaagaatcactgtgttgtggggaaatgcatatttgcgatgtaattagaatgctgatgcctttccgtgtacagtctgccttcacacatatgtctccctggattcagaacagtatttatcgagcacccactcgtgctgggtagggtgatgggtgccatggatctgccataggaagccatggtccctgactgtattagactgttctcacattgccaataaagacatacctgagactgggtaatttataaagaaaaagaggtttaatggactcacagttccatatggctggggaggcctcacaatcatggtggaagagcaagagaagtcttacatggtggcaggcaagagagagcttgtgcaggggaactcccatttataaaaccatcagatctcatgagatttacttactaccatgagaacagtatgggggaaaccgtccccaggatgcaattatctccacctgtccctgtccttgacacatgggaattattacaattcaaggtgagatttgggtgggaacacagccaaaccatatcaccaaccttcaggagctcacagagtggccacataactcctgacattcatggggcatctgccctgtgcccggtggttaagggcccagatttgggagctccttactgactgtgtggcttcaggcaggttaaatgaacctgtcaatacaatatcagtacctgcttcattggagcgttgtgaggatcaaaagccttctaacagagaaagcccttagaacaatgcctagcatctcgtaagtctttacaagagcccactaatctatacagaattgcagttaatcatctcaacaacactatgaggcagatgttattgttatgatcattcccatattaaaggtcacccggctatgacatagtggagctgggcctcaaagccaggtagtctgacccagaggcagggtctgggcgcttaaaagttaagtccaaagtgggtgcagaaggagacatgtcctcctccttgggaatgtgtaagctgatttgaaaaacaccaagcaggccaggcgcagtggctcacgcctgtaatcccaggactttgggaggccacgggggaggtgggtggatcacctgagatcaggagtacaaaaccagcctggccaacatggcgaaaccctgtctctactaaaaatataaaaattagctgggcacggtggtgggtgactgtaattccagctacttgggaggctgaggcaggagaatcgcttgaacttgggaggtggaggttgcagtgggctgagattgtacccttgcactccagcctgggcaacagagtaagactccatctcagaaaacaacaacaacaacaaaacaaaacaaaaaccaccaccaacaacaaaacaaaacaaaaccaaaccaaaaaaacaagcagccaggcagcctaaccagttctcctaagaaaccggtctctggacacaaattagtcccgtcttccctaaaataaaacccggcctgcagacatgagcacagtcctttgtgctcttctccaggagggagaaaaatggtgagatatcaagccccttcccccggaggcttcttggagttcctctaagtattaatctctgaatagtcaaaggataccagaatttgaaagcctgacgttagaaagaaaacttttgaagaactgacttcatccctcggggcagagggaagacgaaattgatgcgtctgaaatttctggtccagagagtcatcttcagcattacaaagcacgtcaggagaacaaggcacggggctccacagggggtgaacagggaactgagaccagcctgtgttgccatgggacacatttccaggaaggctattaacagtgggtgatttaaatgagcgagagacagaggcacatggctttttaagctgacagggttaacatttcccctcttgactacacaagacctcattcttacctccgaaattcttctctgcccagtttttccctttgtcccactttagcaaatggacttccagacaatcagataattccccgtgatagcagcgtgcacggaaaacatgtcatgatgatatcatctatctaagacccaagagtgaggctgccagggggtggccggagatggaggtcattaggatgcatagaaagaaatatgctttcttatccttttcaaaatgcattcattcagcacagcggcaagtgtaatggttaagaggagggctttgatggccgccgaacttggctttgagcccagttacttcactcgtggagctgtgtgaacctcagcaacctacttaactctttgtgcctcagtttcctcaacagtagcatggagataacaacagtttatcctacggttgtcctcaagaattagtgaaaacttacaagggtaatggttgtatgcctggcatgtaaacagtcatcattttatatgtggttatatacctttacatatagttctatagtccttatatattattactggaatctacaacccccagggccacggaccagtacaggaaccgggctccacagcaggcggtgagtcgcaggagagtgagtgaagcttcatctgtatttatagcagctccccatcgcgcattattgcctgagttccacctcccttcagatcagtggtggcattagatactcataggagtatgaaccctattgtgaactgtgcatgcgagctatctgggttgtgtgctccatcaggtgtctaatgcctgatgatgtgtcactgtctcccatcacccccagatgggacagtctagttgcaagaaaataagttcagggctcccactgataggacattatggtaagttgtagaattatttcattagatactacaatataataatagaaataaagtgcacaagaaatgtaatgtgcttgaatcatccccaaaccatccccctccccctttcaccagtctggaaaaattgtcttccttcaaacaggtccctggtgccaaaaaggttggggaccattgtattattatttttattcattaattcactaagtatttagagagtgtctactatgagcctggcactaaacacttcagcagagaattcaagattttgtttttgagatggagtcttactctgttgcccaggctggagtgcagtggcacgatctcagctcactgcagcctctgcctcccgggttcaagggattctcctgcttcagcctcctgagtagctgggactacacgtgtgagctaccacacctggctaatttctgtatttgtagtagagacggggttttgccatgttggccaggctggtcttgaactcctgacctcaggtgatccacctgctttggcctcccaaagtgctgggattacaggtgtgagccaaagcaccgggccaggattttggttattctttaagggatggacatcagtctgtcttggaagaaactctcatagcactcatctgacattttggtcacaccacagcccaaagcatttttatgtcatttccttgatcttggtagttttcctgggaaggaaaaagaggtggtacagaaattgacaattctttggggggcgcggggaggaaacagagaaacagaaatgcgaagtggcttgtttggagccacccgttacccctagtagagctggaataggtctcacatggtcttgacagagccagttatagcacttcccagagtgttaattacatcgggtccttgttcctccacaactgaagaagtcacataccccaaaatgagtttgtggcccaggagggagggtttttcatggcaaggagggcctggaaagactgactaaccaggggtcttcactccagggttcctcagtggttcttttttttttttttttttttgagacggagtctcgctctgtcgccaaggctggagtgcagtggcacgatctgggctcactgcaagctctgcctcctgggttcacgccattctcctgcctcagcctccccagtagctgggactacaggcacccgccaccacgcccggctaattttttgtatttttagtagagacggggtttcaccgtgttagccaggacggtctcgagctcctgacctcatgatctgcctgcctcagcctctcaaagtgctgggattacaggcatgagccaccgcacccggccggttcctcagtggttcttaagcaaatgtgcccacatctcacatgggaacacatggtgaggatggtgaggcatttcccaaacttacttgacgcagacccctctccagcacatttttggaaatactggctccagaaatgctttcctcaagggggttgctctttgagacaaccacccaaaattacaaataccagtttaaactgccctaactgctgcctttctccctcccttaatatggtcagtgagctgcaaagaaacttctcccaaagcctactgggccgagcccagcaaggttcaggggccctgacacttggattctggagtcctgattgggcctcgagtgctggcctctcccatgacaagccctgagaagccaagaattccagccaagattcctgaccttgtttaatgaaactgtttagagctttccacagatcagaaagctggcagtggggagactacagcagttacaaaagatcacggggtcacatttgcagccactgtactttttctaacagttggccagatgaggcagcttctaatttcttatccactcaggcaatgtcattactcaaggtccatctcatctctttgtgggcaccagtatgttcacaggtacactgactgacagtgcaaccttgcattcaacaagaagatgtgaatattgtaccatcatgcactacgcccagctttcctccatccaatcccaatcccactcctcttctgcaagttgtacccttaacacacacatctctggttgcacagaactgttgggttcgatattttctatcttcccttcatttcctcactctcttcttcctgcttcctgttctgatgacatgacagcaatcaggaatctggtggctactatggtgacctgcccaatgaagacctcttaaggggatggaggaagaaagcaggcttagctcttctagaaccttcctttccatgaaaaacagggcacaccttttcttctctaatcatctccctatttaacacatcacaggaaagattgctgaattacaacgtgctatctctttatttagttatttagaggtaggatcttgctctgttgcccaggcctgagtgcagtggcgtgatcatagctcactgaagcctctacctcctgggctcaagccatcctgcctcaggcttcccagtagctgggactacagacgtgcaccaccatgcagagctaatttttttttttttttttttttttagaaatggggatctccctgtgttgcccaggctgttcacaaactcatgggcctaaatgatcctcctgccttgccctcccaatgtgttgggattacaggcatgaactaccacgcccagccacaatgtgccatttatgatctccttttgtaaacttgtctcttgctgctctgcttctcagtttgttgcattgcttcctctctgttctgttttcttccccctccctcccttttttttttgagattgagtctcgctctgttgcccaggctggagtgtagtggcacgatcttgccccactgcaacctctgcctcatgggttcaagcaattctggtgcctcagcctcccaagtagctgggattacaggcatgtgccaccacgcccagctaattgttgtatttttagtagagacggggtttcaccatgttggccaggctagcctcaaacttctaacctcaagtgatacgcctgcctcagcctcccaaagtgctgagattacaggcgtgagccaccgcgcctgcctatgttctgtttgctacataccttacaatatggaccttagactgtaagttcctgggagatggggacattgcccgttttctttattatacagtctaaaatactgaccttaaccaggacattgaataaaaaccatccaatgatgattaagataaatgcaatgattaatatgactttagggcttggctggaagaataatttccttttttttttttttttttttttagagatagggtcttgctctgtcactcaggctggagtacagtggtggatcttggcttactacagccttgaactcttgggctcaagtgatcctcccacctcagtcttcttagtagctggtactacaggtgcatgccaccacacctagctaattaaaatttttgtttgtttgttttttagagatggggtcttgctgtcctgcccaggctgctcttgaactcttggccttcagcaatcctcccaccttggcctctcaaagttctagaattacaggtgtgagccaccacatccagccaggaccaccatttctaaaggcattttgggaaaatcaccatttatttaattatccacctgaacaggagactaaagaaattatagtttttgagaaaatgctttctgagtgatcctcctctgtggtcatctctgccaacaggattcctgccataaaacgtgcaccagagtaatgcagagggcatctgtagatgtagttgtaaagtcctaaggttttcactgagaccccagttaagttggctttgggtaccattggcgtcctcctgttttctttctcctttcagcttgtacaacactgagagcttaagacacatggacttttccagattgccacatggtcatgtgaaagacacaccggctccaggctcagcaagccaggcccacatcatagctcacggcatacaggctcctggttcaggaaaggaagggggccttgagccaccagccatgtcccgcagtgcttgagattgggaggagtggactcctaacaccagagtgatgactcaggtctgagccggcgtgtgctgccccagctggaggcccgactttccctggagaaacactgagcctgctgtcttcagagccagagcagagcagaccattcctgtgaagcatggacttcccaggtgcagaaagcagaggcccatcccaggcagcacagtgtgtccctataaaaatgacggagtgaggcccatggctgtctcaggatgctctgtggtgggtggctttgcacacattgctgccttaatacctcacaattgcttaaagaggtcatttgctcgaggtcactgttagggactgaactatgtgccttcctaaaattcattcccaaagtccttactcccagcatacctcagaatgtgctgtatttggagataggatctttaggaggtaattcaggttacatgaggtcatatgggtgggactgagtccttataggactgggtccttctgggaaggggaagagaaccagggatactccagtatacaggaaaggtcaagtgaggacacagggagaaggcggatgtccacaagccaaggagagaggcctcaggagacaccaaacctgccgagactctgatcctggacttctagcctcaagaactgtgagaaataaatgttggtgtttaagccacccagtctatgggattttgttctggcagtaggagctgcctaatatggtgacagttaaaaagtggtctaaggaccatgtgggttggctcatgtctgtaatcccagcactttgggaggccaaggtgggtggatcacttgaggtcaggagttcaaaaccagtctggccaacatggtgaaaccccgtctctactaaaaatatgaaaattagctggtgtggtggcacatgcctgtaatcccagctattagggacgctgaggcatgagaatcgcttgaacccagggggtggaggttgcagtgagctgagattgcaccactgcactccagtgtgggcaaaaagagtgagactctgtctcaaaaaaaaaaaaaaaaaaaaaaaaaaaaagtggtctaggcccaggtgcaatggctcatgcctataatcccagcactttgggaggccaaggtgggaggatcacttgagccaggagttcgacaccagcctgagcaacacagtgagacctcatctctacagaaaataaaagaattagacaggcatggtggtgcatgtctgccgtccaagctactagggaggctgaggtgggaggatggcttgagcccaggaggttgaacctgcagtgagccgtgatcatgccattgcactccagcctgggtgacagagtgagacccccatctaaataagtaagtagatgaaattaaaaagtggtctaatgttacagttcatgcttgggagtagtagagacttcatacattaacttttgtcttgtttcaacaatctcaggccaaggtttaagattctggatgcctgcaccattagctactattttaaaataaagaatttgactggcttttgtccctgattttggggagacagacaggaaacccttggaatttcctgagtaataggattatctttgttattcacgaaccctttggatcacccctgagtttacgctaacgagaatgacttggaatggggactgatcagcagaaagaccaaacatgtgatttgagccatgtgtgaccagcttgacctcctaacctctagggaggagaaggagactgaagattgggtccaatcacatggccaaggattcagtcaatcatgcctacataatgaaaccccaataaaaactcaggatgctgagactcagtggagccttcccgttggtgaaaagaatcaatgtgccaggagagtgttgcactgtaactccaggaggagacagcacagatattctgcatgtgggaccctcccaggccttatccaatatgtctcctcatttggtgggccctggctagcctcctatataatataaccttcatcatgagtatggcactttccggagttctggcaagtcattctaacaaattattgagctggaggaggtcacaggaaccctcatatttgcagccagttgatcaaagtaaaggtagtatggggacccccaaccttgcagctggcatccaaactgagagctatcttgttggggactctgctcttaaacctgtgaaatctgcattaattccaggtggttagtgccagaattgcaccgcgatattacaactatccttcctcttgcccacccactcagcacgtaacactgcaataccttgttcctctcacaacagggctttgtcagtcacagagaggctattaagcagctggaattatttctgaatgattccaaacacttgaaggcagaggggtttggggtcaacaaacccccaaggttggttgaactttaggaatccaaacaattatcccaagaataatttggtgattctgtgacccatttctatgctctccttcctgtcttctgagtgtcgtctagtccatacacgtgggtttgcttaaaatagttcagctgtcccttttgtctcaaataaatgaggaaacagatcatgaacttttgtctctgctagccattcattcgtgcatgagcccagtcaataacactgagccagccttctgatggtcccagcccccactgattggacacccatcttccagagatcaggtggttggtttccttatctctaaatctcaccaaaatcctgcaaggtacttataattcccattttagtaacgagaaagttgaggttcataaaggtaaaaacatttcccaaggccacagaccatctacatgagatgagacagaattcaaaccggatctgactttgcacaaagtgcgagcttttcccgcattggtggctcttaagtgctggtatattttctgttggtcagcggcaaaatgagaaaaataggataaatgttatgtaaactttcaataaagctaaatgtgtcttatttaaaagactgtccttattcaaggctgcagtgagctatgatcacgccactgcactctagcctgggtgacaaagcaaaaccctgcctctaaaaaaaataaataaaaataaaagacagtgctttattctgatttcatatccttttttggtgtggtgtttcttattatgtaaatgaaggctaaagtagatgataatatttttcatatactgacttggcaaatacaaaaaaatgactgcagccccacctgcctttcatctgtaaattttctggtctctgaaatcaaaaagtctgggaactgctgcatcacgctgcctctacctgtgagcctctgagggaagctccagaaaggtgtacaatctgcactcttccctgtgttcaactgctacagccttaatccaacatgcagtaccaagtatgcaggctccagacagcctatgctgcatcggattctggcttcatcgctgggacccactcccagcctctgactcagtatattgggggtgccgaccgggaacttgcatttccacatctcaagtgacactgaggctgtttgtctaggaccacactttgagaaccgctgatttcaatcagtcaccttgattctgctccctgtgtgagtgtgagtgactgcttcagacatgggaataatatggaccagctgtggtctggggtggagtccggaatcgaggagtggggagggacatctggggaataatttcctctatgataaaaagagtcacgatgggaagaaagtctcttttctgcttttgttttggagatatagtctcgctctgtcacccaggctggagttcagtggcacgatcttggctcactgcaacctccgcctgcccggttcaagcagctctcctgcctcagcctcctgagtggctggaattagaggcggccaccaccatgcctggctaagttttgtatttttagtagagatgggatttcaccatgttggccaggctggtctcgaactcctgacctcaggtgatctacctgtctcagcctcccaaagtgctgggaattacaggcgtgagccactgcacccagcccctttcctgcttttgaacattattgtgcaaggaggtggtgcctgggctgctggggcatcccagcagcagtgtaaccactccctgcagagaggacacaagtcaaggagcctctagaacttacctcgaattaactgcatttaattccaccaattaaagagaaactgtgtggaaagattataatttttttcttgctcatgaatgtaatttggtgagaatactgtagttgtactaagggctaagagtttagaaatctttctaagatttatgcattgtatgtaggagagtgtgtgtgtgttatatgaatgcgtatgtgagtgtgtattcaagtgtgtgcatgtttgtgtatgtgtgtacatgagtatatgtatgtgagtgtgtgtgtgtgaatatgtgtgtgcggttgacagacccaccaaacttaacattgaaggctttagacatcacatagtcattggtttatatgttaaaccaatgtttaatgttaatctcccaaaggtgagtgaaaatcggtgatttacccacacttctctaactctgttactcatctgtggttaaatgaaatggagtactgaggtcattatccttttggaggattattacagttctaaaacacctttgtatcaatatggtctactgatattttttgttatttataaaagattgacactattttaagaagaagggccaaagtaaaggaatgccgataaagaattttgataataccaacatccggcccactttattgtagtaacatatcttaagatctatcgacaatttaaaatttaagaatcactgtacttactgatctattgctaccctaaaaggactgcatgtgatattttaaaatcctcttccctaaaagaaagaaattcttgatcagtttgaagtggcactttggcatttcctggagaatgtgtttctccagggaatggtcaaagatcactgggattctagcaggccctgctagtcgcatgctcttctgagtctcgcacagttgacgagaatatgctggaatgcctctaaacatgtgtcccaccgtgcgctacaaaatcacacactgcagtctctaggaaggatacagcccctattgggaagcaacagttagtacatgaacttgtggcaatttcgtgtatgagtaatgggctggaaagaccagtcactgtctggttgataagggatacagtgtgccttcagtacagaccttcccacagatcaaaaccaatatgatccattcggatatagttgtgcttcagtatcattttaatataaagccttaaggatggggtcatttacatgatactgggacgcaaccattgaaatcatgttttctattttatccccaagaatgatgactgatttgacatcactggagcacaaaacctagtccacttatttagatggtaatctgaactcagtatgaacacatgtgcatatatattctgcctgtcatcctatgaccttgacacatgagttatatatggcgttggagggatgagcagtaatcaccagtgttcatgaaaagatcaggggatgatgtgttggagatctggaaggttgggcagttaagacattttttgatggactgtcaacccatcacttttcaagtgaactgatactgaactctacgactactccatgaagccttgcatgaaatcgtatagaagaccagattattagggataatagcaccataaattatgtagcacttaatagtctcttaaatgctttcctcaaaagccaaggtagttaacattcccattttacacacgaggtagcaaaggccagtgacttgcctgggttaccatagctactaagcagtctggccgaggcctctgatcccagcctaagagatgcccatgttgtgccagacagtcttgggggcgcttcagatgttctagtgaatttaaccctaatcacaagtctatgaggcaggtactagtttcaatttacagagaaaattagagcagcaagacaggaggcagccagtgttctccgtttacagatgaagaaactgaaggttaaggaggttgtgcaaatggccaaggtcacgaagctgtcaagcatcagagtcaggttttgaagccaacccaaccggccccagagcctgtgctctcagcgtgctggaacctgctggtcctctgcattcaggtggcctggttttgaatcagttctcccatttgctgtacaactctgaataagttactttacttctctgtgccccaatttcctcatctgaaaaaatgggaataataacagttacctacctcatagagttgtggggctgaaaagatgactcagcacatattaaacgcttagaacagagtctggtacaaaaataagcgttcaattagctaatatgatgattaatcactaagctatataatttcccaaagcatttgaaatatggtgtataaaattcaggttcaatctattaggttggtgccaaagtaattgtggtttttgccattacttttaatgcaattactttcgcaccaactaatacattgaacttttcaggaatgtgtttgcttattagcataaaggatgcttacattttctatcatctggtttctacctaaagcagagatttgcaaacccacaggagtctgctgagatccccgcagagcctccctgtcagtgggcttgggggtgaaggtgatggggttcagaccttctccatgtgctgatattggacaaagaattttgcagcaaaaagaagtttgagaatcgttggtctacaagactctatagtagggtcacatggtggcttctgtccattactatggatgcaactccctgcaattgtaaagttcaaggccccagctccgctgggcagagtgtggtgactgtaatggcatagggcctgcccagagagtaggtggtttgggcacaactgtactcctcacctctctgatacactgtctctcgtaaacagctcacagtcatatcatggaggaactcgagagtcaaagagagcaatccaatagtatgggctgttgatggctcctgagcaggggtaagtcatgaaggagcctggaaggatggatactctggttgtgtcatataggacaaacggggatggccaggaacatggaactaggcagggtggcaaggagctgctctggtgacaatgggcacacagaggatgctgagtccagggtggcaaatgtctacactggggcatgtattggagaggagaaggaaagttgttcccttaccagtgaaaaaacaggcaagacttaaggatgtcattgatgggcacagaaaaaaatttcctggcttctaaagcctggccaatttggagaactgtgggcttgctttcaaagcaggtgcaagaacaagatgacccgggttggaggaggagtaggaatgatgggcttcggttgccatgaggtgctggggctgccaccgaggtgttcagtcacaaagacctagtgggcggccccaggggtgggacaggggctctggcaaaatatggaaatcttccacatggctttgacagctgaactctcagctctgtgctgggcaagccaggaagccacaaacagagattcaagggcgatagggaaggcccgctggggtagaagactcagagaaaaatacagagcagctgagatttccccagaccgttcgcttcctccctccaccaccagggatacctggccaggctgcactcctctctcaggggaggggctcgctcgctccctccctccttccctccctcccttcctcccttcctcccttccttccttccactggatgggacaagttgcagcagaggctgccagatgagtaaatctgcctcctcatgtcctcctggatccccttacaagaaaggacagggtccagcgggtgggatgtgtggacaagggaagccattccaggcacagcagagctgaggaagaacactcagcccattttaggaaacggaagaaccagccactcctggactcgtaaaaagttctgcaaccaaaataatcattgaccacctctagacaggaactcctaacccaaataaacggatgcttagatctgcatagcacagcggtagacaaataataaatatttaccaaacaagcaagaacttgaattaagcaatgtgcccaaaatcaaactgtgagttatggattaataaaaacgatgacagccacagatttgttaccccttgggtccctgtgaccccatccttatgctctacatagaggtgtgtgcacacgtgtgtgcctttcccctgtaaatacagtcgtttgcattttgcagaactgcattgtgagttgagtttgttttaatctccccaatcccttcttatcccccattagcagaaagacagaaactaggagcatgtagtttaatgtcctatcctgaggctcccatctgcacagagtctcctatggggcaccatagagaggacatggaaaggattttgtgaagatatcacggaaaaaataactcagtagtaaaagaaacaaccacctgcaatgttctggagggctaagtcttctctccctttttttctctctccctttacgtttgagccacatgaaattgtccccttagcaggacaaagtctgccaaatattggcaatttcaaatggtttcaatgaatacattttacaacaggttaaaattggcatcaaagggacaaggagcacagacatggaggtggtccaggaagaagggggaggggggcaggggcgcaaagaaggggtgttgccaggcaactggcagcgtggacccattaggctggggagatggggatggtctcttctcctctcctcaaccagcacctgggtgtgagtgtgtgtgtgtacgtgtgtgtgtgtgtgtgtgtgtgtgtgtgtaaacgcggcagggggttccctagatgatcgcatcaatctgctgtatcctgatgctcagccctctctcacagcctcttggggagactggaattcccctttgttctaaccagggcagaaagaaagcttaccgacttttctacaaaggccttggctgaagaaggaagatggatcgtgtctcctccctccttaccaagggggaaacgacttagctgcttgtgctccccaagagtatgttttatggactatttcttattcctctccatcactcaatgcgttttttattacaaatagatttaccattgcgttatctgtctgtgctctatatcttaccatgtctttcttcaccatgtgcttttcaaatgttaaatattatcagccacccctgggggctgggaagacatctgttttgctcatttggtggagtgcccagctttgcagagaggagcctaataaatgatgatgggatcgcagtgaggtgtgaggtcagcccaaagtggggctgcctgaacccctttggctcttgtttcaggaggtggcctggtggcctgggaggtcccggacagaaggttcataacactgagtccctctgtctgctcccagcttctgcacacgccttcccagcccttggctgtgacagaaactcctggtggattcagaccagacaggagcagatggcagacctggagcacgcctcggtagatggcccagcaggcagaccacaatgagcccacctgcccacactactcagttgggaagacacggaatcaactccatattctctgcttggcaacatgcactttgggggggattcctgctttacttggtagaaaacaatctcctgcattttttttttttttttgatacggagttcgctcttgttgcccaggctagagtgcaatggtgcgatcttggctcactgcaacctccatctcccacgttcaagggattctcctgcctcagcctcccgagtagctgggatacaggcatgcaccaccatgcccggctaattttgtatttttagtagagacgggctttcaccatgttggtcaggctggtctcaaagtcccgacctcaggtgacccacccgcctcggcctcccaaagtgttgggattacaggtgtgagccacagcacctggccatctcttgcatttttgcagaatatcattaaccacagaagttgctaaggctgggctatgagggtgaatataaacatgggtgtgcacctgtgcatagagaatccaagtttaggccgggcgcagtggctcatacctgtaatcccagcatttgggaggccgaggtgggtggatcacctgagatcaggagttcgagaccagcctggccaacatggtgaaatcccgcctctactaaaaataaaaaaataagctgtgggtggtggcaggtgcctgtaatcccagctacttgggaggctgaggcaggagaagcacttgaacccaggaggctgaggcaggagaattgcttgaacccaggaggtggaggttgcaataagccagtaagccgagattacaccactgcaccccagcctgggtgacagagtgaggctccatctcaaaaaaaaagagaaccaagtttattcacctattttaggtaagattattacagttctagatttttaaaaagtcatacatttttttttctagcccataatagcccagactatttacttgccctcagtgctattttactgacagcccatattaatgtactcgacctttaagatgggatatcaccagcatcgctgtcagacagaggaaagtgacaggaaggcgaccattatttcatccactgctgtggaagtgtcttccacacctgctagcccgagacttacgcaggacgcacaagtccttcatgaggatgtgtcacatgtttcaggctttcccagataggttaggaagtgagttcacaggaatgaaatgacctgggtaagcccatcttccattgcagacctgagataaggttcgaagtctttggttgccatcgtttatggctctggtgtcaggggctggcagaggagcatattccaggtgaactattaatagatcatatcttgtgaatcttgggtttttattatatatactggttatggtgcagtgaaaagagaatgggctatactatcagaggacctatgctcgagctacctatacttcactagctacgtgaccttgagcaagttatttaatctttctgaatttctgtttgcttggcacctactttacacagttactgtgaggattaaataagatatgctccatataaattctataaagaattgtaggccaggtgtagtggctcatgcctgtaatcccagcactttgggaggccaaggcgggtggatcacctgagatcaggagtttcagagaagcctggccaacacagtgaaatcccgtctttacaaacacacaaaaattagccgggcatgatggcgggtgcctgtaatcccagcaactctggaggctgaggtgggaaaatcacttgaacccgggaggcagaggttgccgtgagcagagatcacgtcactgcactccagcctgggcgacagagtgagacttcgtctcaaaacaaaacaaaaaaagaaaaagaaaaagaaaaagaattgtaaaatgtagtcattattgtgccaaacatccagtattatatctgggtaaccccaaacaattcgattgccttcataatattttctctagcttaaattgttttctatcttctatagcaggaatccccaacccctgggccatggactggtaccagtctatggcctgttaggaatggggctgcacagcaggagatgagcagcgagagaagcttcacctatacttatagcctctccccattgcttgcattactgcctgagccccacctcctgtcagatcagcagcagcattagattctcgcaggagtccaaaccctacggtgaactatacacgtgagggatctagtttgcacactccttataagaatctaggccaggcgtggtggctcacacctgtaatcccagcattttgggaggccgaggcgggtggatcatgaggtcaggagattgagactgtcctggccaacatggtgaaaccctgtctctactaaaaatacaaaaattagttgggtgtggtggcgcctgcctgtaatcccagccactcaggaggctgaggcaggagaatcgcttgaactcaggaggcgaaggttacagtgagctgagattgcaccacttcactccagcctggtgacaaagcaagactctgtctcaaaaattaaaaaaaaaaaaaagattctaatgcctgatgcccatcactcacatgtgggaccatctagttgcaggaaaacaagctcagggctcccactgatttgacattatggtgagctgtagaattatttcattatatgttacaatgtagtaatcatggaaataaagtgcacaataaatgtaatatgcttgaatcatcctgaaaccatacctcccacaccccatctgtggaaaaattgtctttcatgaaaccagtccctggtgccaaaaggtttgggcctactgctctagaaatagccatccaaaagaaatacaacgtgagccacaaaagttagcccaatataagattttaatttttttttttttgagatggagtcttgctctgttgctgggctggagtgcagtggcgtgacctcgactcactgcaacttccacctcccaggttcaagtgattcccttgcctcagcctcccgagtagctgggactacaggcgcacgccaccatgcctggtagagacagggtttcagcatgttggccaggatggtcttgatctcctgacctcatgatctgcccacctcagcctcccaaagtgctgggattacaggcatgagccaccacacctggaccaagattttaatttttttagccatatttaaaaagtttaaaggtgaaatttattgtatatttattttatcttaatatatccaaaatattatcattttaacacggactcaccaaggcaaaaattatttacaagacattttacttaagtttcataggaagtcttcacaagctggtgtgtgatttatacttgctcacagctggcgtgtgatttatgcttgcacacagctggcgtgtgatttatacttgcatacatctccatttgcactggccacattttgctcaatggccacatgtggctggtggctactgtaccacgaggtgcagcttagatctttccaaatgcttctgtcttggttatgaggagattatgtctcctcataatctcaggattatgagccctgggtaagacatggcaataatctaactgttatctttaattcccttagaaaacacagactagtcacagtttgctccacttcttggaatcatagggacgctttgttcctctatttgcacacagtggacagttgtaaatgtcttgccaatggccactaagggactgggtcagaggggagagatgtggaaatcctagggcagcttggaacttggaaaggagactcacatcatgcggcagctccctggagaaagcaaggtgcgaggttcactgtggcagaattgaggggatggagagcactcctatgtgtaaagctcttatcatcaaagggaagaagggccgggcgtgttggcagtggctcacgcctgccatcttaacactttgagaaggaaaggaccaaggcaggagaatcacttgggatctggagttggagaccagcctgggcagcagagggagaccctgtctctctaaaaatttaaaaaattagcaatgcacatctgttagccccagctactggagaggctgagatgggaggatcacttgagcccagaaggttgaggttgcagtgagctgtaatcgcaccactgcaccacagctggttgatagagcgagaccctgcctgaaaaaaaagtgggggccaggtgtggtggttcacacctgtaatcccagcactttgtgggaggctgttgtgggtgggtcacctgaggtcaggaattccagaccagcctcgtcaacacggcgcaaccctgtctctactaaaaatacaaaagtagctgggcatggtgatgcaggcctgtagtcccagctactcgggaggctgagacaggagatcgtttgaacccaggaagtggaggttgcagtgagccaagattgcaccactgcactctagcctgggcgatagagcaagactctctcaaaaaaaaaaaaaaaaaaaaaaaacccaaaaagtggggatggggaagaaattcggccaaccattcatctaaagtgatggggagaagcactgaaacgaagcctgtctagcagtagaaggtcaggtcggtttttctggcactgggcaggctccctgtgagacaggatatctacagtctcacaagcctcaagagaaccaaataaggaagggccacacctcagccattccattctagtgaaaatccactctatttttatgaaggtcaagagaaagagtccagaatctttcctactaacggcttcctgtaccccatctagcaactctcactgtccggaaattcttacttaaatcattctcactatggctaaagcacacttccctttctctgctctcaacatactcccccaaatatacattcgggtcagagaataaatgaagaaaataattttcaaggagcaaggatatgacaacgagacttagggagttcggctgaccataaaacatgctccgccccccatatctggctatagcgtcctccagaaggttccaagactgcgatgagggtggctcctctcattttgatgaaggctttttttctttttttcaggtgggggacaaagtcttgctctgtcgcccaggctggagtgcagtggtgtgatcttggctcactgcaacctccgcctcccaggttcaagtgattctcctgtctcatcttcccaagtagctgggattacaggcgtgcacaaccacaccgagctatttttttttttttttttgtatttttagtagaggcagggtttcaccatgttggccaggctggtctcgaactcctgacctcaagtgatccactctccttggcctcccaaagtgctgggattacaggtgtaagccactgcatccggcctgataaaggctttttttaaagtacatttccaactggtggaaacaattttggaagacagagcagaagatgctgtctgtgggctgaactgcagggcaatctgtctatgcaacctgcatgtgtccacaaccaaggctgcaggcatgctctggggctgaatgctcacgtcaccttccagctgctcttaagtggaatttcaggacttaaggagctacctggtaaagacgtgggtgtcaggaaattgcctgtggatttagggatgagcgtctcaaatattaattcctagtatgtcactcttgactgtttgccctcccctactgtgagtaacgtatgatctactcagagcaatagaggatttggaagcacagatttcacttggtaatctcaaagtgctatatggaataagcatgaaacattaggatgacaggcattttttctctgcaacccaaagaagggaaatgttatgctcggagtggccgagtttacagtgctgcatgaaattatctgtgtggttgtctgcttactgcatcctcctggcaagaggcaaatggggagtcggtttggatgccgtcagctttctcgcccaacactgatgccatagaagctcctctgtgtctgaagatctgaggtatagcctttgatgagtatgctatcctcatagtgggtaaaaactaacctccccaatctgccccatcttattaatatctttcagtcagccaccctcatgcacacccatttacttctctgggggagagaaacacttgctctaaacctgactctccatgttacaaaccttgtcaggtcaatgtaggtgtctttcccacccatccccatttctacagctccaggtcaaaagatcaggaaaggcattgctttgtctaaggcttattacaaatgttctgaaattattcttaacaatatcagtctcagtgtttaatatattttgatgactaaagtataaatgaacctgaaggctaccactctctgaatgtaaaatatgaaatagtttaggtcaaatgttttattaaaaacctagaggtgggtccagatgagctagagaatccagattccctttagaaaggatactgcccaacagatagaatcctgggcaacagaattttgcagaggagaaaaaaaagagtgatagatttaagctgcctttcattcagtagttttaattttgtttctccaagttttgctaaagcccattctgcaattaatttagaacctttccatatatataaatataaatatatatatgtatttagcttaccacacacaaatactatctatctatctatctatctatctatctatctatctatctatctatgtatacatagatacacgcactatcaatgcctagataaatagtgcgtgtatctatctatgtataggtagtgtgtatatctctcagtgtgtagatagattgtgtgtgtatctatgtataggtagatagtgtgtgtatctatagatggattttgtgcaagtgtgtgtgtgtgtgtgtgtgtgtgtgtgtgtgtgtgtgtgtgttaagctaaatcctctgtgaagcaactggtactctggcaagaagtctttgggggaagtcatgtcaagacatcttaggtttgtccattctttcattcaacaagtctttatttagtgacattatgtgcctgaccctgggctaggtactggggatacaccatgatggagacacagatctagccctcaaactgttgggggctccaggaagtgataacaagtacacaaccaatcacagcgaggtgtggccatgtcataagaaagaaacgcagtacagactaggcggagggggtcagggaaagccttggtggagggtgtcttccaatttgtgatgtaaagacctaagagagaccagccaggtccagggcgcgggggtgtgggaaggagcgtgttctaggaagagagaataacacaggaagcctgttctataaagcagtggaaagaacatgaacttctctcgttcgcctaattcaacattttcttgattttatagggttgaggacaactgttcccaaactgcacacatcagtaattaaatctatttttttctgaaagcaggctggccaagagatagtttctaaactgccatttgaggtctcatttcctattccagaaggtggcttctttctaaacctccaagctttgattcaggaaaagcatgtaaaatacaccagaccactcgcctataaactcttcgcactgagtcttggcaatttgaagcttcaaatgtttctcagttaacgattctgctaattaacgagatctcactcaatttgatggtttccctttattgcctcattcttccaaattcaaaccacaaatttgacttttaatgactttaggccatagagtctagcctaaaacagccgtaatctaaaatgcaggagaaccctatatatagggatatgttaatcacagcatttacttgtaatagtggtaaaatttttttttttaaatcccttaaatatactcaaatggggaaatgattagataataatggtatatcaatttctagaatttatgcagctgttcaggagaatgacaatttacagtattaccataacttagaaaatgttagcgaaagacaatggtaagtggaaaaggaaaaataagatatgtagaattatacatgtactatgattacagccatgcaagaaatataaatatgaaaaatgctggaaagaaatccaccaaaaagggaacaacacttgaattagtgtcatgtgcttatgagcctttttcctattttctgtttcctatattgcatttataaagcctttatcatttgaatcctattaaaagtattcactcaaagtcagcagtttgaacattttcaattccaagcagcatgtacaaggcaacgcaagacgaaagtgtctgcatgcgagtttccccttcgaagtagcatcacttcccccatgagcagatggcatcctctcaactcactgatgaactgcagcttcctcacaacaaaatgtgatagagaatgagacacaatgctctaggacttggagatagacatctaagaataaacagcaagcaaatgtaataaaaattggcattgaacaacagatctggaatggtaaacttttaaagtcagagttggagacaccattctttagagctttgggtcaaacaatggtctgtttaagaacaagttgaaaaaggtgagggtctatgattccaattacttctccaattttgctgacactgatgtgttcttagttggaattgattgatttcctgcatctcagtttctccagatgctcacaagtgatgccaatgtcaactcatgagatggggtaagaagggggtcgcttagcacttagaaagaggaccgagtacagagattgttcctctttaatctcaactggaaaagaaaagaacaaacctttaggccaggcacagtggctcatgtctataatcccagcactttgggaggccgaggcaggcagatcacctgaggtcaggagttccagaccagtctgaccagcatggagaaaccccgtctcaactaaaaatataaaaaattagccaggaatggtggcacatgcctgtaatcccagctacttgggaggctgaggcaggagaatcgcttgaacctgggaggcagaggttgcagtgagctgagatcgtgccactgcacttcagtctgggcaacaagagcgagactctgtctcaaaacaaaacaaaacaaaaaaacaaacaaaaagaaccaaacctttttctatcccctctgagcaaggaagactaaatcaattttagttacagcaagagttacttaggttacattgtagttaactccttccaggcagaaagaatagctaagggcattgtggaatttccttttctagaaatttgtaacaatagggtagatgtacatctggccttggatgccttaggctggtgtacagatacaaccaaaatagcacacacacaaaacaccctggtgggtcctagtcattctctcacagatattaacagagatttaaaaacagtttaccaaatcccccttcatccccagctggatcaaggtctgaaaccacatcagtcaccaaagaaactcagaaagttgaccaaaagcgatttacctgtactaggagttccagcttcctgtcatcaagaagatgtacttgacatcggcggccctccgtcatctaagagggaagagaaatggtagtcactgagagtctagcagccagacaaagggttagagggtcgccgacgctgcactctgccaggcatattcctctgggcaaaacttcctctgggagtcggcactgtataatgccaggagttggaaggatcagttcattcattcattcaaaaatatctattgaggccgggcgcggtggctcacgcctgtaatcccagtactttaggaggccaaggtgggcggatcacctgaggtcaggagtttgagaccaacctggagcctgactaacatggagaaaccccgtctctactaaaaatacaaaattagccgggcgtggtggtgcatacctgtaatcccagctacttgggaggctgaggcaggagaatcgcttgaacccaggaggtggaggttgcagtgagccgagatcgcgccactgcactccagcctgggcaacaagagcaaaactccctttcaaaaaaaagaaaatatcaattgagcactttctatatgccaggcacttttctgggagctgggtgtaccacagcacacaagacaaagttcccatcctcatggagcttatattctaataagggagatgtaaaataaattagcaaatatatatataacatattctcaggggtggtgggtgttgttcattcttcacttattcttccattcaataattgtacccgcatgcattagggacacagctcaggatccaatctctgtctcctcttcatttatcccacttgctggtaaccagaaagcagatgaccacccacctggcaatgaatttgatttctgtgttagttaatcggccccctccttgtgtatgacctgattccctacagcgctgtcaccaataatagaaaagcactggcgatatgaacccacaggcaaatccaaccccgtcccttgtgcctttcaggactgaaatctctgagtggtataacaggaagcctgggagacccaagtctagtgttggtcctgctgcttacaaggggctgcaggactctggacaagttaccgttcgtctccatgcccctgtctcatatccaaaaataaatgggccgagcccagtggggtgctggtgaatatttaacaactggctttctggaaggaaaaagcctgatttgtagcatttgctggagcctggcatcaccctcaaaggaaatcctttgaagaacaagccttctcatggatgtcaactggtgactgtcctaaccataaactgtcttgctgcactctaaatacctttactgcgtccgatttcaagccactgtcatgacaacactgctagtaattccaacatacagacacgatagacaaacatagcctcaagctcatagaaaacagttaagtgccataaaaataattaggaagggatagatttttattatctttgtttgttaacaccatgtgtttaagcatgtgtacataatttcattttaacaatggctatgctttataattggcaccccacattcctgaaaatgtagcaattggctctcccaggctagtatgaaatagctccaacgctcctctctggaccagatgacacataagtttccttccttgtatttctttagaggaaatcctttagagaactcaatgcctattttatatgactgtatagtccccattaaatacagttcttttcccctgtatttagtggctaaccggccgctttaagcagatctaaagaaaggatgcgcatcagtagatcctggccctgtctccttgtccagccatgagggtccttctcataaatctttcctcaaggaaagataaaaaagacagtctcagatgagacacaatcttgcctttacacacttagcacagtgcctggccctaagggagctcttgttttaatttaatttttttttagacagagtcttgctctgttgtccaggctggggtgcagtggtatgatcttaactcactgcaacctccacttcccaggctctagcgatactcccacctcagcctcctgagtagctgggactacagagcagtctcgtttctctcatgcgccacgggacgtaccaactctccaggctaagaataacgctgacatttctcaaggcctgttaggtttggaactgctatcctgatgagaatgagcgtctctgcaaatggaagcaggtggcagcacagtcgcgggccgaaggtgcctactgcactcacggctcagtcccacccagtggccagccaccctgcgtccttcgtgaccctctcctcgaccctgagctcctggagaccaggagttatggactggattgtgttcccctaaaactcatatggtgaagccctaacccccaatgtatttgcaggtacggcaagattaaacaaataacaagaaaagatagtctcttctcttctggttcaacagggattattcacttatcaccaacatatccaaagctgtcatgaaatcctatgagaaaattatcttattccttcctcaaaagaagtcatcccatatttccatcaagtcgggttttccttgttttgggatctaaaacaacatagcatgtcctgcttacatgggggctaatctcaatgtctcttgattctgagttataacaatgacttagcagcccccagctctgagaaaaatcaagaaaagtttcacatactcctaaacactccaacgaacagattaaacacagaggaaaaacttcaatccaaagccttgccattccgcacatacaagtcaaagcaggcagctgtggacatttgatgagtctatgcaaagtccttattcacccgttgaacccctaacttcaggtgttaattgtcttagtgggaaaatgggctcaagtcctattagaatccatcaaccttgcacagagtaagcatcttcactgattgacttaatttttaaaaatccatcagcttcctttcaatcattccctaagttcaatgaaagccattacaattttaaattagactaaaatagctgctgctttaccaaaatgtataaatgattccttcatcaaaaaagtacactagaaatgttaatttcaagtttcagtagggcagataatagcaattgcacaggtactttagataaaaatttcgagctacgctgattcagttctcattggaaagaacctaaggtcaatagagtaaaagttttaagaaggaaaatggtatcacattcagaaagttatgttaaattctttcaaaagtttaatcatagatttgagaaaagtctcgacagagaataggggagagttttaagaaagaaatgctgtttgttttctgcatctataaaacagttctgagcttcgttttatcataaaaggttaagggtataaacatgctcttgagttactcaatcacagtctaataaattttatgaaaacaaattggtatctgaaagacattattggatcaaataaagttttaatcgcagtaataaagaagatgaaatgtatcattttctcgaaatatttccaagctcacaaagttcacactcacacttaaaggtcttccctgaggttctcattttcatctgaaaaaaataatcctcattacataaaacaatctcaccttatctgctcagcaatttaaggaagtaactatttatcatgatgttagtatccaccctaggtcttccaatttctttcctcttctcaacagtaattcctaggaaatttacaaacatgctccgtattttaatgcctccctgtagaaagcaaaatgtctctgcaaacagcacagagaagtgtctaaacagactcacctttgaatcatcatgtttttgaaggtacagctttcttttgacagcactgctgtggtttatttttcaaaagggagcacctgcctgttgttccatattcaagtaagattagagtatcctgttcttatcatcagttcagaaaacttcaccattctgggtgtgtacatagaaagaattgacatctgtagctttgtctggcttgccaggcactctgaagttttcttttcaatactaacaattgtgaaataatactgctttcccttgttttgttctgttttgtttttttttttgtttcttttttttttcatttccagctgttcagacactacgggagccctggcatcaccctcaaaggaaatcctttagagaacaaggcttctcatagatgtcaactggcaaccattccaataatcaactgccttgctaccatacaattctagcccaagcagaggcctgccaagtgccctgtgattctaaaggaaatacgaaaaagtgttcttttgaaagtgaagtgtctgccccaatttatccaactttgctgctaaggtacactctgacatgaagactgtgcagaaacatgtaaacacatttatgatactagcttcagtgaccacagcagactatcactgatatgtatcctggcctggcgtggtggctcacgcctgtaatcctagccctttgggaggccgaggcaggtggattgcctcagctcaggagttagggaccaacctgggcaacatggcaaaaccctgtctctactaaaaatacaaaaaaaaaaaaattagccgggcatggtggtgcacgcctgtagtcccagctacttgggaggctgaggcactagaattgcttgaacccaggaggtggtggttgcagtgagccaagattgcgccactgtattctaccctgggtgacagagtgtgaccctgtctcaaaaaataaaaataaaaaacaaatgatacgtatcctaattgtcatgcacgtggacagggattaagaggcaaaaaaatatatatataggagtagatgtgcaacgctttaggcttctgggtggtttacaccactccacctcacccaaatatgacttaatatgttactttttttttcagttaaaaaaagtgtaaaaaagaaactttatctagaaagatgagtgaccctatttggagaggtgcagagtacccagatcagagttggaatttaatttttctggtttaggcttagattggaaacagtcataagacagcaacttcagaacattctgctgcccacaccacacagggacacggaaagtaatagaatttaacgtttggcaaagtcttttctctctctctctttctttctctctctctctctttgtgagatggagtctcattttgttgcccaggctggagtgcagtggcatgatctcggctcactgcaacctccacctcccgggttcaagcgattctcctgcctcagcctcccgagtagctgggattacaggtgcctgccaacacgctcctgtaatttttgtatttttagtagagacggggtttcaccacgttggccaggctggtctcgaactcctggcctcacgtgatcttcccgccttggcctcccaaagtgctaggattataggcatgagccaccacaccccgccatagcaaagccatttcttaaagacagtgcaaacatcttgagtcaaaaaaaaaaaaaaaagaaaaaaagaaaagaaaaccaaatatgtcttactgagaatagttgctctttgaattcaaaaaaaagtcaaccctatttgcatgtattgcttcctatcacccttttctcaacataccacctttctttcctctgtgtctttttggtttagccacttgttgatgtcctctgtctcccttttctttcttgccctttgcaaaataatttcttcttccttctttctttcttttttttttttttttgagccagtgtctccctctgtcactcaggctggagtgaagtggcacgatcatggctcactgcaacttctgcctcctgagttcatgcgattctcctgcctcagcctcccgagtagctgggattataggcacccgccaccatgccaggctaattttttgcatttttggtagagatggggtttcaccatgttggccaggctggtctcgaactcctgacctcaggtgatccacccgccttggcctcccaaaatgatgcaattacaggtgtgagccaccgcacctggcctgcaaaataatttctatgccatggtatatgcctgtgcaggaggagctgagaagaaagaatcctagttccactgtttagaatgtttttgtttcatttgggtttttatttatttttttgagaaagggtcttgctctgttgtccaggctggtgtgcaatggtgtgatcttggctcactgcagcctcaacctcctgggctcaattgatcctcctgccttggcctcccagacaagcactggaattacaggagtgatccaacatgaccagcttacctcatctttttaagccttgttccttgtctgtacaagagggataaaatagcgtctacctcttaggaatcctgcaatgattaaattaagtaatgtttggaaatttcttagtgctgtacctggtacgaagtatatactcatcataacgttagctgttaattattatcagttgtatggttttggaaataatatgtgttgaacccatagtccttgtaggacaggaggtagatactatcaggcttactttattttatttattttatttgttttattttattttattttattttattttattttattttattttattttatttatttttatagacagggttttgctctgtctcctaggctggagtgcgttggtgctatcatagctcactgcagcttcaacctcccaggctcaagcgatcctcccacctcagcctcctgagtatctgggactacaggcacacaccaccatgcccagctaactgtgtttattttttgtagagacacgtctcactatgtaaattcttggactccagtgaccctccccaccttagcctcccaaagtgctgggattacaagcatgagccaccgtgcctggcctagagcatttttatagaaatgtaatgcagttgtgcaaattgatcctgaacccagaaaaaaacatgtgttttttaaaacaaaaagtaaaaaaatagtcaattgacacctgtattctcttagtttcctgaggctaatttacactgaaactatttcagggaagacactgtggggcggggctgagggaaggtacggtgagggaggagagctgtttagtgagatgttcacaggcctgccaaaacatttttttagtctagttaccaattgcctactcgttgacatccccgtgaaaagcaagccaccacgttgtttctgatattcatttttgagacaataaatttacaagacattaaaatcagcaatattaatgactcactagaattgcacaaaacaaacaaccttccaagatatgcttcagttaggaaaattaccaatactccccaaaccacctgaaatgctatcctttaaaacttagtcatcagacagaaaatttagatttcaaaagccaaggccctaccagtgacttaccgctgacagcacgtcttccccgagcacagtcccttaaaccacaggacaccctgaggatgtcggatgcgggacagcagcccctcatgatctgacctctgacccaggctgttgtgtggctcagaaggaaattccaaggccatgactacaacttcccggcacaagtcattgttggtgctcccgggtactgggtcacctcaagagacacatccttctctccacttcagtttccttcacagaaaagtgaagactcaaagtccaatctaggtacccaaacattgcaagaccacaaaatctcaatcatcataaagcacatcacagccaggaggagatgaatgaatgtcacgcagttacagcaacctcaagaaatttacgggaaatacacacatggaaagaaaggacttcaggcaatttaaaatctgttaaaacattaatccctgccctgtaatcccagcgctttgggaggccgaggtgggcagatcacttgaggtcaagatcagcttggccaacatggtgaaacctcttctctactaaaaatacaaaaattagctaggtatgttggcacctgtaatcccaactactggggaggatgaggcaggagaatcacttgaacctgggaggcggaggttgcagtgagctgagatccagccattgcactccagcctgggcaacagagtgaaactctgtctcaaaaaacaaacaatcaaaaaaattagatacatacagatagtgtaatggttactacagtggagtcagttaatatgtctatcatctcacatggttactttttttgtgggactagagcagctaaaatctatttatgtaacaaaaaaccctaacacaatacaattttaactttagtcctcatgttgtacattacatctctagacttgttcatcctccttatctactgtggttctgtatgtatctacacatctatgggtatccaatagcgttatgatgtaaacttcaaatatacacaatcatattttttgtttgtttttttgttttatgtttttgaaacagggtctcactccgtggtcccagctggagttcagtggcatgatcacagctcactgcaacctctgccttcctggggctcaagagattctcccacctcagcctcccaagtagctgggattacagacgcaaatctccacacagggttaatttttgtattttttgtagatatggggactcgccatgttgtccaggctgctcttgaactcctgggctcaagtgatcttcccaccacagcctcccaaagttctgggattacagatgtgagccaccactttcagcccatatagatatatatgtaatatatataaaataatatatattatatattattataatgtatatgatataattatgatatataatacataataaatatataatatataatataatatataataaatatatataatataatatataataaataacatataatataatatataataaataacatataatataatatataatatataatataatatgatatataataaatatataatataatatataataaataatacataatataatatataatatataataaataatacataatataatatataatgtaatatataataaataatatataatatacaataaataatatatataatataatatataataaataatatatatataataaatactatatatgtttattaattcacctatctgggcatggtggctcacccctgtaatcccagctacctaggaggctaaggcagaaggattgcttgagcccaggagttcgagaccagcctgggcaacatagtgagaccccatctcaaaaataaaattcatcaattccctgtccacacttcacttataccagggaaataacacttattacaaaagtgggcaagtgggatctacccaaaacctttaaaggccaaaggttgattgtaattttttaataaaatttttaatacaaatttttattttataaaaattttatataaccatttttattatcattgtaatatgatttttatgataacttttccctctggtttatctcaagcttacttttgttcggttctcaagtgataccatattgaagtaagatgacgatggaaggaaaggagacacaggcatgagacaccagaagcctcattcagagaggatgaccttgttcctattttgctctatgacctctggcaaacgattccacctgtctttattgtgactctcctggatttaaaaaaacatacgcaggtgtggccaggcacggcggctcactactgtaatgccagcactttgggaagcagaggcaggaggatcatttgagctcaggagtttgagacctgcctgggcaacatggcaaaacccaaaaacaacaatatgaaaattagcagggcatggcggtgtgtgcctatagtcccagctactcgggaggctgaggtgggaggattgcctgagcccaagaggcagaagttgcagtgaactgagatcaggccactgcactcccgcctgggcaaccgagtgagatcctgtctcaaaaaacaaaaaacaaaacacatgcaggtgtgtccttcaggttcttggtggctggatacagctgcagcttatacaccagatggaagttattaagtgagtggctctattagaaacaaattaacatgacaatattgatgtaatagaaaatggaaatagcaatgcattcttcaaagctcaaccctctgcgggtttgcacttcaagtcataacccgggctggcgttttacttgcggatctttggaaagctcatcctagggacgctgctgctgctgctcatgcagcaaaaggaaattcggttttctctgatcatgcaaaagagaagtccgggtgtggggacccagcggtctatgtgattcaagccacaagtcctccaggccgagcaatgaaccatctccacatgaatgctacagggcagcgtgtcagaaaacattaataatcagtctctgggcctaaagtgtagacgatgaggcgtggacccaggcaggtaagaggctggtacaacaggaagctctcctgagggcgttatggcatctcgctgaagaggaactcctacccacagctcagttgtgtgatgtggggaggtgggtgcactttccaccttccaaccaaacaagctactggcgtgaatgatggacaggtgcgacagatgtggaaggccaagattccgctggggcgggtccacaatcaccctcctcacgcctggcagccaacgctctgactacaatgacaagggcagatggacgctgaaagacgcaatggcatgggccccagaattaggtcctgcaccatggacaccatactggggagcacagggcagaagccgctcacaggtggcgggcaggtgtacaaagaactccaggctcctggggggcagcagcgctttctgggtgacatccaactagctggacccctaaaatttggaggaacctgtttcctcctaggttctgccactgttagagtgttttctgaaaacgggattttctttacctccatttcgagtacattatcaggattttaacccactattctaccggaaatacacacaattaggaagatttattcacaagccctcatttacaacacaactgcaggttttacttttcatccaagcctggaaacacggatatctttggttctgcaactggagcaaccggagtctctgaagagctacagagccttaatcctactgagcactggattgtattattattattaatcattattattaggagaggggctggggaagggaatagagcctaatccttacaaaggaaagggagctgggaatctggatcagagagggagtgctgtgcagtctgaacagaggcagaggctaatgggaacagagatgggtggcagagagcagcccttgggcagatctggacagaggcctgaaggccccagaggccagtcctgctgtgggtgcagagtgagattcttccttctttacatattgctgctagcatctgtgaaagacgactgtctgaacatggataacaggctctctgacatcggcctcacctcaccagatccctttttttcaaatactctccttcccatcgctcctctcagtttcaagagtgggccacctgggacttttagagtctgttcctccaaggaccatcctctcccttgccgtggggcctggcccatgctgttacctttgcttggaggcacatttttcactcaaagtccaaagcccatcgctgtggtctcctctacgccatgcattcagcccggtgctggggacacaggtgacccaaggagccgtggtcctgtttcttgctgattactggcttgagagaaagatgccacacaccttctcctcctgagaggcaggtccacagcactatctggcagctaccctgggctgtcacgctccgtcctcccctcccctcccctcctgctaggacacctaacatcaagaccgtgctgggttgccgccactgccatcatgccagctcctgggtctcagtgaggctgaggacactccagaacgggaggcaagcccatgtgggagatgactggacccatcttcattcaacgttcagttattgagttctataacaatagaactcaactcagcacaatttacattgacatatcacgccttaggcgggaaggagagcagctcgaggggaaagctgccattgtgaagaagccatccagccttctgttccacaaaatccagcatagcatcatggtgcaggaccgtcagcccacaccagctaactgcatcctcagcatgcttgtgagccagccaaatgccaatgaagaccccattatggggctccaccagatgttcctatgaaaggacataatggatgcttgggttcgccctgatgacagacatgttcaggcctgccctgcacgacttcactgacctcctcccagccaggcactcacgctgtttctttctccctcctcttcccaatactattcacgcttctgcagacacaccagatactatacacaaatgcacggggctgtgtgggggcggacacggtgcactgttgccaccaaggtgtcctgcatgatgtctggacaccggaccagcggcctctgacaggaagagtttgtgttgtgacagtgcatgccttggaatggttgttcctttttaaaaaaaatctgacaagttgctctagtaacccaaagaagtgaaggagaaaccagctaccccactggacagatactgatttgtgcagaatccgtttcaatgcctcatgaaacaataaaaccacgaacatcttccttaaaaaaataaagaccacctcaccttccccttccccaggtttagctttgtacaaaagactgaggaagccgctgactctgccgggttctccctgctctgccactccaggccttctccagacctggcctgcagagaagggcacgggggacagccagggggctctaaacagctgttagatcctcttgcatctcgcagactcagtggactgctggggatgccaagcgtgggaaggaggctccaggcacacatcccactcctgtcctccagctacctggggacccagaggtctgagccacacactgtgcctcccttgctaccctccctgagccacaccgccggggcttacggtgggtcagagccaggctccagagctcggccacccggggctgtggcttatcctggcttcaccacttcctagctgagtgtgatcctccagaagttacttcaccaacgtggcctccttccgtaatctataaaacagagatgacagcaattcctacctcgtagagttgtgatgaggaacgctgcacataaaaagtgcagaacgctgaatgctgaaccactgactgccgcctacacacagtggagtcaggccctgatctgatttgctgctccctgctcctataggaaggcccgggggcgctgcaggtctctgtcccctcatgccaggtctcctgtggctctggatgggtgaggaggctaattctgggcaggtggcattgggatggctgtcttcagggactgagcaagtgccaggccttcacaaaatgaagctctgggggcactggtcatttgttgaggagggtacttcgttcagacaggacgcttagaagcccagctctttttcccagtaactggttcccagggccatcctgtggcacccgcactcattacgttgagagcagatgtaagaaatacaggagctggcctaagaaaggaggtttaggaatacccatgcacgatgtgtgggaaaatgtccaggttcttacgcatgcacgtaattcttattcacagcacatgcgttcacgcagacgttctgcaagggcagctgggagaggtgtaaaccccaaagaaacagaacatgcaagaagtggccagaaagtacacacctacctaacatccaactgttccctgggggaacagtgaggaaagatggaaaataacacctgttctttgccacatggagctctggcttcagtatgagtgacagaggttgtttatatttttgtctgttcgtttgtttgtttggagtagaatgagaggcttttttcaaagggaaaggcaagtatctaccttttcttttgttttgatgactgtacttggaatttttagagtagaaaaggatagttagatggagcctgggcacagtgactcacagcactttgggaggcggaggggggcagatcagctgaggccaggagttcaagaccagcccagccaacacggtgaaacgtcatctctactacaaatacaaaaattagccgggcatggtggtgaacgcctatagtcctagctacttgggaggctgaggcagaagaatcacttgaacccaggaggtggaagttgcagtgagcctagatcacaccactgcactccagcatgggtgaaaagagagagacactgtctcaaaaaaaataaaataaaataaaaaaataaaagaatagttagatggagaccccagacagacagtttttaaaagcctagaaaaaaagataaggctgaaaaaaaaaaaagataagtttgactctctggatctaaaaaaatatagttcatatgggatggtgactttaaacgtaaaattttgatcacatgataaaattaaatgaggaagtgaagattgagacatgaagaacacaggatgtgtgctggagaactcgcaaaggagactagattgtagtagaacaaagtgtgtatgaggaatatttccagcatttttcgtgcactacaagtttacagggagagagttggaaagctgacactgacatttatttatttaaattagttaatttatttttgagacggagtctcgctctttcgcccaggctggagtgcaatggtacgatctcagctcactgcaacctctgtctcccaggttcaagtgattcttgtgcctcagcctcccgagcagctgagattacaggcaccagccaccatgccccactaatttttgtatttttagtagagatggagtttcaccatgttggccaggctggtctccaactcctgacctctggtgatctgtccaccttggcctcccaaagtgctgagattacaggctgagccaccgtacctagtcatgacactgatatttaaaacaaggaaagtctaaggacaataaaagaacctttaaagatatgttcaaagcaagaagagcaaggaagggaatggaaatattgtttgaagcaagtagatgctggttgggtgtggtggttcatgcctgtaatcccagcactttgggaggccgaggcagatggatcaccagaggtcaggagttgagaccagcctggccaacatggtgaaacctcgtctctactaaaaatacaaaaattagctgggcttgttggcacacgtctgtagtctcggctgcttgggaggctgaggcaggagaatcgcttgaacctgccaggcgcaggttgtggtgagccgagattgcacgactgcactccagcctgggtgacagagtgagacactgtctcaaaaaaaaaaaaaaaaaaaaaaagaggaattgctgaacaattcagcttctgtttgtttcactcttctcaatcaagagggaaatgaaaggaatataaatgaactgcactctctccccaaaataaatcccaggtagtttataaagttaaattttaaaaccaggtagatgattatttaccatgtttctctaagcctaaaagcaatgaatgagccaaaaaggaaaaaactatggatttgactaccataaagatcattctaaacaataaattatactccacaaggccccataagcaaaagtaaaaagttaatgtaaatttcaggaaggtattgtaacaactataatgggaattactatattaaagataaaatcatttagttagtagataattacaacttaattagaagaccactaacaccttccaggaaatagaatgcaaacagctaaaaagtccagatccttggactctgtcatttctcttctaggaattttccccatcgaaacaagagaaatagaataaagaattattcacagtaatgttcaccacaatgtgttcactcaagtgcttatagcatctttattatgtgccagggatcttattaggtatataatgatgaatgtgattttgctcctatacttaaggaacttctatgttctgtagaggaaatacccaagttaacaggctgttgcagagtgatcagtgtgactacaggggtgagtataagatgctatgggatggggacggggggacaccctaactcacacctggtggatccgtcaataccccagggaaggagtgatatctgcagaacacagcaacatgaggtaagaagggatgaaatgggagagaacatagaatgttctggaaatgtcacccaggcaaagagctgaaggacaccgtggcggatgagaaggaagcagtgagaaatacagctggacaccgtctttatgaaaacaaagaagggggagctaatcgtctgagtgaggatggctaaatcgcttgaaataggaaatagccactgagcactgttttcaagtcaatttcatcatgaggccaaaatgaggggagtctggagacagggctgcaacagcaagatccacaagcacttggaaaactgcaaagtgatattaaagtagaacttgtcttcctcaatccatgtatttccccccagtgatttgtaaagggacatagcaggcatgcatatcagatttacagagggcaaagaggttcggatggtagcttcaaatgtcaaagttggggtcatattgtttacagttttgtgtcgtactcttcacgcacgtgctagaagcccagcatcggaataagggaattaagaggtgccctgcattctactgtggttaaactgcttctggaaatctgtattcaattgtgggtaccatattttatacaagaaaatgaaagaaatgggagagagaccaaagaaggataactagaccgggtgaaggtccagaaaccagtacttcccaggactgagggaaaagctgcatcggtggcctacatatcacaagctctagtggtagcgtgaccatacaacctactggccataccagatacttgtgaggcaaaagggaggctattattgattatatagagagaacaggtataaactaggactgtcctgggcttacccaaatgggggttcgggggaacttgctaatctgatgtgtataaagtgaaggtgggttaactttgctttggtgggcaaaaaatagacccaatgaggggaaattccagaagatacattcggattcaatggaaggaagaacttttgaacaagcatcattgctcaaaatggaatgggttgccccgttatcactgcaaatcatcaggaagggaccagagactttagcaagggaagttgtagaaaggattacagaactcagggacagacggactctaagatcccttcccttcctctccaataagttgtgatgtataaggcatggatatataggcacagctagaaacaaagagttccaagaaaatatattcattctgatagctgatgtatttacttgtgatgtttccttggtacaatattacatgtggtttggtgaaacaaatttttacaacgttcactcagtgcttcagaaagcttacaaaaattttagtacagactgataggcacaaacgcatttttctactttttgatgctaccaatttttctcatataaatgtgtggtcgaacatcccctatttaaaatgtaattctgtgcagaagagttaccggcatctgttgctggtttggtagagaattcacgtgctcagtaaccaagaaccttaataacactttctggtaacatgaatttgcctactttgtttcagtgtccagtttaatctgtcgttttaaatgaaattttaaaaaaattttgcttatgttgtgatcaatggaaggagacacagtattatttacaactatgggtcttattatacaataagttttcacagttgtaaacattttattgatactaaaacaataatacgtgtgattaaaatagaatgatgtgactgccataataggcacacaataaatattttatatgaataataaatatatatttaaatagcatatatctttatatatataatttcaagggcaattatgtaatataggtactatataaattaatttgcattcagtgaaatatgttttaatttgcctattctgtagaaatatgccccaaaagccagtctcaggaacacatgcattatttgtcattcacatacctatgtgacaagcagaatcaatgtggatctgccctcagtgatgggtgaagccacatagataagagttggggaatgggctctccttgtcataaacaatcttctttgtatactactatagtcataatctccattgcctcccagggaggtgtggagcagaaaatagtattctagaccacctgcaagttttccaaattccacccttgggtctttggtggctcttgacatacagtaggaaaatggccacctatgaggttagtatgtcctgccaggccacctgctttgctaaacctgtgttggatacaaagcactcctgtactaagtgcctaaatccaaggtccacatgctcagatgccaagtcctgccacgtttagcaggaagcactccacaccgacagctgactccagtgacacccttaaatcagatcaaacctctagtggcatcggagcaagacacatctgagaaacagggacgctcgagaactagagaaccaccagtcctacacggaggtcccagttccatgaggtcaaaaagaagtccccaaccctccccattccaatacagagctgcagggagagcttggggacccgtagtgcttccatagggggaagtttccacagtgactttgacatccacacggagcagtccatctgggctagaggctaccgcctttctgtttacataaccaagtactttggaaagggttctgctggaatgtcgctggcagggacttcttggtcttgcatgagctgtgctggcagatccctccttccattcttcctgggggaggttttgacactggctggctgccccatgaaccatcccagacacttcatggagatctgcccctgggcgcctggtccagtgtcaggagctcccaggaggggataagtcctagagctgctccccatgtaagcctgggcatggaaggtcaggcctgagaggggtggaaagagcgagggagaggactcccaaacccaaaagtctccccacccccatcctcatcaagcctcttggtggaaatgctgtcacagacagtaacgtagcaccttacagtgcaatggccccggcaaacgagagtctaaatatatccagggtgcatatcattagtgagcagttacagaaataaagatgttatgttgtatctgttagtcaaatcaaaaattctaattggacacagaacaatttctcaaagctttcagcaggaggtaattactgtgttgactacttgtagcaaaaaaaaaaaaaaaaaaaaagctgaaatagagcctagtgtttgggctgtttccatgaaagaaggaaggagagagatgtttttgcctggatctgagctgcttaaaagctggctgggctcctgatctttgcactttcctggtttaaccagtgacactgctgcaagcagctcaccatgtcacaccaaaccctttgataaccaaagtgcagtgtatttttagcaaaaccttcagaaaagacctggaaataaagccaggcatggtggctcacacctgtaatcccagcactttgggaggccgaggcgggcagatcacctgaggttaggagtttgaaaccagcctggctaacatggcaaaacgttgtctctactaaaaatacaaaaattagccaggcatgctggtgagcacctgtaatcccagctactcgggaggctgaggcagaagaatcacttgaacccgggaggcggaggttgcagtgagccgagatcacgctactgcactccagcctgggcgacacagcgagactccatcacaaaacatagaaagaaaagaaagagagagagagagagaaagagagaaggagagaaagagagagggagggagggaaggaaggaaggaaggaaggaaggaaggaacctggaaatgagtctgtgactagataatagtattggaaagccagaattttaaatcaggacagacagatgaggcagggacagtgatgacattttatatccttcctcatgtctagtcctgagcatcacacaaatgattgactaaaagtataaaagtacagagttacaattcctgattgtggtgatggtttcccaggtatagtcacatatcaagacatatccaacagtatattttaaataagcatagtttattgtatgtcaatgatatattaataaatctatttaaatatgagatttagcactttgtgaggccaaggctggaggattgcttgaagccaagagtttgagaccagcctgggcaacacagtgagaccccatctctaaaaaaaaatacaaaaattagccgggtgtggtggtaatcccagtgctttggcctggagttcaaaaccagcctaggcaacacagcaagaccccatctctcaaaaacaaacaaaaaaaatcttttaaaaaacgtagccaggcatggagacatgggcctgtagtccctggtactcaggaggctgaggtgggagaatcacttgagcccaggagtttgagtctgcagtgagccatgatggcaccattgtactccatcctgggcagcagggtgataccccatctccccacaaataaataaaataaaataaaagagagacatttcttccaagttatcaaaaagacaccatcaggagcatgacattgaggattcaatttgtacaatggcacatctcaacagaacttttcacacaatgaggaattcttttctttccttcctcttcctcctccttcttctttctcttccttttcctgctcctcctcttcctcccttctcccttctccctcctcctctcccttctcccccctccccctccccctccttccccttcttcctcctcctcctcccttcctcctcctcctcctcctccttcttcttcttcttgagatgggtctcactatttgacccaggctgctctcaaactcctggcctcaagcgattctcctacctcagcctcccaagttgctgggattacaggtgtgagccaccacgcttggctgtttttcatacattatattcttattatttgaagtttggtgcttatgcattttcccagatgtcatcatactcagttctgaaccctggagttggcagtcttttgtgctttaagcatcgtttgtacatgggtgagcttcaactctgtgtctccactgtggtgtcccctgacccaggtttgtagagaattatgctcaaaactgccctctccacacctcacttggtcccttgttaaacatcccaagctcagcgagtcccagacggaattcctgatctcacttttccccagatcacagcttcccctcccaggtaatggtagctctgcctcgtcatctccattttgtgctcttttggccccaaattctggactcttctctttatcacatatcccacactgaaccctcagaaaatcctgttggttctgtcttcagaatatccagaacctgaacacttttcatcaccgtcatcatcatcattgtcatcatttgtctggattcttgcaaatgtgcttccaactctgcccaccttgcaatctcacccacacggcacccaaaccatttctgcatggcctccgtgggaccaggggctccccagctccacaatggggagagccccccagggtagagccttaaaggcccatgtgactcccaccagtcctcaccctgcaccacatggctctgggacctctcctgggtgcaacctctcttgttccctgccacacttctgcctcagtgcctttgatgaattctgccctctgcttggaatactcaccacgtccagacacccacctggcttacctcctcacatcctttcagtctttgctcaatgatcacctttcccgaggtctacaagacccctgtgtttaaaagagcaacttagcacacttcccttcctctgctttgtttttctttgtagtaattaccagcttctagcatcctctgtcacttacttatggatcatgtggattgtctgccccttcctcttcgaatgcaagctccccaggggcaagacttggttggtttttctcactgccacattcctggaatgttcaaggcataccaataggtatgtgttgaatgattgaatgggtgggtgcatgaatgaattaatgaatgaacttgtggcactcaaatacttctgccatttgccagctggggtttgccagggtagcattttttatacgaaaaaaaggagggctgggtgtggtggttcacacctgtaatcccagagctttgagaggctgaagtgggaggatcgcttgaggtcagagttcaagaccagccaaggcaatctagtgagacccccatctctaaaaaaaaaaaaaaaaaaaaattagctgggcatggtggtgcatgcctgtagttccaggtactggggaggctgaggtgggaggatcacttgagcccaggagttcaaggctacagtgagctatgattgcaccactgcactccaatctgagtgacagagcaagaatgggccagagagagacagagagagaaagagagttgtcacactatccttattctcttcccatttgacatagaaacaggcagagagagaaagcagagctccctagcagagagaagagctgaccataggtaggggccctgggctggagcaggaaacagtccctagagatctgcgcagacaagtcaaaaaaggagaaatcacaacgtgacaatgagttcctcagttacatttctgagcacctgccaaatgccagggataacgctgggtgctgtgctgtcaacgacaaagaagatacggtcctacccctaaaaagcgacggtgggaggcatgtgaacaggtcgtcactgtccataggatcgaactgcgactgccttccagcacgcatgcttctggagaatagaggagaggaactcgcttctgcttggaggaacaggagcagggaacactggaggctccaagtaaagaatgagtaggtgcgtcccaggcaggaaagggatgggaggggaatggcaatgtgaagggagcaattgcaaaggctgaagtccagatgaggtcaaatgtgcttggggagaggcaagggtgtgtgtgtgtgtgtgtgtgtgtgtgtgtgtgtgtgtgtgtgtgtgtgatggttaacataagaaaagaagtttaagaaataagaagcctctagattgtgacgggctttttcttccatgctaaggactgtggtctacgaagaatgcagggtgctgaggtgggggttgtggatgtggtcaggggtataggaagctggccaaaggataagctgtgatgattttataatgactcaggaaagagagcccctaaactatgacaatggcagtcagcacctcaccctaaaagaatgtgggaagacaatgtatggaccgaggcattggagaaatttgattggaaagattagctgaagaacagctgactccgagcaacgcagaaagaggaagctcgaggcaggcatggtgagtcacatcatgggacaatgaggtctgagccttggaggaggaagaggaagaggagtaatgagaaaaccacaggtgggaccagtaatcacaaagggaaacagcaaagcatttgtaagctctggaatcctacccagtgaggctgctttggggaatagtatttagggaacactggtaagtagccaaacccagaatcagccatttcaaaaccagatggacggacaggctccttcaggaaagttctgctgggaaggcacaggacagatgccatgtgccctcttcatcctcactgcccagccagcagggcaagccacgatacttgagttcctccaccccatctttcctacaaatgaacactggtgtattgacttttatctacatccaatacaaaaccaaaagccacagtataattttttggtttttttttttttttttgagacacactcgctctgtcacccaggctggagtgcagtggcactatcacggctcactgcaacctctgccttctgggctcaagcaatcctcccacctcagtctcccaagtagccgggactactggtgcatgccaccacacctggctaatttttgtattttttgtagagacggggttttgccttgttggccaggctggtctcgaacttctgtcctcaagtgatcctctcgcctcggtctcccaaagtgctgggattacaggcataagccactgcacccagccagtttatggaattttttagttgagttttgtcagttctctaggagcgtggtcagtttcattggcaagaagcaaaggaggatctagctgcttaagaaacaaagctctgccaggtgcgttggctcacggctgtaatcctagcactttgggaggctgaggcgggtggattacctgaggtcaggagttcaagaccagcctggccaacatgctgaaaccccgtctctactaaaaatacaaaaaaattagctgggtgtagtggtgcgtggctgtaatcccagctactcgggaggctaaggcaggataacttcttgaacctgggaggcggaggttgtggtgagttgacattgcaccactgcactccagcctgggtgacagggtgagactttgtctcaaaaaacaaacaaacaaaaaaaaccaagaaacaaagcactgtgtttttgcatactattctcgtattctctgagtatttggatatctttcccagttggaagttgcagatctctgcatggcacaaaatctctatcgactaatttacaactttaggaacaggaaggcaaatgaactaaattgttgtggatgacaaaagccatattttccacaataaagtaaggaaggaaccacaaacaaataccagcttataatttctccatcaaatgacagacacactccgccctgtctaggcaaaagatggccatacgctgtcccttagggctcactgaaaatatatcctagtcttggatgcagatataatgttctataaatactctccctgtttgcatatttgcctaatgtttttcttctgctgcctgtgtgtgcctgtttaatcagtctccagaagacagatgatctctcgttctgactttatttaacatttagaaggttattaagtgcttaaaattttttcgatgaacattatgcaaattgacacgttgacttctcgaactacaaggaaactatcccaatattttcacggtggttgagtggttgatgcaatggaaaagaaacacacacacacacacactcacacacacgctcacacacactctcacacactctcacacacacactcacacactcacacacacacacacacactcacacacacactcacacacacacacacacacacacacacacacactccctaaaaggcatcctgtatattcaggatctaggcttatttctgccattaacttgttgcattaatgacttgggtggaatataataaataaaaataggagttgaaaatcttcctaattaatggcaataaatgggaagtagacaaagaacattatggggtgattacagtgttgccttttttgttcagaaaaggatgcaattgccattcattgagataatcttggtaattcttacatcttttctagaattttcaagataaaagctttttctgatcttttttgaaaattaaagaatttcagaaattcttagaaattggtaatataatccactgggtcaaaggcaaagtcatctgtcttttcttccttcccttccccccaccgaccttctctaccttaatgttccaggactcgctggagacccagatgtagtagagccctgggctctctcatctgctcccagtgatagaccctaattccttttcacagctagaagactctattacatcctgccacctgccatcttcacaaatcttccctgttcccaacaaggtaagaatggctagggtcatgactttatctgcagaaccctttctggaaggctaggtgacacttgtgaaatatcagagctaacatttgtccacgtatactactttctgtctataaaattgatttcagtattataagtgaggatgcaccatttatttcagtagcacctccacttctacagccagctggcttcttctacctcgatgggatcatatccccccaaagttagcatcgttgagccttccagtaatataagtaaacaaggttggagagggggaaatgcaaagacaaaatctcttattctagagaagtctccttgcctaatgcagtagctcatgcctgtaatcccagggcttggggaggccaaggcaggaggatcgtttgaggccaggaattcgagaccagcctgggaaacatagcaagatcccatctctccagaaaaaagagtctcccatactttttgagagttaggcgtttcacagatattaactaatttgctcctccgaatgtcacttataaataaagcaaccaaggctcagagagactcagtaattcacccaaggccacataagcagtggcagagctggttagatgaccaaacccagggcaagatggcgccatcctcccctctctgtttgccatgccaggttgcaccacacagatccacatcaggaggcagggacaccagccttggcgcagcagctgagaccagggcgaggtccctcaatgcctgtaagctcttcctcatttgcaaaaatgatctagataccccctttcattcctaaagcaccatctctctaaaatgtttgattggctggataacccccagatcacatatgcacgtggtttgtagactgcaccaggcattgactgtgatgggcagccctgcagccgtggctgcagcccttgctaacagtagcccttgttacaactgccttctgtacatggttctcccctcctgccaagacctgcaggctacatctgtgctactggtcactctgcagttcttctgttacaaaacactcaagcagcccaataaaaggggattgagaaggccgaacactgctccccattgtgctccatcagtgtctacttcatgtcctcatcaccctcccatctctccttctctctctctctctctctgggcaacagagaaataaatatcagatacttagcagggctggccagtgggagtcgggagatgggcaagccagcgctagactctccggctattggtaggtatgtcgtctagctctggaggacccacactgtctggcttcctagtttgggttttatcacatctatatacttcttcccaggcatgtggcgagagcgtaatggtacattttctggttatgaatggcacagcctggcaactcgccgattattatttccattccctgtgatgcattatcaatctaattccccattacctgccgtttttgttttttttcccatgcgttccccatacagcaaggacaaagaaaggcaaaaaccctgcaaagaaggctgcatcaccaatgaacaggctaatcccacaggaaattgtggagtggtagcttcaagtgtgcagggagaggttttggctaatttgaagtgcaaaatatcattaaaaggtttgggattctgcattaggaccaggactccggactttaaggttggtaatgcattactaactgaggaagaggggccataccacagcacagactaagaaaagttttgacacaggtgggcctaacaagcgacactgtgctttagaccactggggttttccagatttctttcttttttttcctttatttttatttttttagagacaggttctccctctgttgcccaggctggagcgcaatggtgcaatcatagctcactgtaacctccaactcctgaactcaaacaatcctcccattttagcctcctggagcagctgggaacacaggcacacgccaccatgcttggctggtttttcaggtttctgaagtctaaacagatccatgttggagtgcggtctgctacactcactcagcgatttgcttatacaaccagggtccggggagtgctcaacatgagcagcgagttaatgtagtgagtgtatgcaagcaaaacatacgcagtagccacggattggcaaataattgctaagaaggcaggagcaaaaaggaacatgtgaatgtaagtcagagtttggggcaaagggtatggatgtaccaatgctcctgaccacagacaacacgtttcttcttgtattgcatcattgaatggctggagctctacctttaaaacaaaaagccagaaaacatcacacagtgtagagatcgcccttcctaacaagctagagcctacaaggaacttctctgaattagaattaattatgctggtacatctgtagagaggttttgatttgactcaaactgagactaccactcatttcttcttgattatttggtagtaataaggcccctgaactgaaccggatcccccatagtcctctattactttccaacaactgtgacttttattcttagcagtgacttccatcttcaagtggaagatgaacaatgtttctctttgggaggaaaatgcccaatttccactgatacagttaagaactgaggccgggggcggtggctcacgcctgtaatcccagcactttgggaggctgaggtgggcggatcacatggtgaggagatcgagaccatactggccaacatggtgaaaccccgtctctactaaaaatacaaaaattagctgggcgtagtggcacgtgcctgtattcccagctacttgggaggctgaggcagggtggcagaggttgccgtgagccgagattgcaccactgcactccagcctggtgacagagcaagactccatctgaaaacaaaacaaaaccaaaacaaaaaacaaacataactgaacgcacacacacactcattagccccccaaataagcattagtgcaatgtactaaacagtagcaccagctctgaccatcttctgtaaacgtaagagaggaacagtgatagggatttttaaaataatgccactggtggtagagctggttacttccaatgtaagggtgtgtctaaattattccttataagagaaggatgtgctgattccatgagacaacggaaagggtggcagctgatggatttagggaactaaaatgaaactgctgtgaagagaatttttgataagctggatttatgctgattcagaaaactttttgcagaagagagcattgaaaccgtctggcctttgtgtgcaatcgtgactccaaagcccaaagttccaagagctattgtaccaactctggagatgaaattttctgggaaaaacaacaactaaaaatggaaaatactactgatgtacttcagtctgattatggctggaatgaacacctcaagataaaatccagcacgcccttccccacaagatcagattttttagcagccacttttccaagattctctgactctgattttgctattggaggaaaaacccaaatatctacataccctccacaattgatgcaatgatcccttttcttccttttcttacatcaatgcctaacttttcagagacatccaacatctttttgttgttgttcctttcatgacatttccagagagaaacggacagcgcagaatcagaaatgggtaaggtggggtgaaccgataaaaatgcagtgtcctggggaggtcatgagggcacatgggcctgagttacttgctgattctattaaggtaagagaactcctgttttagctcaaggggaatatagtttttagggtttagactgaggaatcattagaagatcattaccctattgctttcttatgaggtcccagaaattgcttctaagatgctgagattttgcacaacaaataaaccaaaaaagagaaattctgccacaaatgttatcatatcaggtgctaccccaaaaataagacatatgaattgaagttactcctgacactggactcagacattctaatactctgtggagagtagtttaaaagaacttcaaaagctggttaactgttagcatgtctatttctcattttgacatattgaactaggaattcttcaaaagttatactgttccttttcttaaaatatgcaaaaatatctaagaacaaagctttagattgtaaattgctccattatactttcattcagtatgatgcgtcaggctaaacgcaagtcttatgaggggtaagtatatggcttgctggacacgtgaattgaactacaagcatgctgcacgcacgtgcggatgcaaacacacacgcaccagcataaacaatgtaaacacaagtggtatattcatgcagtaaaggcagtaacgatctttgatggtagtctcacccaacacttacttaaagacaaaggtagcctggcaagtcccctcaatatgagatctcctgaaccttccatatccctttctttcacatcacaaaccaatctcactttttgcatccactccttaaggttgactcaagagctctttccttggcaactcttgcatatctgctattccacagagctctctccccaagttccagaaccaagcaaggagtcactggatgtctttccctttgacctcaggctataacttcgctgtgacaataacatcgagagctgtgcacatctgggatgctgttctcatggattatgaaatcagcaactcactgaacctcaaggggtctcagtttccccaatgacgagatcatgctaatggcaccagccacctgccaggttatcaggggacttgataacaatgtctgcaaattacaaagagaacccgtgccataaataacaagtcttattaataaaattagttcaagacaagtgccaaaaacaatatagcaatagcagcggcagatcacacttggtcagaacaaaagagggtggagagattttctgatccttattcctactaaaacaattcccctttaatgaaagaataagaatttaattttttctccctaaaacattacttctacccacacaacttcatacaccagtcattacttctttctaacttatctggaggcaacattgtattcactggctggacaatatagcgttgatttcaaagcatgtccaaatattgcctccaattaaattaattgcagctatttaacttctcaggaccaagtggattcaaacctatttgtcacacgaccctcattcctgctgtgccctaaataaacccaaacttcctttgcaacagaatggatctaacagaagacagtgtacaaactggatcatctcctaaccttctaggttgcaagagacaagtaacactttgagaaccaaaccagatttctgttgatttgaggctttggtcttctggccctgtccaagtccaagtcacactcaaacataaatggggcttaatgctacgaatgggcttgatacaatttaaagaccaaaaacaaaacaatgaaatgtgtcttcctctccctgactgctgcccccaatgcaaaagcactttgctgcacatttgaaggacggcatacccagctaagtttcatgaagtctaagggacaggttactgtatccagttcctaaggtacttccccagggtcagcagtggcttcccaggatgaagtcagcagtttgtcccgggctctctgagcggtgctttcccacagatcagtgatgctgttggaaaaggacgacttacggatgcagaggtggaaggggggtaccagcagctgaaccctcaatcaggtccaggcagatgtattcccgatagaacaggctgtcaccactgaccagctcagacttagaaatgtgcctgtctaggttttcagagcaacccctttcatcactatctgtgaggaggattcgaactgaaagaagccagaaacagcagtagcagcgtctccactgggatgctccattcataggggagccagagccgcatccattcatggtggggtcagggagtcctttgcgggcattggttctcgtttctcagcaagctgcacttcccggggggctggcatggctgcatcgttcagaatgaggatgtctattaagaagccgtcgccagagctattattagcacagccatcccttggaaatttcgcagaatacgcctgaatgtacgaacagttactctgctaacagggtactggagaaaaaggcaccaagtcgctcgttacgcacaggcagcccacgcagctttctcggtgcagcaccgggaatcttttctgaattcaacgtgcaccaacatttgagcagctgcctccaatatagaagcactgcatttagccaattttaaatgagcacgtactaaagggggttcccttctgttctcctccccttccgagcgtccgttttctctgcatcaaacttgctgcagccatttggaacgtaaaaagcagtccatcttagcagccccgggcaccggcgatcggctgctggcccccgccacccttgtctgaaacgccctgtcctgcacccaaaggaaagggctcccctggcactctcagaaaatggttttaaaaaaagcctacacagctctgcctaaagccatgtcctttcctatctccccgggtagattcagacagcgtgggactgaggtgcccaaggaaagtaggtgtgtgtgtgccgaggggagggttgcagaagaaagcacagtatgtgccccacgtgggatttgcatttaaaaactgtaacatacgcgaaataaacgactccaggcccccagtaaagaagcagcggcgcgtcccttttccccggcccagcgtgaaaacacggaaggcgaagggctgccgtcagtcgcctccctgccaccgcgaccgggaaacaaagacacattaccttttattttttgcgcttccaagggatccgaggaacttctggctgcaagcggctggtaccccggaacgggcgtcccattcgcccgggcgaaggcccttggcctactaggcggccttggcgcccgcagctggcgagcccccgccccgtccccgccgccgcccccgccgcgggccctcggcgtcagcccatagcccgctcgcgcctctcgcgccgagcctggcccggcgccagtgagccccgccgccggcccgcccctcgcccgcgcccggcccgccgcatggtgcgcccagcgcgccccgagccagtccccggcgcgctgctaggtcgggtgctaggcggccaccgcgcgccaccgccgccgccaccgcccgccgcccgatcctggacaacaatgcgcgcccccgcccccccagaaagccagggacgcccccagtcgccgccagagctggctcggcttcccagcccctctccgtggcacccgcaggcgagacaaagttcgctcccggtgaggctgcgcgcgtccaaagcgtgcgggatgcccagcacggaggtccccaagcgggggacccctggctcccccacaaaacccacccaaagccaccgctcgaggccctctcctaccctgagagcccggagacagcagctcccttggctgaaggcacagctcttacccctcgatctagtccaattgtattgaattttaatctcccctcaactcttcaatggaagttgctgcaggataaccgaggcatgtggctattgtcaaggcttcgcgacaatgactgggagagggagacttccattgcgagagacccggggtaggaaaacgggctgacacgttgtctttccaaaaaagagaaacaaactctgggaagattccccaccaagaacaataactcaattcacagggtatgtctaaatgtttattgcttgaggagctcaatttgctcttagacacattttttttcatgaattgtcaaaacacggtgataaaataaaaggggatgctggcaagagcctccacttagcaaaagccgacttgtttctgggtaaagtctttctctagaatttccaacctgcacccatccactcttcaggggagagactggttttcctcccaccatggttgatctagtacttggtagatctagaaacatcattttccggagaccggtaggctctgaggacttacaaacttcgtaataaaaagaaatcactcacatcctgtcttccaactgactgaaaattatacctttttccagtcacaggtcctgtgttgttttctaaacaacactggtaaaaattttcaacagttcaaaaggcctcaccatcaatagaaagggaattgggcatacagttagcattggagaaaaaagttgaacgctggtgttaaggactacctgttttgtgtttgtttgtttgtttgttatagagacagagtttcactctgtcacccaggctggagtgtgatggtgtgatcacggctcactgtaacctccccgtcctgggctcaagtgatcttcctgcctcagcctcctaagtaactgggactacaggcacaccccaccacacgctgctaatttttgtattttttgtagagacgggatcttgtcatgttgcccaggctggtcttaactacctgtgttatttcaagctgactggagacttgatgatctgaagccaggttcgaatgggattctcaggtacctctctaaagtctgtgaggcgtattccaatgcaaaaccccattttttgataatgcaattggagcccatctccttgtgttctgaggtcctcagagggcatattgtttctttgcacgcagactagttctagtcctgatttgttttgactgcaacacctagtaatggacaatgaggaaatgttcagacctacaacatttttttttctttttttgagacagagtctgtctctgttactcaggctatagtgcagtggcacaatctcggctcactgcagcctcccctcctgggttcaagcgattcttctgccttagcctcccgagtagctgggattacaggcacccaccaccatgcccggctaattttttagtagaggcggggttttgccatgttggccaggctggtcttgaactcctgacctcaggtgatccacccaccttggccacagtgttgggattacaggcgtgagccaccgcacccagctcagacatacatttctcttccaatattttgtttccatccttagaggagttgttgaattttatccacatctacacctcctgctttccgccttggccactgtcatattctgtatgtcctaaactgaacttgcctcactggccaatcctgcctccaggctccctctcctagtaaacagcatgctccctcctcctccccaaagccagaaacagggatagagagctcatttccctccctcctttctctcattcctcacctgatcatggagcctgtcctcataactacctcatgaaaagtcatgagggcagccccttatcccaacagtgcctgaagctgagtgagcaactgctgggcgccaggcatactcaggccacatcatctttcaccaggatgtctccagcagccctgtgaatgggtgctgatcttatctctctcagatgcattctccactccagctggagcgattctcctaaatcccagatctgatcccgtaactttcgctaaaaacctgttcagggcttccctggctttggggacaaaaagtccatattccttctgatggctataaggaccccctggtcatccagtcttatcttttgccacccagccccaccagaaatcgtgtcaccccctaccctccagctacagaaccctcttccagggctccgtatgttccaggtggtcacgcatccgcggatcacccagtagcccaggctggagaaagagctcagctcacatcactgctctgcttaaagactgcgggtggcttctcactgctcctgccacatcctctttgtcttcatcacatattattcacatttcctgcttcctctccctggaaggccaggccctgctccctaccccactctttgggtagctggctcctggtcgtctttcaggttcttactcaaatgctgcctcttagataaccttcggtgaccagcacatggggaatgttttcccccaggtacttaatatatcaccatcctgtttatttttttcttaacacttagccaccatcaggattcacagacctgtgtgaagggcacagactgaagccattctgcctgggcttgaatcttgcctggccacccactagctgtgcaagcttaggcaagtttcttaacctctctgtgcctcagttgagaacactcatctatgaaatggggacaataatattgcctaccttgtagggctgttatgaggattaaacgagttaatatatgtaaagcacttagaacagggtctggctgaataagcataaaccttttggggctttttaaaaaagttgtatttaagttcaggggtacacgtgcaggtttgttgcataggtaaactagcgtcatggaggtttgttgtacaaattattttgtcactgaggtattaagcctattacccattagttatttttccatatcttccccctcctctcaccctctatcctgtgataagccccattgtgtgttgttcccctctatgtgtccatgtgttctcatcgtttagctcccatttataaatgagaacatgcagaatttggtttcttcctatgttagtttgctaaggataatggcctacagctccatccatgtccctgcaaaggatatgatctcattctttttttatggctgcatagtattccatggtgtgtatgtgccatgttttcactgtatccccacaaccagaactagtacctggcacaagatctctttacccctcccaaaaccttttgtgcttgggggcctggactgggaacaaataagaattgaaggaagaaaagctgtattcgaagaatttgaaatactaacagaaataggtcgtgatgactaaaacaccaaaagcaattgcaacaaaattgacaaatgggatctaatccaactaaagagcttctgcacagcaaaagaaactatcatcagagtgaacagacaacctacagaatgggagaaaatttttgcaatctacccatctgacaaaggtccaatatccagaatctacaaggaacttaaacaaatttacaagaaaaaaacaaacaagcccatcagaaagtgggcaaaagatatgaacagacacttctcaaaagaagacatttatgcagccaacaaacatatgaaaaaaatctcgtcatcactggtcatcagagaaatgcaaatcaaaaccacaatgagatgccatctcatgccagttagcatggcgattattaaaaagtcaggaaacaacaggtgctggcgaggctgtggtgaaacaggaatgcttttacgctgttggtgggagtgtaaattagttcaaccattgtggaagacagtgtggcaattcctcaaggatctagaaccaaaaatcccatttgacccagcaatcccattacttggtatatacccaaaggattataaatcattctactataaagacacatgcacatatatgtttattgcagcactatttacaatagcaaagacttagaaccaacccaaatgctaatcaatgatagactggataaagaaaatgtggcacatatacaccatggaatactatgcagctgtaaaaaagaatgagttcatatcctttgcagagacatggatgaagctggaagccatcattctcagcaaactaacacaggaacagaaaaacaaacaccgcatgttctcactcataagtgggagtttaataatgagaacacatggacacagggaggggaacatcacacaccagggcctgtcagggtctgaggggcaaggggagggaaagcattaggacagatacctaatgcatgtggggcttaaaacctagatcatgggttaataggttcagcaaatcaccatggcacagtatacctatgtaacaaacctgcaagttctgcacatgtgtcccagaacttgaagttaaaaaaaaaagaaagaaaagaaataggtcatggtaaaacttgatgaataaaataaaattgaaacttaagttacctggaaatgaaaacataaaaagaaatagatttcctgtttcaccagtggttatccttggaattgacagataaaaagctttgccagtcaaaactccacaatggtctgttccccgaagagcagccgattctaccactgagaattcagtcagctacttgcaaaggtttaatccgtttatgcgtgaggttgcaaatttttgaatttttgcatgaaattcatatatattacctagaaaaattcaaggaacaagaatttgaagagataaaatttttattatgccccattgttcagttaagtggcattccaaaaatggaacactaggcgtaagtggctatgaatcaaagaatattttgcaaagtgctgcttcgctgaccagccctaacatgtagttgtgattaaataatttagagtgcttccattttcagcttgagtttaatacttttcgagactctttctgcaaagagaaacatggcagccgggtttatgggcctttgccttgtgttttgctgtccttgctggagaagaaagaagcagcagaaatacttttctttttgttatttcagtgggtcagcaggatttggagagctgaatacctggggtaacccttgcttctcttacacagactgaaggagctttactttggaaagagctgaactcttaaagagaggagaggtgctctgaggtttggaaatgggggaggtaggaagggatggagaagggtgatagcacccccaaaagaaggaagagagaacatctgtacatgatgggcagatgacacgagaccctatgcctgctgagtgcctcaagagtgggcaggcaacctgatgggccagtgcatggcctgtgagttgggagctaaattctaagatatgtgtcttagaattaaacattataggccttagattataggtacagtggctcaagcctgtaatcccagcactttgggatgccaagcagggtggatcacctgaggccaggagttcaagaccagcctggtcaacatggtgaaaccccgtctctgctaaaaatacaaaaaattagccgggtgtggttgcagctgcctgtgatcccagctactcagaaggctgaggcaggagaattgcttgaacctgggaggcggaggctgcagtgagctgagatccgtcattgcactccagcctgggtgacagacagagactccgactcaaaaaaaaaaaaaaaaaaagctaagatatgtgtcttaggcacagcaaaggatcctggagttcagttaagagggttggagtctggcctcaaaatgaacggccagtccttttgccccaagcaccttagtggcaactctattagattgatgacaagaggctgggtgcggtggctcatgcctgtaatcccagcactttgggaggccaaggtggacggatcacctgaggtcaggagtttgagaccagcctggataacatagtgaaagccagtctctactaaaaatataaaagtcagctgggtgtggtggggcgtgcctgtagtcccagctacttgggaggtggagaattacttgaacccaggaggtggaggttgcagtgagctgagattgtgccactgtactccagtctgggtgacagagagagactccatctcaaaaaaataaaaaaataaaaaattgataacgagaccacttccctgtttagaggtccaaggtggcctgagagagagggaagaggatgcaaattcttgccatcccaatgaatgaggatgtagtcaaatttaattgggtttagagaaataaattaatgtgattttgtgtgtatgcccaaagtgatggagcaaaaattctgtcttctccactaataacaagtgccaggttcttaactctaggatttgagtcacagcttctctgaccagcttggagcatacatgggacaattaagagatgatggcttagctctgatctttgctagggtctcactattggtggagaaagatctctcccactcaagcctttgtgtacttgccgagctgaggacaggagacaaggtaagggaggacctgaagctgggttgtgtaatcctgtccttggagctaataccattgggcagtcttggactccttttccagggcaaccttgaataagcctcttattgaagctgtttctcacctttaaaatgagcctgggagctgggcacagtggctcacacctgtaattccagctctctggagggccgaggtgggaggatcacttgaggctaggaatttgagaccagcctgggctacatagtgagacccctgtctctacaaaaaaaatttaaaaattagctgggtttgcacctgtagtctcagctacttgggaggatgcggtgggaggatcacttgagctcagaagtttgtgatcgcaccactgcactccagcctgggtgacagagcaagaccctgtctataaaataaaataaaataagcctgataatatctattgccagccttatgaagactaggggttcaacacatattgtttccaaaaccacacaactgataatagtgaacaactaacattgtggtgagtatgtactctgtattaggcagtgctagagctttccaaactttaatttaatcatcatgggattcctatgaggtggaaactgttctgtcccttggtgagtatgtactctgtattaggcagtgctagagctttccaaactttaatttaatcatcatgggattcctatgaggtggaaactgttctgtcccttttctacagacaaggaacttgggatgtaaaaaggtgaagtgggccaggtgtggtggctcacacctgtaattccagcactttttctggcaggctgaggtgggacgatagcttcagtccagcagtttgaggctgcagtgagctatgatcataccactgcattccagcctgggtgccagagcgagaccctgtctctatgacaaaaaagaaaatgaagccacatgcctgaggggactctgctgatcagatttgaacccagagtcgtcttttggaggcttgagctcttattgtccatgcttgcctgccacaggctgtacatgtgaaatacactggcggtcacaggcagcatggccacagaattactttgtattcactattaactgtggatggagtcccagttacagcggaagacacctgggaattgataggctcctgtgtcgttccatcagttcctaacctgcaccatatggacatagctttacattccattttctgtgtttatagtgaataacactggcaagttttcctttcatatgtcaagcaggtgttaaaaatgcagagagatccctctggggcaggttaaagtgcttggctggtttcaagtgaatcctattatatttttatacccaatcctttttgcttcctactcccaggtcaattagaggccaattctgagccacttcaatcaaaaagggataattccgtctcctgtcatgtgtggcctgcgatcaagtacttaaaaccagggtccccggggtgtatgaagaaattatccaatggctgtgttttattttgttattttttcaccaacagctctgtcatttgaaataaccaagttttatagttttgttgtgttctcattacattagatagttggttatgatttttcttggctgggaatcatgatttagactgcaactcatggcaacaaaaacccagagcaaggcttcctgaaacacagacaagaatcaatcaaaacatcacaagctaattaaagtaccttggagcccctgggagtacctgtattccagcgagtaccacggtataaaattggttaacattctaagtatactcaagtaccttcggctagctctctccctaaggcttttttgtttatttactcagaaatatgtattaataaaaatagggccgggcatggtggctcatgcctgtaatcccgggactttgggaggtcgaggtgggtggatcaattgaggtcaggagtttgagaccagcctggccaacatggtgaaaccccatctctactaaaaatacaaaaattagccaggcgtgttggcaggtgcctgtaatcccagctactcaggaggctgaggcaggagaattacttgagcctgggaggcagaggttgcagtgagcctagatcacgccactgtactccagcctgggcgacagagcgagattccgtctctaaaataaaataaaataaaataaaataagaaggttaaaacttagttggcatttaccaagtgccaggtactgattatgtgatttacgtataataactcagtcttcgcaacagccctctgagatgggcactattgttaaccccatttataggtgagggaatggaaacacagggagaggtgtgataagccatctcagatcctacagacgagaagtcggccactgccagttaccaaactcaggcagtctgattccagagccggtgctctcaaccctaaggtgtgttcctcaaccctcaggcatggtcgagtattaggtggtattgcgtcccttctcgtgcctagcacaaataattataatttatttattggcccattgcttcactgcaaaaagcagctaaggcagaaatatttgtaaaattgaatggaggctgggtgtggtggctcatgcctgtaatcccagcactttgggaggccagggcaggtggatctgccttgaaccagagatcaggagtttgagaccagcctggccaacatggtgaaacctgtctctacaaaaaatacaaaaattagctgggcatggtggcgggtgcctataatcccagctactcaggaggctgaggcagcagaatctctgagcccaggaggtggaggttgcagtgagctgagatcatgccactgcactccagcatgggcaacagagcgagacttcatctcaaaaaaaaaaaaaaaaagaatggaaaagattttcagcaaatattccttttcctattgtaacatcaattattgtgaaggtttatgtgcaagtgacatcaatctaccaatctctcaagtgagcaataggactatattgaaaggatgggccagagcaggaagtaagagccccgggacctcccagccccagggagaacaggcgagtgagcttctcagagcggggacagggcaggaagctggcccccagtgatgacttgggaggcaatgatttctcctgccaccccatagaagtcagacctactccaaattataatagcaaataatctgttaataaataataatatggttcaggctatcaaatttctaggattctgatttcactaaataagaagataggctatttaattttttgtatatttgtttgttttagagacagggtctcacactgtcatccaggctggagtacagtggcgtgatcatagctcactgtaaccttgaacccctgagctcaagtgatcctcctgtctcagcctcctgagtagctggggctacaggcatgtaccactatacctggctaatttttatttttaaatttttttgtaaagatggggtcttgctatgtggcccaggctggtcttgaactcaagtgatcctcatgccttggcctcccaaagtgttgggattacaggcatgagccagtgtgccagcctaggcttatttgttgagatgggattgggtacaaaaggttaacatttagaaagatctctctgcatggaaaataaaaaagttggagatatctatacatggagggcatttagacttatggaaattgatggttaggcaaaatactggagagagagagagagagagagagagagagagagagtgacagagatgagccaactgagccaacatgagaatcccctggaagaccagtcaaaatagattcctgggctgggcacagtggctcacacctgtaatcccagcaccttgggaggccgaggcaggtggatcacttgaggtcaggagttcaagaccagcctggccaacatggtgaaatcccatctatactaaaacacaaaaaaatagctgggtgtggtggcacacacttgtaatcccagctacttgggaggctgaggcaggaggactgcttgaacccgggaggtggagattgcagtgagccaagatcacgccactgcactccagcctggatgacagagtgagatgcagtctcaaaaaaaaaaaaaaaaaacaacaacaaacaacagattcttgagtgttacccccactcccatttccaacccaggtctctgattcttagcttgggttagggtgtaataatttacatttttaacagattccaaagatattgatcctgctgattggagcttacactcagcacaattttcctacctcttggcttttactgtgctccgggcaccctgttgtctttacgcttgtgctagccccagggcctttgcacttccatctgcttggaaggccctcctccagataccagtaggaatcaagctcttaccttttcaggtccctgctcagatgtacccttattagtgagatcttttctaaccacctttcttaaaaatagcaactcctcccacctgcccacctcctgctccccccgttcctaatccctttcctagtttgtctccattctttcttttgccttctaacagactgtaccatttatttacttagctgtttgttttattacctgtccttcccacgagagcagggatttacgtccatttggctttttgctaaatctcctgagcctagaacagtctttggaacatactaaacattcaatagatatttgttgaggccgtgcatggtggcttatgcctgtaattccagcactttggaaggtgaaggcaggaggatcactctaggccaggagtttgagaccagcctgggcaacatagcaagactccaactctacaaaaaatgtttttaaataaaaattagccaggtgtagtgatgcacgcctgtagtcccagctactcaggaggctgaggcatgaggatcacttgaggccaagagtttgagaccagcctgggcaacatagcaagaccccatctctaaaaaaataaaaataaaaaaaaaatagccagggcgtggtggtgacatgtgcctgtggtcccagctaccctagaggcagaagtgggaagatggtgtgaacccaggtgttggaggctgcagtgagataggaccatgccactacactccagcctgggtgacagcgacagcttgtctcttaaaaaaaaaaattgtctgatgagtgaataaaatgaatgaatggacattcttggatgtagaattgcagtcttaagaacttaattctgatggaaatgcttcctaaccgattgcctccctatctaaaatgaaatataatcgtgtcgctccacttctgaaatatctaaatatctctcacaccccgagtgaagctgaagctccctggcatttgttcatcaccaggcactggtgggggctgggacatgacagtgaacagatgcggaagtggcctttgtccccttttgcctacagtccagttgaaaatagggcctgcctgcctgtctggcctcaccaaccactatttcctgctggcgtttcgcctcccagccaaggagaacgctcctacaggcccctgtgcttcttgccttcttgctttcgcacggccgtacatctgcgcggaaaaccctcccgtcctccctgacacctggttgactcccactcactcttccagctccgctcagacgcctcattccccgggaagccttccccgaggttcccctctcccatgccctaaataacccatgcgcatctctatgctcagcacgttttcatcaccacctttgcatatgtctttatactgctctccgtcaagaattcttcaaagacaggcatcacggcagtgctttgtgttttaataattttcttgtattccagatcctcaaaatgtgttcacctgtacacggtgtatggtatttaatttcactttatcactttcttttagccaagcattgtgatcagaacccaatagatttttatagttaaatccatcctgctaataaaaagcaggggagtcagtgatggtagaaagcagcgtttgtaatcccagcactttggaaagccaaggcaggaggatcacctgaggtcaggagtttgagaccagcctggccaacgtggcgaaaccctgtctctactaaaaaatacaaaaattagccagtgtggtggtggatgcctgcaatcccagctacgcaggaggctgaggcaggagaatcgcttgaacccggaaggcagaggttgcagtgagcggagattgtgccactgcactccagcctgggcgacagagtgagactctatctcaaaaaaaaaaaaaaaaaagaaaagaaaacagcatttgaccagtgttaatacgcaactccttaaaacagttttaaggaaggcagccttccttaaagtctggaactgtgaccactgtttctcataaatgaacaaggaccagtcgcaacactggccccaacaataaagcccacttttttggggatacctgcaatgcattttgaagactcctgaaagcttttgagggggcctaataaaagctcttaataatagagcaggtctagtttctattagatcttgaaatagacatgcttccatctctccctagtctctcctttgtaaactatgaattgttttcatgttggctcttagagatctaaggttcttcctttgttcatgtacttttaacttctttgtgtggttttgggaaggtaggcacagattttttctcaaaagtgaaatcaagttctcagtagaagaggaaatacatagtgaagagaaaggaaagtacctttcaaatcttcagagaatgccccttgtgctctttacaaaggaaattcccttggaaatggttataacctaaactattaatatgatcagctcataataatagtgataataataataatatctactatttgttgagtgccatgcacattacacgcattatctataatttctgtggcaacacaacactgtaggtcttgttaatttccattgtatagattcggaaatggaggctcagaaacactaagtaacttgccaaaagtctgtacctagaaggaagcagatttgtatccaagtcaatttttaagacctccaaagtgcattccgttttttccgtcatggcttaattttgagcaaaaggaggcatgggttgataaagggcttgcagtgcgaagtctcagattggtttctggaggagcggaggggaaccttgaggaaagaattggaagtttaagcgccaaaaatcatgttcagccacagaacatttctgccaccccttgaaatcagaatcatggcacccgagcagagctctgcagacacctggaaatgttctgggtcaacagggccgagccccatgatgaggcataggctgagcctctgcagcccccagtctgggaccttggcatccttcttggtgtgtattagaatgcagctacttatggattctgttgattttcaacgtaaccctcatggcaatcacagtcacatctctgattctgctccttctccctgtgtgactttgaacaggtcagcctgaatcttccagaagggcctttttttatctgtctatatagcaggctgaaactggtgtttaatccactttcctgcccaaagacacagagtgcaataacacagtggtcagcagtacaggctatggtagctgactcctgaggtttgaaccaccaaccaacagcttactagtggtgtaactttaggctaatgagttctaaccttttcttcatctcagattcctactcataggcatgctatgagggttgcattgtgtaatgtataaagagggagtttttggcacagagtacatgttaaataaaatatatgctatggtattatttccattatcagcatccactaagggcgtgaaatctggcagcttttgtctgtatacaataccgtcttctccactatgttagatgtcaatccttggtttgagcctcataggtaactgctgtgagctttaatgagaccccgggtgaattacatcttgtaagttaatcataggaaacagtcttgtcctaaataactgtgccctacattccaattccatccctgtcctctgagtgcaccaagtgtatgctccttgccgagatgttcgccctgctcgtgtgtgaataacttaggagtgaattcaaatgcatttaaatagcccacaacctttcagcaattgagggtgcactgtttgccttcccatgggaatgcccgtcagtcacatctaaaggtgcgtgctctgaacttcagcatttacccctgaggtgttgctgtgtctcatcctcaactgtgtggcgcagtattatccacgcccataggtcaacttctggttccttctaccttctcaggcccttgcagccctacgtcactcagcaagtcagtgacaacactgccgaaaaatgatggagaacccatttcattccattttttaggagttagaactaaaattatattttacatcagaaggtagtctgtagagaaaaatagaaaatgcacctgagttgtctaagtgtgttcttacaaaggaaattcttttggaaatggttataacctaaactatgatcagctaataataacagtaataataataatatctattatctgttgggcggtgatgtgcatattatgtacattatctataatctgcagcaagactgcacagcaggtcttgttaattccaattgtatagatccagaaatcgaggctcaggaacattaagtaacttgccaaaagtctatacctagaaagttgcaatgttcagttcaaagggaaacccacggcgggtcccagatcagacaaaatgaaatgccacaaccgccgattcttacaatacttacaggcaccatgtggctgttgtcttatttgttgagggttcaaggcttgtgtcaacacctccacctgacagacgaggaagtaggcagtaagttcctggcctgcccaatggctcctagtgactctgagggacattcacaatgagaatagacagcctctcactttaggtgatgagcgctgttcactgagagctgtcacctgccaggatcagtggaaagttgctgctagatcaaatatttacacactcataagttgcttcctagtatagtgagttcctcataatacaaaagtacctaaaattctgggtttttaaattttaaagtcacttaaaaaaaaaaaaagcacagataggccgggtgcagtggctcacacctgtaatgccagcactttgggaggccgaggcaggcggatcacctgaggtcaggagttcacgaccagcctggccaacatggtaaaaccccgtctctactaaaaatacaaaattagccaggcatggtggcgggcacctgtaatcccagctactcaggaggctgaggcaggagaatcgcttgaaccctggaggcagaggttgcagtgagccaagatcgtgccactgcactccagcctggacaagaagacggaaactccatctaaaaaaaaaaaaaaaaaaaaaaaaaaggacagaaaatatattagactgctatgtaactaccattaaagttaaacactttatcttctttgcttattgaaagcaagagagagagagcttgctaaagccatgcttctcatcctttttccttccctccccattccctccccagaaggtgatagtctcctacagtaggtctctagcattccctatttgtttctgtcctttgcatatgaatgtagcataagcagtatacactgttttgtgtgtttttcaactttacagaaatgcagctagaacagagttatcttttcccaacttattttccattcaacatcacatttttgagatttatcaatatgagtgtttttgaatttcatccatttattggattccatggtgcaaatataccacaggatgtgtctacgttctccagctgagagacaagttacgtctaagtgttcattatttacaaacagccagggcctttgctcctagcggttcctctgcctgccaagctcctcttccgggaattcattcatttgatgaccttctcaacatgtccacttaatttgctccctcttcttcccatgtttttactcagttatcagtagcattgccagagaaaagacaggaaatccagttaaatttgaatttcagataaacaacaagttcatgtgtagtataagtatacccccaagtgctatgtgggatatacttaccctaacaaaagattcactgattatctaaaatttatgtgggaatcttatatttgtatttgttaaatctgcaactctaattgtgacattctcagtgaggccatcgctgtacagcctagttacagttttagcctcctccccaacacttcctattctttttcactctcttattgttttttcacagcccttatcatcagttttcctgcaatgtatttccttatttattttgctcattacatatctttttcctctggaatgtaagccctttgcaggcaggatttttgttttgtcttctgctatgtgagacacagtatgtgcttaataaatacttgccgagcaaatgaataaatgaatgaaagggtgcaaggactgcctttgtacatgtctcctttgtagtgtgtgagattttctctaggataaacatttggaagtaaaattgctttctgtagggtgtgtgtctttactaggtattgccaatttgctgtctgaagtaattgaacaaatttccgttcccatcagtaacgtataaaagttcccatttcttaacacccacagtacctttctgtctttacctttgcaattgcaataattttgatttttgagtcaacagttgagaccagcatggaaacataagataaccacaaatgaattcaaaataaacagtaattatgaatgcaaaaggtgtcagatgttcttaggtgcttatttaaaagatgagttaattattatggatgtacgaacaattctaaaccatggtgtctcttgtgtaataaaataaacagaaattgcccaaacttaacactgtcgcaatgccatttaaaaactcataataaaaaattttgaagaaaaaccattttatttattttgcaactaaaaaggaggaagtcttgcctaagaaaactaaaatgaaaacccaaacgcaagtggtggagagttctttaagatctgcttcagaattgccagaaacatgcaactcatgtcaaaagagaaaatttgaaaaagtcctttgttatagacatggccaatctcttttaagtccaaaagacgagtttgaggtatataaaaaagcactgtaattaaaggatacaaaaacatggcctattttaatgtgttcttaatacattcttggacagccatgaaatatgttgtgaaacattgtaaaaaatggccactatctctcactccttcctgtttcacggctttgtaatgtgactgtgaagtgatgtctagaagtgaaatctgtttttcttccacttgaatctgggctggtcttctggtttgtcttggccaataaaatgcaggagtgataatatgctagttcaaaatttaagtctccaaaggactttgatgcttcaatttgatctcttggaagactgcctagctgccatgtgaacaagcctggtctaacctgctggaagatgagagcaggtggatcaaagctgaggcagcctagttatctcagcccaggcctcagagaggggagagaacccagctgacatcagcagtgtcatccacttgacttgcaactgaccacagatgcatgagggagaggagaactgccttgctgagccccgcctggattaccaacatatgcaatcatgagctacataaatgctggttattttaagctattatattttgcgatggtttgttacttagcgatggttaactgggacacaggctaacttggttcttcaccctgcagaaagcagatttgttaatttcttcatttacttttcttttgctaaatgtatgctgatgaaaattgttgaatatgttttaatttgcaaaggatttgatgggaaaataactgataaagattttttttccacaaatatgtgagtgttttattgagcacaatatcaactggaaccaataaacaattatgcacacagctggcacccagcaatgacacacagctgcactggaacattttgccccgtgcatgtaccagaaaccacggcatcattcaccaacaccatcctgttaagcctctgggagtttcatgaaaaaaaaaaaaaaaaaaaaaaaaaaaaaaaaaaaaaagtctagtggtttgaaaacttgtcttttaagggaaattattaagaaaatgaaaactgcctctgaaatttgacttcaaaattgtattctaggtatatccttttccttctcagccagggaaagtgctatgtggagttttcaaactcatagatgaattactagttttcttcaaggagaacaaatacaaacaaataaaaatcctgactacagctttgaaaaatccaaataaataacattaatcatgaagagtggctcacaaatcttttttcaaagctgaatttccacagtctaccagggcaaaagaaagctaggaatgttttttcctgcacatgataagatcatttccaaaaaagtaaagctctgcaaatgaatgcaaatgttgatggtgaacaattaatcttttgtaacctcaagttcagttcatattatgaaaattatagtgttggggtaaaaatatagaaaacagcctccattatctcacttcactaaaacggttttagatactcaagaatctaaaagagattgactagcaaatcagagttcattcagttcaccacctgcaaggaaatgcattttttgacattttcacctgcagaagcctaaaaacgggccatagttttgttgtacctcaaggaatctctttttatttttattttggagacagagtcttgctctgttgccccagctggagtgcatggcacaatctcagctcactgcaacctccgcctcccgggttcaagcgattctcatgcctcagcctcctgagtagctgggactacaggcacgtgccacctcgcctggctaattttttgtattttagtagggactgggtttcactgtgttacctagggtggtctcgaactgctgagctcaggtaatccacctgcctcggcctcccaaaccgctaggattagaggtatgagccactgtgcctggcctcaaggaatctctttagtgattctgctggacaagcatacaaagcaaagagaaaatccttttactctgtgcccacatatttatggggtctaggtcctcaaaatactgaagcacccaaacagagaagagaaagtttctagaaactgaatctgacagctacagctttcttcccttttctttaatgcaacccagtttcccaaaatgaatatgcacaatccaaatgcttctcatttttgtttttcctttatttttcctaacagtaaatattttaactttgacaatgaaccctttatattatagaaaagaatgcaaagtttacaaggaatgtaagataaacaatgagactaaaaagcagcttcctacagtagcagtgttggggacaacagcagggatcagggcccttgtgcactgctggtgggactgtgacatggtgtagctactttggaaaacagcctggcagttcctcaaaatgttaaacacagagggaccatgtgacccatgcctgggtatataaccaagagaaatggaaacatatatccacagaaacttgcacatgaatgttcatagtgacattacacataataggcaaaagcaggaagaaactaaatgtccatccgctgatgaacagataagcaaaatgtgatgtatccacataatagaattttttttttttttttttttttttttgagatggagtctcgctctgtcgcccaggctagagtgcagtggcgcgatctcggctcactgcaagctccgcctcccgagttcacgccgttttcctgcctcagcctcctgagtagctgggactacaggcgccaccaccatgcccggctaattttttttgtatttttagtagagacggggtttcaccgtgttagccaggatggtctcgatctcctgactttgtgatccgcctgcctagaatattatttggctgggcgtggtggctcacacctgtaatcccagcagtttgggaggctgaggcgggtagatcacctgaggtcaggagttcgagaccatcctgaccaacatggtgaaaccccatatctactaaaaatacaaaattagctgggtgtggtggtgtgtgcctgtaatcctagctactccggaggttgaggcaggagaacctcttgaactcgggaggcagagtttgcagtgagctgaggtcacaccattgcaccgtagcctgggtaagaagagtaaaactccatttaaaaaaaaaaaaaaaaaggatattattcagaaaagaaatgaagtgctgatacatgccccaacatggatgaaccttggacacattatgctaactgaaacaaatcacttacaaaagaccacatattgtctgagtccactgatatgaaatgtgcagaatagacaaatctatacacagaaaaagtaaatcagtattttcctagggacaaagggatggagttaatgtgtgtggggatgatagcttatgagtacaggatctctttttggggtggtaaagatgttgtaaaattggggcaatggttgcatgactgtgaatatactacaaatcactgaattgcgtactttaatagatgaattgtatggtttgtgaattagatctcaataataacaataaacataagcatcctgctttcattaggccaccatccccaggcttcaggccacgtcttttgatcttctctgccattagggtctttggtgctaaagggatgggagacattcacataagggtccagccacatctcctgaggcacgtgatccgccttcattcatatgacaaacatctactgagctcctgcaacatgccaggacctcagtagatggggtatccttagtaactgtatccttagtactagtagatggggtatccttagtaaatggggtatccttagtcacttagtaactaggactagtactaaggatacagttagtgaacaaaatagactcccaaagtccctgtccctgtactgctgaagttggcattctggtgggggagtttgacaatgaacaaatactaaataagtacatagactatcaggcggatatgagctgtagctcaggatagaggacggggagacgcagaggcctctaagagacaaccatagtgactgggggaagagctgggaggtgaacttggctagcaggtgaggcttgactgcctgtggaccaacacccctctccctccctggaaaggaagcagctgaggtcaaagccctgggcagtcattcagctgtggcctctgctcaagaagaggaaggcgcgggcagatgccttctgttgtctaaagccagggatgcatgttggcctaatttcctctttgggaggattacagggcagagtatgctgtggtttcagtgaaacattttacaaagtttctcatgatctactcaaggtcaagatgaaaacgtatactcttatcataggcagacttctaatgggtaaaataaccatatacaaggaatgtcaatttctgaaataatatatcaagttatgaataacgtatccaatatgctgatgatgagtactagcagtaatactactaccaacactatgataaattaatattattaacaaggtcaataatcagtggcattcaatattattaacaataataacagccgaattctaataagagcttcattgatctctgtgaaccacaggccttttatttttatgtactgataaatacttttattatcccttggttgcatttataaaatccaatttttaaaatgacaaaaacttagcttaaaagcaagattccaacaggccaaagagagactgatggatttaacaatgtggaatgaagatttaaacagaccagctacttacgtgtaggaggagaaaagcagcattaaaaaaacaaaacccatacaacctgaatgttactgacagcaacctgaataggaggctgaagtgtgatgtggtggaccccaaagctcatgcaatattagtatatgaaacaaaccacaagactgggcaacagagtgagaccccatctctacaaaaaataaaaaaaatttgcgcatggcagcgtgtgcctgtaatcacagctactcacgaggctgaggcaggagtattgcgtgagcccatgagttggaggctgcagtgagctaggaatgcaccactgcactccagcctgggcaacagagtgggacctggcctcgaaaacaacaataacaacagcaacaacagcaaaccacaacaaaccacagtgttctcactgggagttaatgggaccgacatattaacaacattatagggagtactgtgttctgtttcatggctacattttaagacagatgtttgcaaatttcatcaaatccaggcgagagcatttaggatgaggaagtgttcaggtccagcttcaatgactgaagggaatggtgatgtctagtccccaaaagaatagctctagcagtgggaaggcgggggctagcgaactggagcacggttttcttcgagattagatgtgttaagtgctggtgcatggaaggaggaccaactaagtggaaagggtcaggaagcggggcttaaaagtgaggctgggctcggtggctcacgcctgtaatcccagcactttgggaggctgaggcgggcggatcacaaggtcaggagatcgagaccatcctggctaacacggtgaaaccccgtctctactaaaaatacaaaaaattagccgggcatggtggtgggtgcctgtagtcccagctactcgggaggctgaggcaggagaatagcatgaacctgggaggcggagcttgcagtgagccgagatcacgccactgcactccagactgggcgacagagtgactctatctcaaaaaaaaaaaaaaaaagtgggcagattttgtggtgactgcacaaagggctttgtgccactcagagctgctacccaaggaggtggctttctggaagcggtgggtgagtgtcctctccctggagtgttcctgcagaggctgggcaccacctgtgctcccgctgcagagggaatccctgctccctgtgggcggttggcctcctgacctctgaggtcccttctggctcttggagtcagggaccaggcacggcgaacaaagagctccagttggggggttggctcaggcactgtggtttcccaacactagtaatttgtattcagagaacaaacacaacattgtctgaattcaccactgctgaaggcacagacttggagaagtcgcaatgatctgcaatggcactgacggcaggtcaactggaactgcaaaatctctcaagatggaagccagtatctcatctatgagccctgctacaccctgtggctgcctgaccgtggctctggctgtgaagtctttaggtttcattctctcttccccaccagggaagggtctcagggagccccgctcagctccatcatctgcctggtcaccgctgtagattgttcactttggctttgcctcccatcttcttccttgggtctatggctggtcctcacactccgaggatcctggatctcacttttcctttgcttctacatctactcttaaggcccagccctgcccattccccttctggattttggggatcccagcccaggtcaaggtctttattgcccttgagcaaaggcccaactagtgtgtagtaatagtgccatttattgactaacatatgccagatgttgaacagtctctatttcacctagtcccataatgacagttcagagcaggtgttatacccattttacagaagaggaacctgaggctccaaggctcagtaacttgcctgaggttccccagtgtgtggtagagctagaattcaaatctctgtttgtagattcaatgtacaatgtagaattcaaatctctctgtaaattcaaatctacatttttctctagtgtctcatgccgatcatgctgacgtcagcacctcactaaaaccataccatattttcagtaaatatgtgttgattatttcttttgtatttgtttgcttgtttttaggagaagaagaaaaacattctactcatttccccccaaaaaagaaagaaacagaagaaaaagataatctcacatggctttgaaataaacagtggccgagcacatttaaaacgaaagctttgtgtgagagaaatctgctttgaggttttatacttggattgttctaagtaggaaaagaattgtctctgtgtgctcaccgaagttttggctctcaaaacagtgttttaaaaaagtttcaatatagcagggatgacatacttcctgataaagattctcatcaccaagaagtggctttagtgtgatgaataccaagtcaggtgacaaattatgcagctcctagctagggtgtgattcggattgacaaacacaggagggataagcatgcggatattaatattgttgggagattctttaattctgcccaattcttctatctggttctatcttaatatccatcacagattttttttttttttttgagatggagactcgctttgtcgcccagtctggagtacagtggcgcaatcttggctcactgcaaactgcaacctccacctcctgggttcacgtgattctcctgcctcaccctcctgagtaactgggattatggtcatgcaccaccatgcccagttaatttttatattttcagtagagatgggatttcaccatgttggccaggctggtcttgaactcctggcctcaagcaatccacctgccttggcctcccaaagtgctgggattacaggtgtgagtcaccatgcccggcccacagattttatttaataatatacacacactgtactttcattctctctagggggtaaacaaacaaatcaaggactgtaaatatcaaacttcagaaaagagtaaccaagcaggacacaaacccaacagctcaccctttctcattccccagttggcagggctggcaccgaaggtccctctctttgcaacacccggcaaaggggacaggaaatctgagccacagttgggcactggcactcacaaggtgcatggccttgggtgagccctttgatcagtttctgctcctcagttttgttgctgatagcacggggagtattaggatctcaaagagctgcaggaaagttcagaggatgtggtgtgggcaagcgcactgtcaactgtaaatcactctacaaaaagtgatcactattaccttagtcaacaggcatttcccagtgcggagaattcagctgacctgctgttgaaaaggagacactccacctaaaactgctttctcttccccagcactgagatttattcttctcctttgttttcattacttcctatattgcatgtttatttatttgtccattgtctgtttccctgtattagaatgtgggtttcttgcaggcctggctttggtctgtttagttctctgttgtatctccagagccttgaacagtgcctggaacatactaggctcaatacaccatttttgaattaatgaatgctaaatgacgtctccagtctaaatgacccccatcttagcccccagctctgatattatgaacaagcagtaaaaatgtcacgtagaattttagaaacttgaactttcaaagcaggatgttagagtggttcatttatttatttatttatttattcattcccttaactaattttcagtcaagtactatgtgcaaagctctaggctctgctacatgtctgttacgaatatcagtcaatacaattttcttttttttgagagagagtctcactctgtcgcccaggctggagtgcagtggtgtgatctcggctcactgcaacctctgccttccggattcaagtgattctcctgcctcagcctcctgagtagctgggattacaggtgtgcaccaccacacctggctaatttttatatttttagtagagatggggttttgccatgttggtcaggctggtctcgaactcctgaccacagtgatccgcctgcctcggcctcccaaaatgctgggattacaggcatgagccatcatgccccgccagtcaatactgttataaaacaaagcaaaatggttttttgtaagaaaaaaaaaaaaagctttcaaatacatatttaaatgacaaatgcccccctaatttcctatttatgcccaaatgattctatctgatgtcttcacagctgatttacaggcatctgtggtctggtggcttctttctagaattaggaagctcatcttaatttccaaagtgacatctagttagatgcctaggggaaggtatcgtatggtccaatttcttccacacttgtttctaaactcattgtaattactggagatgtgggtttcagagagggcatgaataagtacagttgatgtgtaggaaaaaaaaagtctcttagcagaaaaggttaaaaagaaaactcctgctcaagcgccataagttttaaacaagccagttgtccgtgactttgtttatactgcagttgggtattgtttgacttaggaagctgttcagtcatcatggtactaatgagttaataagtaagtagatgcctatattttccaattacgtgccccattttatttctgggtagtaacagtgtgaataatttggcagggcgggtccaagagagaaagaaaacttagaaaaatcttcaaaccttcagaaacatcactggacttaagagtgtagaaaatgcttcatagtgagattatatatacacaaattaaaatgaatttaatgtatataaaattaaattttttaaattaatttgtataggattaaattaattttatataaattaaaatgtagcaattaagtggaggaatacttatttcaaaattctaagtaattcaaaaaattggattaaggccagtcgcggtggctgaagcctgtaatcccagcactttaggaggccgaggtgggcggatcacttgaggttaggagttcgagaccagcctggccaacatggtgaaaccctgtccttactaaaaatacaaaaattagccaggcgtggtggcatgtgcctgtaatcccagccattcgggaggctgaggcaggaggattgcttgaacccaagaggcagaggttgcagtgagctgagattgcaccactgcactccagcctgggtgacagagtcagatcctgtctcaaaaaacaaacaaacaaacaaacacacaaacaaactaacacaattgcatgtgcgcctgacctagcttacataacacaatagggaccatcaaagaagccaattagaacttcagaaactatatcccccaccacagtcctaaatctttcctgtctcttagaaggggagcaagatttttaaagtattaaagggtctacagcaactgagaagagtcatcaggtataaaacaatcacagagccactccaaatctttacgaaaccagttagatggaacaaaaagatccagcatttaacattcctctggcatgtaggcattttttttggcagaagcagaactttggagctactgactcaatgctatcctccccaactccatgtttttgtctccttaggacaatcttgttctcaaaagctatgatgaggttcttgaactgaatgcctttaaggtgtcctttacatcctgcctgtcttcacccagtcctacctgggtattttgaaagtgtgttaaatactttcatccagaatgcagatttttaaggtgattataggaattctttctaggtagtaagaacctacattacaatacaacctttggttgcgtacaaatttgggcattgtgtttttgcaaccaaagtccacagcacttgaattccaccacacacttataggtgaatagtggaaaaccacttgtgtcgaaagggtatttccctgtcattactgcggtgtcagaaattcaacactgtgttctcccatgggaacattctttttagacatgtgtcctgcacttggcttataaaatcattcactattattccaaaattttgtacacatggcatgtttgtttgggcttgaaagccaatttttgtattcaaatctttgcttttattatttttttttaatccttccacttagcatgtgaccagttatacacaggtgcttcaatagtagggtggtaactaacactgaatcaattctcactatgtgccaggcactgcgccacacatgttacctatcataattcacttaatcctatcatccccattttacagatgtcttagtctgttcaggctgctatagcaaaatacatagactgggttctattatgaataatagcaatttatttcccacagttctggaagcccaagatcagggcacgagcaccattggattttggtgagggctcctctttccccttgcagacggctgccttctggctgtgtgcttacatggtagaaaggaaaagggacctctctggggctttttagttttctctctctttttctttctttctttctctctctttctttctctctttctctctctctctctctttctctctttctttcttgacagattctcactctgttacccaggctggagtggagtgtgcaatcatgactcactgaagacttgacctcctggcctcaagtgatcctcccacttcagcctcctaagtagctgggaccacaggcgtgtgccaccatgcttggctaatttttgtatttttgtagagatcaggtctcagtatgttgcccaggctgatctcaaactcctgggctaaagtgatccacctgccttggcctcccgaagtgttggaattataggcatgagccaccatgtctgggctggtgcctcttttataagggtactaataccattcatgagggctcagcacaccctcataacctaatggcctgtcaaaggctccacctcctaatatcaggaccttgggggctaggtttcaacagatgaattttggggaacacaaacattcaggccatagcagcacataaggaatggagtcttggagttagtgagagacggaactgcaattcaaacccagacagtgtggttccagtgctcttacattattttacattgtttcttgtggcaacatttccctccgtgtatgttaagaatttagaaatgttatatggtgactgctagggactaaattgtattcctctcccctaaatttatatgttgaagtcctaacctccaatgtgatggtttttggagaggaggcctttggtaggcgattaggtgtagatgagttctaagggtggagcctgcatgttgagactagagcccttagaagaggaagaagagagatcagagctttctgtctctgccacctgaggacacagcaagaaggtggccgtctgcaagccaggaagagagccctcatcaggaatggaatctgctggcatcttgatcttggacttccagcctgcagcacagtgagaaataaatgtctgttggttaagccactcagtctatggtattttgttattgcagccccagctcatgatgacagtgacaattcatctgtctatcccttacattggtgataatcagtgaagaattaaaaaaaaaaaatagaaggtactacgtaaataaagacaggcaatggtctttaagatcaatgtcagtacatgtattatggcaagtattaaatgatcttatacagccagaaaatatatgtggtctaactcttattttataaaagaaagtaaaacacaaagaggttaaatgactggtttaaggtcatgtaaaagtacatagaagtagtatacaggtggtttatttttttagattacaggtgattattttctagctatgaggtaagtgcagtctgctctaaaaataaaaagctctcctcctgctcaaacctctacttgaactagagggcaaaattcctgctttattattctaatgacaagatcatactgcttctgactagaaaatgccaaaacaggagacaaaattagcatcgtatggtgccagttaaaaattatttagaaacccacaagttctgtgctttgtaaatttttttttctctctctaggacatagtagagctgaatcattacaatgaggcatgtgacagaaatgttgactatttctgccatgtctgtctatttatgacttcttcagactacagtaattgtctgcaataaatagactgtattcaaatggcaggattgatttgccattcaggattataagcaactgtgagtagttcattctttggttaaattatgcttgtaagaagtgagaaaatgggatgagaaaaaaatgtgctcagtccataatgataacctagggtaatcatgtattttcctgaaggaagtaataaggaacacacaccttggacacacaataaacagcatggtgggaaaccctagagtggatggtctgtatcgagtgaggttttccagggcaatgttattcaaaaatctctgtctctttgtttgaatcttagaagcatcaatatatgtttccttgaagatgatgtttaaggccaaatccctttcatctaaggagaatctacagtgtatatgtaaataaacagctttcttcttcaggtgtcaacaaaacccatgaccgttatgatgtcaaggaactaaagcacccgacctccatacaagtgttcctgagtgcgacattttctccttccaaactactagtaccacaactttagacttaggctctgtgggcaggtcccttatctgatgaaagaggaaacaatgcttctgctcacacatgtgtgcacatacgtacacacacataaaccgggtatgttagcacagcatcatgtatatgctatgatacatttattctaatcggcaaatggcccaaacctatgtttaccataaggtttcatcactttttttaaagaacagctataccacatgtaatgcctcacaccgagttcaaggtctgctaaaaatcagacttttttttaaaacctggactattgtaaaggtaggccacgtttatcttatacataagcagttgatctttaagatatttcatcttattggtgctagctagtcctaacagattgctaaagaattcactgatgcaaagaagcatggttgagtctctgtgatgtgccagccctggggaggaatggagaggtgaacatggcaccaccctgttttcaaggttggcacagtattgaaggggagatagacaaaataaacctgcaagtcacaaagcaatgtaatgatagaggcagcatgtgccacatgtcaatgacaaaccatgtgagagggatcaaccatcaggttggggtgggccgtggctaggggagaggcagtggaggctgcaattcagctgcgcatctaaagttaagaagaagctttttaagatcttgaagctgttattccccacttttatactatgtgcccatctcatggacatgctgtctctgttgcccaatgagggaatggctaaaaatgactcaggctgtggaacatggcctccttcagtctattgtccatgccatggcctgagtaatcctttaaaatcgtaagccagatcacattacactccagctgaagttcctccaatgacttctcatctaattaagagtaaaagccaaagtgcatgggccagcctaaaaaatcaacattatttggaaatctcctttctaccccatcttatctccgcctacttttcttctcgttcctttttttttttcccagtcatcagaaaagccatgctcccacctctaggccaccacacttaccgttccctctgcctgggactctcttcccccagatagcatctcttgccataaaggaaggacttctctcagggagaagcagtccctgaccactcagtcaaaaccacattcttttcacattactctccatcctcctagactattttatttttcttcatgatgttacttatcatctgacacagtacagattttatatttgttcatttcctgtctaccctaagtcctcttaaaatggaactttcctgagcatgggcacggacatgttttattctcggcgttatccctgatgtttagaagagtacctgtcatagtgtgttcagcagacatctgttgaaagaatgacttccagcactttgggaggccgaagcgggcggatcatgaggtcaggagttcgagaccagcctggccaacatggtgaaaccccgtctctactaaaaatacaaaaaattagctaggcgtggtggcgggcgcctgtaatcccagctgctcaggaggctgaggcaggagaatcacttgaacctgggaggcggaggttgcagtgagccgagattgcaccactgcactccagctctggtgacagtgcgagactccgtgtaaaaaaaaaaaaaaaaaaaagaatgacttaagagagaatgcaactggagcatttcttcattaatacaggctgcaattgtggtggcacaatgggcaagatctgcacttacttctttcaaggaagagatatcacagggatggtggggttatcccactcctgatcagaatttagattcactgactgcaccaatggtggggcttgatcttgaccactgggccaaaacagatggagatatacattaaacaaagaattccctctaatcaccacttctattatcaatcaaaagtatttgtatatttacttttgtgtacaaaaatttaacctcctgaatgtgatcgctttatcttctgttcttggtcattcaaaccactttcccagaaaaatttaattgcacaaaaggcagcatgcaaatgctctttaattttagtttctgttccttctttaaaatccattttcagtgtaacaatatcgggcccagtgaaagtttctattgtagtgaaacgctttttttttttttttttttttttttttttttttttgagatggagtctcactccgttgcccaggctggagtgcggtggcgtgatctcggctcactgcaacttccgcctcccaggttcaagcaattctcctgcctcagcctcctcaggagctgggactacaggcacgcaccaccacgcctgaataattttttgtaattttagtagagacagggtttcaccgtgttagccaggatggtctagatctcctgacctcgtgatctgcccacctcggcctcccagagtgctgggattacaggggtgagccactgcacctggctcttttttttttttttttttagtataaaatttccctttacctcatgcaatttcaagttatcaatcagtacatttatatgattgattgaatttggtgtgtgctaaaaatttgctgctcaaggaaatcaactttttatttctcctattaggcgtctgttcatcgtgtgtggttcaaggaggaaattcgtggctgcagagatttgaaaaccacagacgaggggaatatattcaacccagttttgacctgtttctgcttctgtatattgtgcattaactagaagtgatgtgaagaaatggaacagaagagaaaatgaggctgtgtattggaaaacatttgtcagcctgccctggccaactgtgaacacagattcctagaagaatcagtgaaaatctcatcactggggttatttgcagccagactggtccagatagttgagattttactgtagggagtgattgtttctggaccccttaaggcctgggagaaggaggagtgatgatgatctcattgtctattcccttttgtgatgggtattgattagtgccaagccaataaccaaggcaattccagtccataataaaaagcaacacaacagcagtcccaatgatcagtcagcaatttggaagccaaaggcaaagataagaagcctgctagagatttacttgcaggctttataatgtcatctccttcaaacactagcagaaagcacagtatttccttttggtccaccagctgctgttgaaacagagttttgattgtagtaagacaggacatttgtttcactcagggctcactgaccatgctggtcttcatgttttctacttaagacagtgtccttatacaagcaaataagaaaaatgtgccctacacgacaatgtacaaggatacacagaatgaacagagccaagacgcctaaaagacccacatacttttagagcagaaaaataaattccactgagggtcacttctggaatttctatctttattcctacagattggatttcccacctttccgaagaaggtaacatggtcaagttcttccaagtcctaagagtccaacccaagccttcatttaagttttcagtttagagaccaggtgtggtggctcacgtctataatcccagccctttgggaggctgaggcgggcagatcacttgaggtcaggacttgaagaccagcctggccaacatggtaaaacctcatctctactaaaaatacagaaaaaattagctgggcgtggtggcacacacctgtaatcccagctactggggaggtggaggcaggagaatcgcttgaacccgggaggcagaggttggagctgagatcgtgccactgcactacagcctgagtgacaaagcaagactccgtctcaaaaaaaaagaaaaaaaaaattcggttgagaatgaagcccagtgtcatcatttgctcccctaacatgtaaaaccatctatgtagaaaaactgattctactataatagaaatgttttctagaacctagactcctctaaactcatggctgcccatgaatcagtgcttgaagattgatttttacagcttactgaatcatatattggtatctgatttttcttacagcactcaagaagttaagaattttctatttcaattggattcaagtggtttctgccttttctcagggtacaagttctacaaggagctgggagataattttaaaatagccaaaaaataccctttgcatgaggaaacgatcagaacgagagtctagttatttccattaggctgtcctcttccacaagtgatgctagcatgatagtaaatgccagaactataaattctataaatgtgtagagactgtccatacagaagagaaggccatcatttcataacaacatatggaaagtaaacacaacttgatctttagattttaaagtagttggcagtgttggaaattcaagaaacttgagttcatttggagcaagtaagttaagatggagctcataagaaatgtaacagatttttttccttgatattatttttagagtccattttcagaattcaactgaattgtatttagaatttaaaattatagctcaatgatccatttttaaaaagagaaattcagctgggaggaaaaggatagttatacttaacataccttttttttttttttttttttctgagacagggtctcactctattgctgaggctggagtgcagtggtgcaatcttggctccttgcagtcttgacctcccaggctcaagcaatcctcctacctcagcctcccaagtagttgggactataggtgcatttcaccatgcatagccaactttttaaatgttttgcatagaagaagtcttgctacgttgcctaggctcgtctccaactcccgggctcaagcaatccgctcacctcggtctcccaaagtgctgaaaggcccagccttacttaacatatctttagctggatttttttttttgttttaagtagaagagaaaaacaaactctgagcaaaccaagtttgtttttctcttctacttaaagaaaaaatcctaaactctgaattctaattaatgaaaattaaattatttacacaagtatttggattggcatttatatcctggcaaatgatctacatgcacattttttaaagccgtgggattaaaaagataaagacccttactagaagactagcagttggttttttaacttagctgctctgtttcatttctttttacagtcagtgataaatggagatcatatattctccttaatggcctgttcgtgatttggcattgtgctaaggctggctggcagtggctctgaggatatgtgggggtgtccctgggcaggagaggagatactgctgaaagtcatgccccatcccttttccctctgccccagtgctaggggctggctgggccactcagccagcacagacggcccagtgggcacaagttacaggggacttcttccagcttcctttttcctctcccttcctgcctgttcagagacgtgcaacagagtaatgagaaggaggaggcctccttgaaataatgtcacatggaattctcagtttaataaggcctccagtttgttccaaacatgcttgagcatttggtggcatattagaaattgatctgaaagtaaccggacacgcttggcacccttttctttttgcgccaaaccattttgttattctcatgttttatttccttattatttgtaagcgtgtttggctgcacagcaagccacacattatttgtgggatggtagcctgcaggagttttttatttttaaattaagctgccacttgacatataaaatgtaaattttccataatcatatcatcacagtgacagttccatgtttcataatttgtgcaggctccattctctttctgcatggaatgcttagcagccagtctggagaacttgccgtgtgttctccaggctgagtccttgctgaagaccaccctgagctggaggtacagcgtgctacctggacaccctttgtgtccacctggcaggtgcagagctgcccgcctactacgccctgggtcacctgcttacccgagtgctgcaccttgaaggtttgccatggtagagcctggtgggggagcagtgttgtcccttccagagtgaaaaccaacttatgaagataagaaccaacatcacctctggaaggaaaatccagaacaactggtttaaaacctggaatttaggcttattttgccacctgaaaaaattgggggacagtagggagggaacagcactccccaaagctggaggcctagtttctattagcggttctaagtcattcccgaatattaacttaggcaaaatatttataactttcagtatttcagttctcagcaggcaacatggcagtaggctgtagtggtagagatgggatctgcggtcagagtctgttgtgagtttgaatcttagctgtgctacttactagtgctatgatggaggcaaattaacttgaactttctttgtgtcagtttgctcatctatcaaatgggcataaatactctcataaggttgctgtgaagattaaattagatattccatgaaaatcatacagcaaagagccaggtacataataaacatgcaataaatattaaccaaaaggattataataattattattcagtgccaggacatggagtgagaattaacaattttctctccaagaaaaaaaatacatttaatttccagacaggagggatatgtaacaataacaccctatttcaaacttggtgagaagatggagatgacttcactcatgcagagaactatgtatttgtggaggacttccagcttgcaatccccataggctcagccgggtctgcacaggactgaatgaggctctacctccttcactcactacgccctgctttcatcaaaggcgttcactgcatttagtggcttgtgtggttttggctcagaatggtaataaagaggtgacgagtgacaagagagggctcctgctactctctggcttctccgttaagcgtctgataatgctggtctctgcctgataagccgcaggggttacttgtcctgcgtgagcctttcaaggagtcagaaaggaaacctcagctctgcagacccattgatggccgcggaggctcagggacatgcctagggattgtttttgaatgagatatggtttgtccctgtggtgttgaaaatgattctctctaatctactgtaaaacccagtcccatgcaaagagtgtcactgccagacgttcccgaagggtctggggggaaacagacagatacagggactgcagctttaggagaaaacgtcgtttgagggaaagaatgcttaaataggaatataacagtgtagaattaagaataaaaaggcaaaagagcctttaattgctatagaatcccagagcagtggttcttaacctaaattatactgttatttagaaagatttataaaattttagcttatttgttaatttttttttaagtcggtgtcttgctctgttgcccagtttggagtgcagtggtgccatcacagcttactgcagccccaaaatcctggactcagaagatcctcctccctcagcctcctgtgtagctgggactacaggtgcacaccaccgtacctagctaatgtttagaaactttctgtatagatgagatatctctatgttgcccaggctggtctcaaactcctagcctcaagcgatcctctcacttcagcctcccaaagcctttggcctaaaatgttaacttttctgatgtaaggtgttgagccataaagaggtcagggggaagaggagattagagatggtttaacccaccaatatgtttccaggaaaggaagctgattctgaagagactcagtgagttgcccaaagtcccagagctaagtcaaggccaaggcagaaccagaatccactgacctccagctctagggctgttatgtattcccccacctaccccttctggactgtatgactctagctagcaagagctgcagttttagcactggccaaatccattctttttctaggcttcatccattgctgtgccccccgaggacccttgtaccaatgaccatggtttctgatgagttcctctgcatcctccacatctcagagtggagatttcactgttcattccccaggaaagaccttcctgactcccagggctaggttggctgctactaccctgtgcagtaaagcctttgctctatcccctatccctgcacatctcacgtggggtgtaactgccttttcttgagggagttaaaaaacatgcaattaaggttgggtgtgatggctcatgcttgtaatcccagcactttgggaggccacggtgggcagatcacctgaagtcaggagtttgagaccagcctggccaacatggcaaaatctcatctttactaaaaaaaaaaaaaaaaaatagaaaatagctgggtgtgtctgtgtgtgcctataatcccaggtacttgggaggctgaggcaggagaatcgcttgaacccgggaggtggaggttgcaataagccacgattgtgccactgcactccagcctgggcaatagagcaagactctgtctcaaaaaccaaccaaccaaccaaccaaccaacaaaccaaccaaccaacccccttctacacaattaattagaaacataaagatgaagaattaagaaaggataaggcaaatggcctctttcattcccacagaatcgtagagatgtattaccaacccaaattctattgctccctgagaaaacatttttgtccagacccattgaccaagtctaagttttgcagaagcaataacctggtcctctgctttgtccttggttcctttagaatctagcacagtaagtggctcatagaaggtgctcaacaaatgtttgttcaatgaaagttgaatgagtgctttaatgttagctaactaacattaacatgggtcatgtcctctctgtggcttttcttcttccagctcaacatctccatttttttctgcttctcatagacagtgtctagagtcttcatctcctgaaagccccttctggacaaactccaggtttccaggtctgtttagctggtgactttgcagatgccacaccttgttccatgaggagaaggcggggcagtctctcttgctcctcctaggagtctctgtatttctaaggaagtgacttacaattgtgttgccttccttaatcaccagccaatactgttggttcattttcaacttatacccattcaaggctatgctgtatgtttagaagggactactccctgggacttacagtctctttgagtaagttataatagtaacaacacccataaaatgatagtgaatgatgatgtcttaatatacaggtgtgtgattactccaaaaagtaattgattttattcattataattaaaaaatagcccaagcacaataacccaatgtgggttattgttgagccaatcaacactttcttccccctacaaccatgcttgactagcttaaaaaaatatttctgaaaggctgggtgcggtagctcaagcctgttatcccagcactttgggaggctgaggcgggtggatcacctgagctgaggatttcgagaccatcctggccaacatggtgaaactctgtctctactaaatatataaaaattagtcaggcgtggtggcagtcatctgtaatcccagctgctcgggagactgaggcaggagaattgcttgatcctgtgaggcagaggttgcagtgaactgagattgtgccatttcactacagcctggacaagagcaaaactctgtctcaaaaaaaaaaaattcttactaaggcaggaaaatagggtctggaggcagggaacataaagcggatgaacacttcagctatgacaggaaatgtcttttcatagggtgtacaccgagtaaatgactttgtaacttacttcatcctcttcgtttacatagggcatacaccaagtaaccaatggaatcgtctggaaggtatttaaatccccacaaattctgtaacgaggcccttgagcccctatgcttgggccgttcccacactgtggagtataatttcattttcaataaatcccttcattccttccttgcttgtttatgcgttttgtcccattgtttgttcaagatgccaagaacctggccaccctccaccagtaacattactacatttgaaagaatgaagggtttcaaaattttgtccgtgacaggggtcactctatcccactggcatagtgagtgtgtgaacaggggaacaagatgtgttttacagtcagtttcatccacattcaagcatttcttttccagattttcaacataagaagttttgttgtttttgttgatattttgggtagtggtggccaatgtctgttgcctctctcctgtatctctgcccctagaggcccctgggacacagatagaaaggaagcagcttccccaaggacttggacagcagacaagctggctaggggagcagggggcaggtggtgaaacaggggaaaagctcatttctatgacccatcagggaagctgaacaaaatctagaaatgtcaccaggataactgcatagggagatacagcatccttgacagctctataactattatgcagaaaatagcaacagcagaatcaactaaggttgtaaaggaacattgaaaccattatgaatggagatctaaaagaagtgatcagaaaagcactacaggatttggcaagcaccctggaaaaaatataggagctctatgcctaaaacacattgactatgacagcattaagggtggtgaggaacatagaaggagccttggaaaggacaagaaagtgctttgttttagagacatagttttcttaattcttatcatacctcactcaaatgatgcctagaacagggaacaggttctagtgaggtgtagacaatctagattcacagagaaaactattattttttgcatgaggacatcagaatttagagaaaagtctgaactcttttcctccacaaatgtctacggatccacttcattcactgaattcttggaagcgcaagcttaattttatagctgaaaaagcaggggctcaaagtgtcctagtcattcattttaaaactttttttttttttaaatggagatgctggctgtcctttcacattcattaaccaaaagaaaaagagaagcaaactttgcagggtaatcccacttatatccttgttgacgaagactgaaggttccttagggcctaagtttttcactccacaattgctgcagtaaaaatggctggtccttttgctctcgatctcttgcagggagagcaacatttttacataaatagccttacgttagaatgctaaattatattttggtttcatttcagataaactagaaatggaacacatgataattacctagtaaaaaattcaatatcaggttatgaagagaaccatgtgttgcagtcccttgggcttctataacaaaatgccttagactgggtaatttataaacattagaaatttattgctaacagttctgggggctgggaagtccaagatcaaggtgctggtagctttggcgtcaggtgaggcctctgtctgcttcataaatggcactttcttgttgtgttcttacatgccagaagggtaaggcggctctctagggcctcttttacaagagcactcatctcattcacgagggcagaatcccgttcatgaattttggggggacacaaacatttaggccataaaaccatgaaaatccaagattagagcagcagtcctcattttagaactgaaaacaaatgggctgggtgtggtggctcatgcctgtaatcccagcactttggtaggctgagcaggcggatcacctgaggtcaggagtttgagaccagcctggccaacataatgaaaccctgtctctactaaaaatacaaaaactagccatgtgtggtggtgcacacctgcaatcccagctacttaggaggctgaggcaggagaattccttgaatctgggaggaggaggttgcagtcagccaagatcatgctattgcactattgcactctagcctgtgtgacaagagtgcaactccatctcaaaaaaaaaaaaaaaaaaaaaaaaaaaaagttgttaccaaatgatcaacgattttccagaaaatcccaggacaatctgccaatctgccaatatgttaggtaaaaatattgttgtatatggtgtgccttgttttccagaaaactgataaagacaagtttatcatctctgatatttatttttcagtggtgacgtgaagcaaggccagaaagcagggaacagcctctaggagcccttttttcagcacctgcgatgtgccagggctgtgttgtgctctttccacttactctcatgttggactctcctatcagccctggcagcttagatactcctatcctccttcctactaaaaagaaactgaggctcaaaaagctacatgaattccctcaaaacatgccttctgcaagtagaaaaagcaagactcaaacccaagtctgtctaactctagaatctgtgtgctttccattgcatcaggttgccctgaccaggatgtgtctctctcctttgtcccccttcagctgccatggtagatttgtataactaaagggaaatgtgtttggcacaagagggatttctttagattctcttttgtcccagacactgaatcagatatggactcagttacactgaacaagatgtaagatcttatattgaataagataaacaaaagtggatataattcttaccctttaggtgctggcacacaagtaaccataagacagatgtgtataatccaggaaagcttcctggaggagtcagagtatgatcttaggggaaagtaaagagcttcaactggactcctggtttcatgcagcacggtagtcatcactctaagtcatcaacaggtgctgcagtgccaaaaatggctagagtctgaggtcccagttctgccaccaaactcttcggaccagtctcctattcatcttgggtggactgaaaagaatggctctttgctataggctgaatgtgctcctccaaaattcctatattggaatcctcaatcccaaggtgatgatattaggatggagagactttgggaggtgattaggtcatgagggtgaagcctcatgaatgagattagtgtcctcataagagacagaccccagaatctccctcaccccttctgccatgtgaggacacaaagagaagactgctgtctatgaaccaagaagtgagcccctttcatacaccaaatctacccccaccttgatcttggacttcacaggccctagaatggtagggaatatatttctgttgtttatgaggcatctagtctatgggattctattatacaagcctgaatagatgaagaccctcttccttgcaaatgaaggggtgagccaaggatgcttgggttgctttgtgtctcagagatttaagattctatattctacattgattttttaaaaaactcctcattttgttacactttcatcacttacatggcacactcgtgttaactaagcttttccccttaaataaatagtcttgacatttctttctgttgcttctgatccacttactagaagctgctgcggtctcagctgccaggaacaaggcaggcatgcattgcccttctggctgggctcaccaaaggagccttgagttctcagcaatgtggaaatactcctgacagcaaagggagggttgcaaatgttctctgggggtgacatttctgcaaaccttttgttgggcaatcccctttctccccagaaagcatcaaatgcatgctatccccagaagctacatgtctttagaaagaggaaagaataacactccttcaataacagcaaccctcaggtgggtggtgaaggatctcactctctgattacagtggtgcttcctggaagacctgaaataactgtccgcatggagaagtactcagagaagcagaaagggtcagcagatgaactaaaaaacaactttatgagcagatacctaagagttaacgtttcatgttgtagaagtcaaaactacaactcccgtcaccaacccaacgcccagcctttaaatgttttacctatacttacagcggtgttcctttaaatatgatcaccgataaagaggggtgccttttaggtttagacccgcctcaaattgagtaacaaatcagctctttcacactcaggctgcgttttggttaactgcagcagtgatgttcattatccttcgtgagtaagccctgaggctctttgggcatcagtgctcataaattaatatttatgatgaagattaataaaactgaaatgaaaaaaagggacttaaaattaaaatttaaaaagctcttcaatctctaaatccatttccagtgagagggatggaagaacagttagtaccacgtgtgttcgcaagcatttatcagtagacaaatctcttaattgtaaccattatattgtgaacgatccactaatccttcaatttcattcttcactgtttctcatttaagcaattcttgcattttttctatgcctagttcctcagttaaagaaggaaaataaacttcttgtgaaaaaatttacttttcctttgtattcttatatacccacatgcttttctgtttatcctttttgttaaatatgaaagaaactgaataaaaagtctgaaaaaggaatttaagagaaacctgtgctatttatttgcccctaaaccaccactacagataatcttctaatttttaaagaccttcaaataatagaatagcattgaatgcatttcattattaagcactctcagtattagaagttttccttgtgttcagaaagcattcttgttgtgttttttgttgttgctgtttgtttgtttgtttgtttgtttttgagacacagtcttgttctgttgcccaggctggagtgcagtggcatgatctcggctcactgaaacctctgccccccgggttcaagcgattctcacacctcagcctcccgaatacctaggactacaagcgcacaccaacatgcctggctaattttttgtatttttagtagagatggggtttcgccatgttgcccagggtggtctcaaactcctgagctcaggcaatccatccacctcaacctcctaaagtgctaggattgtaggcatgagccactgtgcccagactcttattgtggttttatatgaactactttttgctctgttcttctattgcctcaatagagtatactattacatttttatccagcacaaaatcctggcaaagctttatacagggcacagaagggttaacagtgatcctccactaggggtgattttgcacctctgctctccagccagtggaggacatttggcaacatcaggagatatgtttgattgtcacaacatggaaggtgctaccagcatcagttggtagaggccagggatgctgttaaacatcctggaatgcccagagcaacaccgtcctccccaacctccaacagagaaagacctggtcccaaatgtcaatagtaccaagtaccaatagtccaaggcaacatcatgagatatgtttgattgtcacaacctggaaggcgctaccagcatcggttgatagaggccagggatgctgttaaacgtcctagaattcccagaatagcaccatcctccccaccctccagcagagaatgatctggtctgaaaagtcaatagtaccaagattgagaaacccgagggttaagaggaagtggcagctacacggtaaggcaagaccattgaaacagctgcagggaattcaacgccagtaccaaccgtatggttcacattattctaaattgcctgggattaatcaatgtagggtgagattagggagtgaaaccatcctggagagcgtttaaggttttgaaaattgttaaccacatgattttagttatattttggatctactttttattttatggtgagattaccaatgcaattttcctctatttttcataaggtaaaagctgtaatgcattatttgggaattctaatttttcaggaagcattttagcttggccagcataactgccaatgcttgacatgcttccctggcataatgagtgggatttatttgtaatataaacttctgattggctagttcctggctctttagaaactgccacatttttgagggttgtactttcccaacattaatatgagagtttgaatgttattttttcctccagaaaaatgtccatatgtcaaaggtcaatgatataaaagtattctaatttaatagcaggcatgactaaatatagaatggaacaaaatcctggaattactttgcagagccaacaacaacaagaataatcagtactgcacagtgaccccctctcagacaacttctggatgtgccacatttcttttcaacagggctgccacaagggaagtcagtatctagtctttgttaaatcagatttcccattctggcagcaaaaaggttttcccatctcatcaccttagttggaaaacaaagctcactgtcctgatagttgaagttgctttctaaagtgcaaagggatacacatttgtaaggtgtattaaggtatttgtttccaattatttggccatgcaaacagcgcagctctttgattgaaataaatgtgagaaaacaacttaatacttgttgaagtccggtccaccatgagccatttggctttatgggttaggaagtgagaaacattgctacagcccatgagtacttggggaaactgaagggcacaaaccctttcagtttccccaagtactcatggagtgaagtcatgtttctcagtacgtgcttccttgggggtctgacaatgcttcactcagagcagcgtcaactgaggccaaggtcatgggttgacttcttcaaggtcacagattggcttttcccatgggcagtcaacttcttcaaggcctgtggtcaaatccagccctcctcacctttcctcactctccatttaggaatatgtcaactgttgcagtgtaaggggctagaatgtgaggtctttcctactgtctacttccatgagaggacagcagtcaatgttgtgttgatttcatactcaaaagacaggagtctacatttaattggatgccatacatgttatttcttgtcctattaaaaatatggtcttgtattaaaattagatttctgaataatgcctatgtataggcctgagggtatttctccatctcaacctccgtgctatgagcctgcaacaggaatggcgctatcactgcttcttcacacaaggttaactctcttactaagtggattctgaaaggattgaggaattgaggctgacccgggtagtgatgggatgagaatgtcaagagaagatgtccttgggtggacaacagcatcttgatagagcttccattttatctttccaagcagcccaatactgttttcttatctatagattcatggaaggttacagctcagaaatgtctttacgatttcctagtccaaccctccggtaaaccatgggccagagtggttgtgtcaaccaatgatcacacagctggtcagtggccaggctaggattcattctctactctctggtgctactgactataaaggaagaagcaggatgggaagattctaatgaactcagaaagaggacggggaaagagagcaaggattgaaatcctagtatccgagaaccatgggacttgaaagggtccaatttagttaaatgcaaatcgtgtgatatggtttggctgtgtccccacccaaatctcatcttgaattgtagctcccataattcccaggtgttgtgggagggacctagtgggagataatggaatcatggaggcggtttcctccatactgttctcatggtagtgaataagtctcacaagatctgatggttttataaggggaaaccccttttgcttggctcccattctctcttgtctgctgccatataagacatgccttctgccttccaccatgattgtgatgcctcctcagccacatggaactatgatccattaaacttctttttctttataagttacccagtctggggtatgtctttatcagcagcgtgtaaacggactaatacagtgtgtatgcaaagccaaacatataacattactttgtcaaaaaatggcagcccaaggaactatgaaggctcaaaaagcaaagcaaaacaaaacagggtaagagaagagtctcagatcgtagacaccaggcaggttaactagaggagctttggtgctacttggaggcttgagctgatagaattatacttacagttaggatttgtgcttgccctcagacagaagggcaggccaggcctgactgtacacctatcatttcaacagtctacaggacacatggctggcattttgctaaacaaggctcctaaaaaaggtgtgaatggcttccctgacatcactttacatggatctctgaattttgcacaaaaacagaaagtcttagagagaaggtggccacagcctcctagctggccctggaatggagtgaggcctctcttttctactatattggtaagatctgttttacattttaccctggtctggaactgccctgagtctgggaggtgcccatatgagggaagcacatggtggaccacagcagaaaagccacagggtcttccagagcggtcactccagctaccctccttggtgtgggaaggtgtggttttctgaagacaccgcgccctgttccaggcccttaatggtgtcaagttttcatggaggtttctttgtgatggagggaccctatcctttctcatgtctgaaaactgctctgccacagggtaaatgattcagaaagtttctgattcagccacaaatgaaactggggaagcctcattaaaggcactaatgagcgctccctttcatcgcaggcactgtcttgacatctccatagatgtctctgcaatgatgggcccctccctgtgtactgcctgggagagcagccagggcgaacctgcaatgggggctgagctctgtgaacaaaagaagcctcccttctgaaaggcaagcccaagttgaagtcatcagacagagataactgagctacgggccctcaaggctacactggagcaggtctgaggccagcccagactcttgtcattagaacagtctgcaagacatatggctggcattttgctgaccaagcccctagaaaaggtacgaatgaattgttttacatcattttaaaaggatctgtggtattgtgcaaaaacagaaagtcttatttccagatagcaaagaaaagttttaaaaaagagatctagccaggcgtggtggctcgcacctgtaatcccagcactttaggaggctgaggctggcagatcacgaggtcaagagactgagaccatcctggccaacatggtgaaaccctgcctctacaaaaaatacaaaaattagctgggcgtggtggcgcgcgtctgtagtcccagctactcaggaggctgaggcaggagaattgcttgaacccaggaggtggaggtttcagtgagccgagattgtgccactgcactctagcctggcgaaagagtgagactccatctcaacaaaaaggcaaaaaaaaaagacctatgtcttttgatttcattttccttgagagaagcaagacgtcttgtggtttgtttcatgaaatatctgatcatagaaagggggaggtggttcatagattataaaatgttgtcattctaaaactgcgagttatacatttcatatcacacattacaattacatttgggaggaaccgtgctttctcacacggcaagatgtccaggacaagaacacaagaggaaacttaggcaagtctgcataaggttctaggtggacatctcctattccagtggtctcccctcaggcctctccaccagcaacggtgcagtgagagtaacagagaaatagacccaggcctggtgggaggttggaaggcagcaaatatagataattgagcaaaaatagataatttgttgaaaaggagacccacatcggccaggtgcggtgattcacgcctgtaatcccagtactttgggaggctgaggtggatggatcacaaggtcaagagatctagaccagcctggccaacatggtgaaaccctgtctctactaaaaatacaaaaattagctgggcgtggtggcacgtgcctgtagtcccagctacttgggaggctgagacaggagaatcatttgaacctgggagggagaggttgcagtgaggtgagatcacaccactgcactccagcctggcgacagagcaagactctgtctcaaaaaaaaaaaaaaaaaaaaaaaaaaaaaaaaagaaaaagaaaagaaagaaagaaagaaagaaaagtagacccacaccaaagagtgttaccttgcatgtaactttaaagcaaatgattttccttctgtttagataacaaagaaaccaaatattgcttatgtctttaaaaatacttggtatggaaataggttggtgtggatcggataaattgctgtggaaagtctgactcagatgaactggagcagagtggccctgctcagtgggaagaaaggcaccttcaaggtgacagcgtaaaagatgagactataaataactccggccatcagtaagggcactcgatatgttcctaccattcagagacaacagaattaaagagttggacaaaccaaaagagaccatctgtccaggtctgtctttgggcaggtgaatacctaaaccatcagagctgtctctttatttcttggggatcttatgtagcagggatccccaacccctgggccacagactggctgcacagcaggaggcgagccgtgagagagtgaagcttcatctgtatttacagccactccccattgctcacattaccacctgggctccacctcccatcagattagcagtggcattagattctcacaggagcacgaaccctgttcgtgaactgtgcttgccagggatgtaggctgcatgctccttatgagaattcaatgcctgatgatttgtcactgtctcccatcaccctcaggtgggaccatctagtagcaggaaaacaaattcagggttcccactgattctacattatgttgagttgtagaattatttcattatatatttcaatgtaataataatagaaataaatgtaatgtgcttaaatcatcctgaaaccatcccccaacctcagtccttggaaaaattgtcttccatgaatcaggtccccggtgccaaaaaagttggggaccactgggaccatacacccttcaacagaacatgacaggtctgcataagattcaaggtgttttccctgacattagatagaaaactcttctgttatatatttgtagctatttctgcatactaatgctgcctcatttgctgacttatcattctgaaagttccttccgtaaaaaagaaaggcttaaaaaatacattctaatgatacgtgccttctctgtctgtgcacacagtgtcagatagaaagcaacttcttatccttccaatgaagaacacggaatagctgagtctttgccagacatagcctgatgggaaccctgtggtgtggccctcttcatggggagttcagtgtgatcaggttgagccatatttatgtgatgtcacctaggcagggattaacactggctttacgtggacatctcctattccagtgatcgcccctccggtctctccaccagcaacagtacaatgggagtaacagagaaatagacccaggcctggtgggaggttggaaggcactaagccagccggactagtgccaaacttagaaacaaaagggaagaagttgagtgaatgaacaggggcataaaaaggaagggatttctttggtaggtatgacaaaaacaaccaagtccatatcttaaatattttctctccagtaaaattttaatgtcactttgggatagggtctgtatggttagtcttcttctaaacctgggtccagctgcttggttttgtcatgtgattttttttaagtaatggtgaatttgtaataggtttctttcttctctttctctcctatgacagaccggggaaaggggcttacaaccagaatgctatcaaatcctttatgaaacatttggggctaattacccttgctggaagtctcaggatttttttccttgcagtttttttttccattttaatggaacacagttcaagtctcataaatgcttaaatatgtagtcgtaaagtttcagatgtctcatgggcaccgctgtctgcaaatctaccaggcagggctctgcagaggttcaaattcgaactggtttccgcctctcacaaagtgtgttatataagctgggctgggagaatttacatgctccatgcggccatttaataaagctcacttgattatagagccagggtcaccccaggaaatcttgccacctccccatttaaacagtgagagggaactatgcatttggctgttgttgctttctcctgatccagttatccccaggaagtgatccttcatttccttgctcatgactgcaggcttcaaggaagaagccagaccaggccagggtcagaggccccagtttcaacttcctctggctgcaaacaaagccatcaatcagagcacaggcattatttacacattccctaggagttgccttcttgcgtctcagagcaatgcaccagcacgtagttagggaagtaaaaaacaggactgcccctctgtggaataattatggacttcacaactatgagttgggatcaaaagggggacaatcaagggatgccactggtttatgtccctttcctgacccagatgcctggggagagccagtgaagtcagaggcacatgcaagttcttcctgcacctcagagctaggagaatgaactctgctggactctttaggcagatgcttccctgaacgcaagaatctttctgatgccctgagggctaaggctagaaccaggaagttgaaagaggtgctcgttactcagaatccctgtccctacctcagccatattgtcaaccaagtcagcgaacgctagagacttcaggaggagaagggagtgttttctcaccataaaaaaaattctaggtgctcctatgtcatcgtcacttgtttatttacctaatgcaactttcccaagtcatgtacatgtgtcttttagacactgaacacatcccactcccttgggtcagtctggaaactctggtgtagactcggccaccaactcacattttagtgatcctttaccttgggaaaattgcccaatcttttctttttttctcatctttgctttcacatcttccaaattccacttctgttcttttactcgccttctccttgccaagtgattggtccactgaagaccagcatggccagcctataaaggttgtaaagaaagaactggcaaggtaaggtgtgtgtcaaatgggtgatgtgttctgtctgtgtgtctgtctgtctgtctccatgtgtctatctctcgatgcctgtcctatacctggctgagtgctgtgagctggccatgcttcaataaacagcagacttgacctcggggagcttatggcacaaagaagaggaaggcagacatgggacaaatgattatagacaagaggagcgctcatatggggaagcttgggaggcttcaggaaggtacctgagctgtaggacttcagagaggagattgttgtgggttatgtaaggtcatcacagaaaccttccatcaaggcatgtctgaaaggctgggtaggaatctaaccacctgaaaggaagaattgcattagcctgcagccttccaggctacggacacttcaggtaggaaagcggagacctgagtgtcccaggggttttggggacaaggaatagagcagttgactacgtggatgctatggatgcgctaggagaaagaggcaagtttggagatattagcactctctatatacacttaatcttcaccagaccgctatcattcccaattaaacagacaaggaaactgagacacagaggctgaattgcccaaaatctcacaaacagtaaataattgagtgggattttaaacaaggggagcttgttgcagagtccactgacttaaaaccagggcactcagttacccctctctgtggtaagatggagtggagttgggaaggtcttggatgaccaaaccaagatctgtggtcatacgggatgcctaggggagtctgtcaaaactggatttagttatcatttataaaagagacacacatgcaacatgcatacacacacacacacgtgcacacacacacacacacacacatatatatacaccatgtctaacattttcactcaaatacatgccatagtacagcagaagcctccagtgtttaatctgtgcttctcctcctgcatgtcttggtaaagaacatagatccttctgccatcactttggatctgtttgaaactttcccaaatgcctcattggatggttattctccatgtcatccagagtcaagaagagtaactctgtcctgtccttttcaaatattctggcctgtgcatgtccactcaaaaaaaataagcaaaaaaataaaacaaacttatcaggcggggcatagtggctcatgcctgtaattccggcactgagaggccaaggtgggaagatcgcttgaggccagggattcaagaccagcctgggcaaaaatagggagatcttgcctctataaaaaataaaaagtaaattgaaaaaaaaaaaaacaccttatcagtgtgttccaggattttcttgttattgtgcaagcaaatatggttctcattaaatggacttgtaataaataaatgttattcacttatgctactaaaatgtcatgttgaaatatatatatatatttttaagatacaggattctcactgttgcccaggctggagtgcagtggtacaatcatagcttaatgcaatgataaacacctgggctcaagcgatcctccctccttagcctcccaaagtgctgggattactggtgtgagccactgtgcccagcctgaaatctattttacatattcggagtttagtatagaattctgccaaaggtctttgctgctgaaatctttggccctaaaataggcaatcaagagccactaaaggtactgatatctcagcagacaagtgacttatacaatgatggataaacggaatgaaggtgaagatgactggatgaagatggggaggggttaggagcattttgcaggcagctctagggtacagcatgggcaaaaagggtctgagcagagagcaggtggtggggatgaggagaattgataagcccatggaaaagaggatttttttttttttttttttttgagacagagtctcactctgtcacccaggctggagtgcagtggcacagtctcggctcactgcaacctccgcctcccaggttcaagcgattctcctgcctcagcctccctagtagctgggactacaggtgcgcaccatcatacccagctaatttttgtatttttagtagagacagggtttcactatgttggccaggatggttttgatctcttgatgtcgtggtctgcccgcctcggcctcccaaagtgttgggattacaggtgtgagccactgcgcccagccgagaggatttttaataagttaaaatgcaaacaatttatttgatcattcaaatattatggcatttgcaatcatgttcaagctacctaaagtatgggcagttgtgagtgcttaggaactggagtttgtttattttcattgttgattaaatcttttatggaataaatacaattcaacacatgccaatggatggtcttcagtgactgtgtaaccacttttaaaggcctttcactttcaagatcgataaactcagtaaaggcaggttctgctattgacaatcagggtgaaagacgttgttggccctggtatgggtgaatctgtgagacgagctcccaagttctaggttctagtgatcaaaaaaaaaaaaaaaaagaaagaaagaaagaataggatggggtaatgagaagttttctacttgcattttctaaaagttaacttttcaagtacagctttgattacttacacgaagtttagttcacacaggaatttatacatgacttcaagttgagttttcttttagtattcatcttccagatttgggaaatacatcatgggtcttaaaaactcacatctaggcccatacttaatcaaaaagaactctgggaatattttgttcttgtagctccacatatggaagaccagaattgatattgccaagacttttcaaaagcctgagattacttgtattttgtaagaccctttatgacttacaaagcaattccacaaatttttagtcttcacatcagtactattagatagattttataaatccttattttatagacgagggcactaagagccagagtgtgtaagggacatcccaagtcacacagttaataaatgctaccgagttgatactggagcctaggttttctgacaaggctcaagctgcaccctaaaccatggagatttctcagcgtcttgtttcagaagcactggggtatggaaagcagcactcacatctgtgggtttttctctttggaatgcatgaaataagatgttagtcattttccatgtcatcaagaatcaacacttcttatgacagatcacaacatctcagaaaatatttctttcattagccacattactgacttacttcacaactctttgctggggaaggagtctttggggttaatttggtctgaccttagcccatgttaggaattctcctccacacacagctggtcctgtggagatgaaaaacatgtacacaccctaaaatcctgtcccagatgagtggctttaggggatgctaaattcccaggcaggcggaggcaaaaaaagaaagggacatttggcctttgccatgatgactacatttgactgatgtttcagtgtgatgttatttctggcatcatcttgatctgtaactcaagactggttttaacttgggaaagtctgaatcttcacagatttcatttctgtcttatctcctccactgaaattcaactaatttaacactgtgttgatctagcgctggaggggacagaaaaacaagtaagacctgatcttcccactagaggtgcctatggtagggtaggagatagaagacatgatgtaaataattgtaaaaaaatgccatgacaaggcagaatggaccaggtaggataacagaaggagcaagtgaggtggggacttaagatttcctggaggaatctgcctttccagcctctctctcttccaccctcccctttactcactatactctagccacactgtcttccctctcttcccaccatgtgccacattcgtttctgcctcaggacatttgcacgcccgcttcccttttccctgtgtcctttcctgagaattttgcttggctcattctttttcctcatttgggtttcagctcagatgtcatcatgtcaggaagtcctccccgatgaccttatcctgcttatttgtttacttatcttctctcttgccatggagaatggaagcttcccttatatttgagagtcacagataagctaagacaagaacataatgctgctcaaaaaatactgagattcgaagggagtagagagagagaaaaggacaagactgagaattcctctttgggtttattcatttaggtgggatgaggagcaagagaaactagcaatgagaaggctcagagaaggaggaagaagggcaggctagggccgggagagagaagccaagggtgctgggtgcttccacagaaggagctacagaaacattgaggcagatggggaaatggcagtgggtgtgacaaccgaatggccattggtgatccttcggggaaggagggacagcaggagcagaggtcaaggttatgagggcatatggagtggttggtgaggatgcggggcgccaggaagagtgagttgcacctgatggctagtagggaaggaaggagagaggtagtgcgccatcttgggatcgtagcaggcttgagagaacgtattttctaagattgatgggaagatctaagtttgaatgcagactcaaaggaaaactacagagggagatattgaagatgaaagaagtggggaaagttgaaagagaaagctgctgaaagaggtggagtagaagggctggagagtacagatgaagggatccaaccagccacatttcggggagttgtgctgatcgacaggacaaatgttaaggtgatcaggtatcacaatctaaaattttggctgggcgtggtggctcatgcctgtaatccctgccctttgggaggctgaggtgggtgaatcacctgaggtcagtagttcaagacgagcctggccaacatggtgaaaccccgtctctactaaaaatacaaaaattagccaggcgtggtggcgggcgcctggaatcccagctacttgggcggctgaggcaggagaatcccttgaacccaggagtcagagtttgcagtgagctgagactgcatcactgcactgcagcctgggctacagagtgagactctgtctcaaataataataataataataataataataataataataataaacaatctaaaattttacagagaagtggttggggcaaatatctgttctctttgctttttcaagttttggagttcttaagaagttctttaagatattcatcttacattgggaaggggcttgtttcagagccaattaaatccagtttaatttaaaatctccaagatgaaggaagtatgactttccccatgatgtatgtttttttttctttttatactcttttttctgatttttcaagtaatatatgctttttatttttattattattattttttaaatggagtggctgcctgggcgtggtggctcatgtctgtaatctcagcacttggggaggctgaggcaggacaactgtttgaggccaggagttcaagattagcttgggatacacagcaagaccctatctctacaaaaaaatttttaaaaaggagccaggtgtggtggcacacacctgtagtcccagttgcttgggaggctgaggatggaggatcacttgagcccaggagttggaggctgcagtgagctaagatggcaccactacattccagcccaggtgacagagcgagaccctgtctctaaaaaagaaaacaacaacaaaaaaagaagacaccaaaaagtgaaaggaatttaaaatgtacctgtaattcctaccccaaaataactgctatatgtcaaagagcagaaattctagaagcatgatggttcaaatctggctctgtctcttcttactgagaggtagttgcaaattatgtaaactttattttttaattttaattttttattttttgagatggagtctcactctgtcaaccaggctggagtgcagtagcatgatctcagctcactgcagcctctgccttccaggttcaagtgattctcctgcctcagcctcccgagtagctgggaccatggtgcccaccaccatgtcggctaattttttttcgtatttttagtagagaaggggtttcgccatgttgtccagactggtctataaactcctgacctcagatgatccacccgcctcagcctcctaacatgctgggattacaggtgtgagccaccctgcccggcccaaattatgtaaactttaacgctcagtagttctcttctgtaggatgaggatggtggtcatagctattaccttacaccagctgatgtgaggactaaattatctccagaacctgtagcccatatgggaagtactcaaaggcccctgcttttatgataatgccgttttcctcccaggctcttccatatagatgctcttccccttgtgaaactcaggttgctttgcaggaacaattttgtgtcctgtttttgttctcatctacccttagcttgtgaacattttcccataacatctacatttccctttttattctaaagggagctatggcacgatgcccccaagaaagtgataactacataccatagtcccccattatctagagttttgctttccaaggctttagttaaccatgggtcaaccgaagtccaaagatggtcaatgggaaattccagaaataagaattcataagttttaaattgcatgtcattctgaatagtgtgaagatatctcacaccttcccactccatcccgcctgggacatggaccctccctttgtctagctcctgctgtccacattactcacccactagtcacctagtagccatcttggttcccagatcgactgtcttgaggtcatagtacttatattcaagtcactcttattttacttaatagcctcaagcacaagagcaacgaatctggcatattgttagaattgttgaatttattagttatagtggttaatctcttactatgcctaatttataaatgaaactttatccaaagtaatgtatatatagtgtatatagggtttggtactattcgaggtttcaggcacccactgaggctcttggaagggaccccctcaaggataagggtagacaactgcatattgtcataactcttgcagtatcaattatttttaccttttttaaagtttaagaactcagcatcatcatcatcatactggaagctcactttacaaagaatcaccatagggcagcagccggtacttatcccttctctacaaaaacaaatcacaagcaaaaaccaggatccagccctgtgctaggacatcagggcagaaacagaccaaagcctgcacagtgttcactgctccatttagcctttgctgcttctccgcaggttgggttgtgttggtaaagaaataaacaaaaggagagtccctctttctaatcagtttcctattgcactcggtggctatattagtctgttctcacactgctgataaagacacacctgagactgagtaatttataaagaaaaagtggtttaatggactcacggtttcacatggctggggaggcctcacaatcatggtggaaggcaaaaggcatgtcttacatggcagcaggcaagagagagcgtgtgcgggggaactcacacgtttacaaaaccatcagatctcctgaaacttatccactatcatgagaacagcacgggaaagatccgcccccatgattcaataacctcccaccgggtctctctcatgacacatgggaattgtgggagctacaattcaagatgagatttgggtggggacacagccaaatccaatcagtggctccaggggctcaagtcatgggaaggggaattgagaggagaaattccccttccagcaccatcagggccctgcagaccctggtgtcaccatccatgcatggcagcagtgccctatgctctgtggctggcagcctgtgtgagttattggggtcatcatcacagccctgccaaggcagcacctgcagttcatctcagatccactggcttgggttcaaaaccccgtaccaaaccctttcagagtgctggtgtttggtgcagggtcttctctcaaacccctctctcatgttacacttttaacttgcgatgcattagattgtaagtgggctagaaattatcggcacattatctttaaaagcaatatggattttcttctaataaaagccattcacttcaattcttttagccatggacacaattttctttcttagggccagtttttcaaatgtcacagactactaacaaagcatacctcatattcaattgtctatggtaaggtagtcttccaactcttccaaccccatgttaataattctgctttttttttttttgagacggagtatcactctgtcacccaggctggagtgcagtggctcaatctcagctcactgtagcctctgccttccgggttcaagcgattcttgcacctcagcctccagagtagctgggactacaggcgctcaccaccacgtccagctaatttttgtatttttagtggagacggggtttcgccatgttggccaggctggtctcgaactcctgacctaaagtgttctccctgcctcagccttccaaagtgttgggattacaggtgttagccactatgcttggcctaattctgctcttaaatgccatttgatgatgggtgatccatcgtactcctaatccaagtcactgaagtatctggtggctacatggactaccaatacagcagggtggaggagattccctctggccctgggcatttcttttctgcagatgagctgcagtactagtcctcaggcctttgcatatggctagaaaccaacccttgaagtctggggctacagttccctccttaatgaaaaacacattgtaataccagaagtggcgcctgatggcaagcttatttgccaacgtggagccagtgccctgccggggtctactttgttttggaatttctagcgtattaaaggccctaaagagaaactgtgttccatatgtggagataaccagccttccagaaaagcacaatgaaaaggaaggtggggctgtgagtagtcaatgctgagagaaagggaaagacattattagaatacataaagcagtatgtatgaggaatattccggtattttccagtttctcccattcttggcttgaaatcggttatgcatgtgaaaaacacccaggtggcttttattttacaccctttcaaattcatctctacagttgttgcaaagggatcttcctagaaaggcagattcccaggagtacttcaatactgagtaaaatactaataatgaaatactaccatttacggagcaccttgtttgtgctatacagtgtgctaagtgatttaggtagaattcttttttttctttttttcttttgtttttttagacagagtctcactctgtcacccaggctggagtgcagtggcacactcttggctcactgcaaactctgcctcccaggttgaagtgattctcgtgcctccgcctcctgggtagctgggactgcaggcatgagccaccacacccggctaattttgtacttttagtagagatggggtttcgccatgtgggccaggctggtcttgaactcctgacctcaagtgatcagcctgccttggcctcccaaagtgctgggattacaggcatgagccactatgtccagccttatgtaggttctttatctctagaagaaactgattttgaccccgtttaacagaagacaaaactgaggctcaggacaacaaagttgcttgccaagtccatgcacgggtaaatggtggagttggagtatggacctgtgtcagtctgacactgaagtcaccaaggctcatcttgtgtacgccatgatgctaatctaaaatttctagcaaagggaaaagaaaataattgtggatgtatggctgtgtatttttctgagcggcagagaaaactgttagtttactagacaattaagcagtgagtactaagattcaaatgaatcgacttgaattttccagcagcattaagatttcataaaacagcaagaggttggatgacaaaacaaaacaaatgggctactccctggtgttggcccttagcaaaatcctgggaagggggaaagtgtagacgttgagcatttttgaaaactgagattcacaataagttccacatttgttctgatcctccctccagcccccacactgggcactttctcaaggcctgagaactgggtgtctgcttgtccagaacattcttgctaaataattggcttagaaagtcgtgaaaggcgtcagtggctctgaaccacggggaaacccaaacagtttatgaagaacaagatcagcccgccttctagtggatggctccgactccgcagagctatgtgtggaaaggcaaagccggccttgaagctgaaactttcaacaaacaggcagagaccttagggaggttacagtgtgccagtgtttatgtttctgcatctaacccttcctttttgttttttgtgagacagagtttcgctcttgctgcccagactggagtgcagtggtgcaatctgggcttactgcaatctctgcctcccgggttcaaacaagtctcttgcctcagcctcccgtctagctgggactacaggcatgcaccaccatgcccggctaattttttgtatttttagtagagacagggtttcaccatgttgaccaggctggtctcaaacttctgaccttaggtgatccacccgcctcagcctcccaaagtgctgggattatagacgtgagccaccacgctcagccatacccctcctttttgattagcactttatcataaacagagtccagagaaaaaggaggaagagtaaaaatcctccttcgctagagaaagcacagtgtctcaagatttagaatctagctggcaactgggaatctttggtgttatttctgcgagcaatgtgaattcattgggttgaacaaatggctagccctttttgcattttcagttttccattccatttattctttattgtgtccttgtatctttctggcccctaaaactcgctcactcactccttttctttctctctgtactgtaagccacttacaaagttgattacatacggcgactaggaacccaccgctctttccccacacctttccctttgcttgccttttttctttttttgaaaaccctcccctctctaagagcctatgtaaaccctgcctgttcttcaacttcctccctagatcctgctctcggcacagcttgcttcttcctctgaaatccagtggtatttcttgtcgggatttctcacctggccccatacgctactgcagtacattgctagttatctctttcctacttaggcgagtgatttacctagctattctgaaaggtgcagcaaagactgtctcctatccttttgtgtttctttctcgttatcagcacaccaactggcttctaactcattaaagattgcgtgattggaatgtaaaacagtcgcgtgaacaacagccatgaccattgttttttttttttttttttttggagacggagtctcgctcgtcgcccaggctggagtgcagtggcgcgatctcggctcactgcaagctccgcctcccgggttcacgccattctcctgcctcagcctcctgagtagctgggaccacaggtgcccgccaccatgcctggctaattttttgtatttttagtagagacggggtttcaccgtgttagccaggatggtcttgatctcttgaccttgtgatccgcccgcctcggcctcccaaactgctgggattacaggcgtgagccaccgcacccgaccagtgtctttctttctttctttttttttttccccgctcttcttgcccaggctggagtgcaatggcatgatctcggctcacggcaacctccgcctcccaggtttaagcgattctcctgcctcagcctcccgaggagctgggattacaggcatgcacccccacgcctggctaattttatatttttagtagagatagggtttctccatgttggtcaggctggtctcgaattcctgacctcaggtgatccacctgcctcggcctcccaaagtgctgggattacaggcacgagccaccgtgcccaggctattctgctttttacaattataaccagtctagacaattataaccaatctagtttctttggatggttgagatgtagtcttgatggaagagaagggattacattggactaagttaacaattttccccagcactctgagtattttattctatgaaatggcttaaatatgggaattttattggacagccttggctgggattctcagcaatgggcacttgcaagtatgagaatcccttctcagtaaaagtcccctctccctgcaacaatgatcatcagagaatgtctatccatattcaaaagctgtgagtgggctaggtgcggagggtcacaccttgtaatctcagcactttgggaggccaaggcaggcagatcatgaggtcaggagtttgagaccagcctgaccaatatggtgaaaccctatctctactaaaaatataaaaattagccaggcgtggtggcgcgtgcctttggccccagctacttgggaggctgagagagaagaattgtttgaacccgggaggcagaggttgcagtgagctgagattgtgccactgcactcccctccgggtgacagagcaagactgtttcataaaaaaaaaaaaaaaaaaaaaaaaaaaagctgtgagtgatttttttttttagatttgtaatcatcaggtgacaggttcattattcttcaaagaccttttagaggagggtgttttagacaatggccaggttgtgtcatgacagctgagctcgttgtttcatgggtttacccgcttcatgagcttgggaggcaaaccagatataacacagtcgtgaaaatgaggccactccaagctcatgcatgtgctcagtttctacccgggagcactgtgagagctggcacttgctgcccttctactgccattcctggatcagagccctgcaacacggggtcagctgcaatttgccccccagggctgagtatcaacaggcacttcccctcgctctgaaaatgcttgggggcatcctcgtgctctctatttggccaagagagaacacgaaccgcaggttatttggcccagaccagtagatgccgtggaaaaggcaccgtggctgccccagaacaggcaaatcacaaaatgcttgccttgggaagcataaacaaagcctcatggtgtaggaggggcagcccccgcctttggatccgggatcagagggaagagagaatacagggctgtttagatttctaggaaccactatctctgtgaacttcactctgctgtgagccccaggaagtacctgctacccaagacaccaacaattgcctgcctggaatctttggcggcagcttgtttcctgacaaaattgtttgtcaaaagccttcattgaatttcccctggaaactgaaaggaaactcaccacagttatgataatagtaacaatcgtacacttattttggaaacagacgctttaattttttgagacgttaaggaatattgttctctattcatcatttctcaggtgacacagaaagctcaggcatctcgagatttgctttgattttgtagccagggagtaaattgataactgtgactgaacattgattggacatgtactatttctcaggtttggtctaagtactttatatatatagtctcattcattcctgaggataacactatgtggcaaataaggctattgccattttatagatgagaggatttggactccgaaggggaagcgatttgtcctcagacttaccctcttggagtaaggacttatatataattcatggacttcagggcacatgctcctaacgccatgctaagctgactgtctgggatgggttgaccggcagcccacctacctgcacttcccagtctgtgtggtagttgggtgtgtggtcatgtgaccaagttctggccaatgagaagaagaggagccccacttcttggtctgacccataaaaatctctcaccagagctcttccattctctgccctccttttttttaagtgaaggggacactgaacccagaggagggcagggcagagtcacaagatgacatcgaatgatcctatggaaggctgtgtacctaccagagcatgtttaactttttatgagttagaaatagatttctcttgtgttaaatcactgaaatttccaagttatccactgcagaagctaaagttaccttaattgatgacccctataataaaaatggattgagcacagttaaaacatgactgtaagtggacccttagccagaatttatctctccttccaaacggtatgctctctctcaatctgtagaggatgtggccacaactaggaaattctccgccaacttacaaagatgagaaagacaaccccatatcctctttccatttttcaaagggagttaacacgacatgaaaataatcagactgcaggacaatcattcactggaaacccatctggtgtggtgatgagctcatacccttgagaatgaagaaaatttccatctgaggctgggcggtgaggcttccaaaataggccagctggttttcaaaagggccagtggtgggtatgacagtgcttagtagagagggccagtggccaagctgtataggcaacatcattgtaaatgattttaaacacacgatgcttattaaataaggccacctgatggttcagagctcttgtcctcccatctgccatagcaactttggtttgataccaaatgtgacttctgcccattcacctcccaccacctcagcctagttaattcctacttatctttaagacctctgaccaaatagtgcctcctcaagtagctttcttcaacatcacagaaaaggcaaggtccctcttaggttaccaggtgccttgtcctcaaagcattgacctccaattttaatttgacttgaatttgtctaatcattatattaatgctgctgagtaaatgatgttagatttccacctttataagaatatggaatcatattttttttgtttaccatttcatctccaggacttagctcaatgtctagcacatagagggtgttcattaattatttgttagatgaatgaacaaagacatgaatgaatgaatgaatgaatttaccattctacctccagaactttgctcaatgtctggtacatagagggtgttcattagttatttgttagataaatgaacaaaaacacacgaatgaatgaatgaatgaatgaatgaatgaatgaatgaatcttcatttaattaatggagaagcggaggaatttagccacttggcttccacagctgctactagccatcttcttccaaatgactttattgaaagagactactccgaatacaccatttcttctgtagctgatcattgccccagaacaaatgtctaaagtgtggctgttgagatctctccccagaggagaccagccactaacttctctgagcctcgttatgataccattatttataaaaatgaagatgacagtacttgccccccaggggtattgagaatcaaaaataataaaatgcatttggaaatatactctgaacatttcaaaaagatatgcatatatatggtttttttagtgtcaaaacttgtctcttacatgatgaaattttgaaaaggcaagcgtttgtgaagactagaaccttttgagaatggtaagaaaatagactctctatttagtgaaatatgcattttttcaagggaatagcagagcaattcgattcctgatcatctccaccagctccaccacaagagactcccaaacaaatacaaattaagtaaaaccctggctgttctccttccagtgggattactattcctgagctccatctaagtagacctttagaagccctcagtgttcaaaggtagttggctcttgatcaaaagctcaaattctcagttgattcccacagtgctttggtggtagattagcatatggcgggagagacagaacccaaattactggtggctgatgcaaaaactggcagctaattgtaaacctccaaacaaagtattatttactcactgaaacaaagaaaagtgctttcaaggagaatgaaaatatcccttatgtcatgtcagattcaagaatatttcatgaacaaagtaaaaattgagctgttaggttgtttgcaaatactgtccacatcaaggaagaacaatttgaaaatgtaagaagtgagagttttgctttccatcctattgcaaaaatatgtttccgtgtcaatttaagaaagtactgttgcaaacgacagggtgagtgaaatggaagcacaccagtagaaatgcaaacacatcttcctttactgacaggcacctacagccttaatgaatgcctgaaaaaaactaaaacaaacaaatgtgcagacttgacagagaaatttaatgaatttactaattgttcttccttggtgcaagcctctttttttttttttttttttttcaaccacatatgttgtagataatcagagaaaaggccaagcccacaccatatgtaggcactaaataatatgcagggcatcgctctttaaaacatacattgccataacgaaatgatgaaaggggaacagcaaaaatagcaaattgagaatcaaagcccaactttccacatgtggaaacgtttggttgggtcatggtagaatccatcagtccaagactggttgtatgagctgtttgtgaagataaaaacgaatcattgaaaacccaatctcattttagaggaattgtcctttattaggagaatggatcattgatgtcactataactaatcatgtggacagctgatagagatgcattttcaaaatgattattctagaagttctgtttcaaaagcatattttctataaagaagaaaacacacaaagcgttctacgtaattacaaaccctattctaggttggtaggtgttcttatatattagctcacatgttttcttatagagtgtgtgagaaattcagtatctataggtcattgcaggcctggctctgtggtctccagacagccagtgttagagcattaggttaggactgctttgcaggttaggaaaaggactctcctcaaattcctaacacatggatgttcattctagccactggtccatatttcctttctagaagcagcagtgatgggtgaaccactgatcattataaaaccatgaaacattcaagggcattcatgcttggaggaaggtgggatgtgccctgtgaccctcaacacagccaacccagaaccagagaggagaggaccaggtgtgttatcttgttggtgctttgtcaacaggcattagaaaaaaaaaaaaaacagaaacaaagtccacaactctgatgactctgatgacggacgcggtttctacaaatagaccaaagaaaaccaaaacaaaaaacatcaaacaaacaaacaaacaaaaaccaaaccaaacacaatccccctccccactaacaaacgaacaacatctaacttaaaaagaaaaatttaaaacaggtttacatatgccatacatatgtgttttacaactttggggccagaagcaatttatggtaagtcagtaattcagattgttggtcttatttattttatttttcctatagttttactgcacagccaggagtggcgtggagctggaggcagggtgggggtgggtggggaggcaatagagaggacagaggtcgatttgtcatgaaaccaatgaagcttaaacttcagggttcctcacttcatgggatcttccaagtctctgggatgattcctagcaagatattcatgcattcattgcttacaaaagtgagatattttaattgtcatcagttacaactaatgcctcttcttttgttttttttttttttttgagacagagtttcgctctgtcaccaggctggagtgcaatggcgcgatctcagctcactgcaacctctgcctccctgcaacctccacctcctgggttcaagcgattctcctgcctcagcctcctgggtagctgggcctacaggtgcccatcacagccagctgatttttgtatttttagtagagatggggtttcaccatgttggccaggatggtctcgatctcttgacctcatgacctgcccgcctctgcctcccaaagtgctgggattacaggcgtgagccactgcgcctggccaactaatgcctcttcctatgttgatttcccctctgttaaatttcctcttttgctcaggtaacattggaatgaccactgggcattttttttttttttttgaattcagctaaggagaagaatggtcaggatatattcagtttgggagagaggaatatatttgaggtccacagacattgccatctgtaatcaagttacggtgagctgcaccagcctagaaatggcttccagcaagaaccctcacccttaaatgccgactcgcccaccttgttcatgaaggactagagatcttatcaagatatggctgcatcttatggcaccaggctgtgaaggtatgtggctagcagaagagaaagaaggtttaaaatgccaacagccagaaacccatctgtggaggaatctcccaatcctcagactgataagataataagtagagagttccattctcatacctcctggacacaggtggcagtgttcccactgtcaggagtatatttcatatataggacacacaattacaaaagcaccatataatgttttctttattgaaggaactagaatataattggattttcctgcaatccctgtgtttagaaggcacatatctgtaatcttactctcaacagcatgttctgcaatagatcatataaaaaagaaacctgtaagaagtcttcccaaattcttcaataattctaaaaatctgcacagtatttccaatgacaagttatgaattggaaataaacctttctttctttcagtaatgaaaggacaagttttgatcagccataccatgcgaaagacagacttagctttctcttctctctctgtagaaaatgttataaaatcattatcttgtgaagaagagatcaaagaccaggcaaccaaaataggtaggaagaagaggataatagggatgttggcaggttaattaataaacacacattccttttctgaattttgtgatgtttctaatagttgttggctttcctacatttgtaacttgtgatttttcctttcacatgtaagtttgtataacttttttttttgagacagagtttcactcttgttgcccagattggagtgcagtggtgccatcttggctcactgcgacctctcgaactcccgacctcccgggttcaagcgattctcctgcctcagcctcctcagtagctgggattacaggtgcccgccatcgtacctggctaattttttttgtatttttagtagagacagggtttcaccatgttggccaagctggtctcgaactcctgacctcaggtgatctgcctgtcttggcctcccaaagtgtaagtttgtataatttttaatgattttccttttaagtctcccccacccccaattatattaagttggtgcaaaagcaatggcggtttttgctgtaattaaaagtaatggcaaacccgcaattacttttgcactaacctaatagaagccgcaggccctgccattaaccctggtttgggagggtaacgtgataaagaagtcatatgtaaaaggcacttggaaaaacaaaagtccccgttgagaagagactggagatgtgcagggggctgccactcacacacagccatggttctgggagtgagatggaaacccgggtgggacagaagtttccctccagggctggggccgagtgctgtttagagaaggggactgctgtgctgagtggcacatcacagccacatcctgcctctgggtgtgacctggagtgatcacattctttctcgtgataataaaaacagaagtcattatatgaaaaatacacttgcacacgcatgtttatagcagcacaatttgcaattgcaaaaatgcggaaccaacccaaatgcccatcaatcaatgagtggataaagagattgtggtatatacataggatggaatattgcttagccataaaaaggaatgaattaatggcattctcagcgatctggatgagattggagactattattctaagtgaagtaactctggaatggaaaaccaaacactgtatattctcactcacaagtgggagctaagctatgaggatgcacaggcgtaagaatgacacaacgggccgggcgcggtggctcacgcctgtaatcccagcacttcggaggccgaggcgggcagatcacgaggtcaggaaattgagaccatcctggctaacacggtgaaaccctgtctctactaaaaatacaaaaaaattagccaggcttggtggcgggcgcctgtagtcccagctgctggggaggctgaggcaggggaatggcgtgaacccgggaggcggagcttgcggtgagctgagatcgcgccactgcactccagcctgggcgacagagcgagactccgtctcaaagaaaaaaaaaaagaatgacacaatggactttggggactcggggaaagggtgggaagtaggtgaaggataaaagactacaaattgggtgcagtgtatactgcttgggtgataggtgcaacaaaatctcacaaaccaccggtgcagaacttactcatgtaactaacaccacctgttccccaataacctatggaaataagaaattttaaaaaaacaaaaacaaaaacaaaaagcagctaacatggattggttgcctcggatgtgccaagccatgggcttaatttgaatgatctgagtcagtcctcatggtcgtcttgtcaagtcattgccacaccctcatttgtcaggtgccacatacaactttttgtcctctgtcattagttcctgctaatatcagaaatcacgtgttaagaatacagattgtgtaggctgagcgcagtggttcacagctataatgccagcactctgggaggatggggcaggcagatggcgtgagcccaggagtttgagaccagtctggacgacatggcgaaaccccatctctacaaaaaatacaaaaattagctgggcgtggtggcgcatgcctgtggtcccaactacttgggaggctgaggtggaggatccccagagcccaggaggtcggggctgcagtgagccatgattacaccactgcacttcagcgggggcgcttaagacattttatacatatttaaagtggctccccagtgatcctgatgctgccttttgctatgtgcagaatgaggccccttcagttcagtggctccgggtggactgcacattagtatcaaaaacctttagaccatcccaacacctaagccccggatcaactaaatcagaaccgctgggagtcaggactgagtatgggtgtgtttaaaaagttccctaggtgaactcatccagagccatcagccatcgccttagccaatgaagacaccgcaaactacaaaaaagtactgcttaaaatcgctaataaataaatacactcaagatgagtctttcccaagatcaaagacagctaaaatacaatatttcaacaaaaacaacatttcacatttgtatctttcttagtctttgtgacacactttcacatccatcgcttattttatttttttgagacgtagtctcactcttctcacccaggctggagcgcaatggtgcgatctcagctcactgcaacctccacctcctgggttcaagcgattctcccgcctcagcctcccgagtacctgggattacaagcatgtgccaccatgcccggctaattttttgtatttttagtagagatggggtttctccatgttggtcaggctggtcttgaactcatgacctcaggtgatccacccaccttggcctcccaaagtgctaggattacaggcgtgagccactgcacctggctccatcacttatttaatccctacaatgcatgaagctatcattcccattctgtaatggagaaagcaaaggctaggagtgactaacagattttttttttgaggggggagtgaagtttttcttgagcaaaggtagctgctctctgcacttttctcaaatcctctatttgttgaaatgcagttcttgcgttcttggctctttcctgtgagactatgaagaatggaaaatggcccatgtattattacagatatgtctttaaaacggccctggttggcagtagaaaggagggctggggaaggtaaatgctgaccatgggttggtaatcttggacctcctgcagaccaccccagcctggtcttgctctgggccgcctcttcttctcccaggcccctcggcctggctctgcaggctgctaaccagtccttgttcactgagcctcccaggttggtgaattggtttagacttgccatcctggctgccttccagacccacccatggggattacctcccagctgcctgggttggacatatctgcccccaagggcctggcttggccagagaccacagacaagcacgaggcgtggttagcctttgagccccaaacgcctatgatggggccaggcacctatctgctgctgaggacctgtctgcagagttgaactgagtcatgcttgagcaggaatgtattctttttccaggcccggtggccaatcattcagcactctctacagtatacttacgacattaatggaaatcctaaaaaatggcccctgaggcggggctagcccaccctgcttagttgatttaaaagacaaagagtgccagatgtggtggccgacacctgttatcccagcgctttgggaggccgaggcaggaggatcacttgaggacaggagttcaagactagcctggccaacgtagtgagacccccatctctacaaaaaaattctaaaaaatagctgagcatggtgacatggtcccagctatttgggaggctgaggtgggaggatcatctgagcccagggaggttgaggctgcaatgagtcgtgattgcaccactgcactgcagcctgggtgacagagcaataacctgttccctcccccaccaaaaaaagaaagagatgaaatgaaagtgagaggtggaggccagaagccagggcttcaaaactcatttgtaatcactggaaagacagaatcatcttgactaagtaattacccccacatacccagcttggggacttttgactctaaatcacggtttcagaaaagcttcaaatggacaaaccagccacattactgcttgaatctcccagctgggggattttttttcccccaggattctttcagattcacagcttgtcatgggaaatcttatgtgaacttttcggatgctggtcaaatttggaaggatttctctaaaagtttcttttatatatgatctatgacagacacacttgatatttagagtgaagcttttaggtacgtgcccttcaagcacgagaattctagaaaagtcttcagaagccatgtaaagggtctaccccccgcctgcccaggggcaggtgaagaagcaggagcaggggtcctgcggggctgtgcccatctgtgaaatcaacccgacacccttgggcacatcttccagggcgcctccctcccctgaaagtccagacattccaggaggaggggtggagcgaggggacgggtggtttagccagtgcgttttattaaggaattatagaccaccaaattacacctaaaaatacaaaggccagctgtgcatgctgggttacaagtattgtcatgagccagcttacagagggagggccaaaaccactcaagtcgacttaatgaaataaactgggttacaaacacccgtgagaggaggaaaaatgagcgacaccccccttcaagagccaggccaagggacattctttcacttgctatgctgcctgcgccccccactccccacgcaatctgggtcctctcaggcggggctggggctgtcaggactgaagtctccgcggccagcagggacgtggcttaatgccaccaaactggactgatagctggagaaagcactcttgtctcccctttttgaagtgctctgcacccaccgccagttaactgactcagaagtgccactctccctcaggaaagtttctctccttttctcatatttgggttgagaggtgtgtgtctgaattcagaggccactatgtaaaggaaaggaggctcagtgttggtgcctgaggatcttcccgccttgcctcctgtcccacacaccacattccccttaccagcttgtcaccacccccaacacacaggtgcacacacataggtacactcacacacacacacgtgcacacatgcacacacgcacgcacgcgctcacacacatgcatgcatactcacaggcacacacatgcatgcacacgcacgcacacatgcacacaccgcatgcacgcacggtttgataaatcatccattgtgagaggagcgtggatttgtggaaagaacatcctttgtctttgcagccaggagaactttggttgaaatcaccaggctctgtctgggtgactttgaacaacttacatccttctctgagtttcaataacctcatctcaaaatggtgacaataataatcaagatggtgacataggcacttcctcgatccggtggctttgaaagctgaattaaatcatgtttacggtgcacttcacgtggcgcaccgtatggcacgcatggcacctagaagatgaggctctgttcatgttaactgctccctgttaaatgtaacatgcttcagagtcccgaacacatgtgacaatagctcatgcccccttctccaccattcaccaccactttcccatgcttcaaagaaacgaaagaggagcttctggtcccacctgatagacggccctggagatgcaccatggttttagcagcagctgcagaactcgaatgttcctcacttggcaggtcctcagcgcccgacaagtcaggttccaactccacggtgggtcctcagagccaagcagcccagcagccatgccagccccagactctgccgccaaccctctggtccctggccccacatccagggctgtgttcttttagtgacacaaagtgccaatgtcagtaagatttaatcaggcaaggaaaaaatgcagtccaaataactctgattcctctgactctcctccccctacctaccctcaccaccaccctcactaatcctcagagactgctttccttcaaggataagcaaaaggctcttaactccctcccaaagtgttttctccttgtctctggggactcaccagggacaaggtaaaaataaacctcagtgtgcagataacggcacatccctgtttctcagtggactgaggctggctctttggcagatcaaacagaacttagggaagacctcagacccagaagcaccaccgagtgttgggatcccctccagggtgagaaagctaagagcagagagctgcagccttccctgcaacattccccagacattccatcccttttcttaactctttacaacttggagaacccatgagtttccacaaggtcaagcaaaaagtcccattctgtagcagcactggagaaattgctatttctgtgggcaatttgtaagaagccaggcattttctttggaagcgtcccaagtttaggttgggattgaaatggctggaaagaatacttatctgatggatttcatatcaacatccaagatttggaggaaagcagggaaaaggaggtaaagtcaacctatcccgttttttttttcgccccgcatgaggggttacttcctataaaccgtcttgctattttaatgcatgttgggtaagctacaggtagaaattaactcaaggaaagtccttcaattaaacgtgtcataaccattggaatttcataagttgttttgattgttgattattttagaatggcatctgcatcctaattcaataaattacataccaaaaggtgagattccaaagctggaagggaaagaagggggaggggagaatgcagccacgacctagctgtacaattaagacaaagagcatgtttaatctttaatgtcattttgattgcacagtcctgaaaaatcatggtaagtcataaggcatgtttgccttctccacattccatttgtttatttattatctgtctcttcgaccttaactaataccatcagaaaagtagaaatgtaaaatctactaatctactggagcgtcctggagtcctttgtaacctcagtttgaatttggctctgtcattttctgtgtggcctcagacaaattaattaactcctctgacttatttcttgatctgaccgatggaaataatacctacctcactaggttgtgaggattaaatgaggtcacttacttaaagtggataataaagaccatggcatgaggctgatattttttcccccacttatgatctggtaattcaaggacattatctaccactgataatatgaaacccttaggataaaaatttgtggttctctaaattatgttcttttaatacgttttctccttttgctttgaatttatgcattaatttgtttaattaatataatgcagcctttatttatttttgggggagtttctctatgttgcccaggctgatctcaagctcctggcctcctgtgatcatcctgcctcagcctcccaaaatgctgggattacaggcatgagctacctcacctggcccattttaatgtaaactcttttttggatagttttatcatttttccatgaataatcaccctaaggcaaaacacggtgcataattttattcctgtgtactattcccttatttttgcaccccagtaatgaaaagcaggtgggtactacagaatcttgcctttctacaaaaaccccatcaccagaaagttttatctaagagggaagagaagtgaggggaggggaaggaaggtaggacgataggaagataagaagaaaggaaggaagggaagaaggaaggaggaaggcagggagggagggtgaaagggagggagggtgaagagtaaattaaattaaaaagcatacagtacgcagaaaatgatgcttacattaacattagctaactgcattggtattttcatgaaaaaacacatgcaagatatattatagttagtttcagtgtgtgtgctctgaactaatgctctccaacctctggagatcttggctgtgaaccagactcttatccaaagcatgtaattatggactggatagggacagttcttttttttttttttttttttctttctgggacagagtcttgctcagtcgcccaggctggagtgcagtggtgcgatttcggctcactgaaagctccacctctggatagggacagttctaaaggcattgttttattctacgacgaagtaaagtgactttaaaaattaaaaaagtgaaatgtatatatttagcttatggtctgggaatcttttgagtataaaggtgctataataagctcttttgaaaaatgactgaatataaacaagaattcccgagaacagcaagacctactcaagctgccctgatatctttaccatttgcggggatgagtggcgtgctttagtggggcttgctctggagtctggaatcggagcctggtgacaccagcagcagacgcctgtctctgtgcccatggaagctcggggtgacagtgccgttggaggatgctgcctgatttcactggtcctgtatcttcaatcatctacatgattctgccctagccttgactgattgattgattgattgatggaggcggagtctcgctctgtcgcccagggtggaatgcaatgatgcaatctcagctcgctgcaacctccgcctcttgggttcaagtgattctcctgcctcagcctcccgagtacctgggattacaggcacccgccaccatgcctggctaatttttgtatttttagtagagatggggtttcaccacgttggccaggctagtcttgaactcttgacctcaggtgatccacccgcctcgctctcccaaagtgctgggattacaggtgtgagccactgcacctggctctgccctagcctttaaatcgctaattcagagtttcacaaggcagctccccacgtggcctctgagaggctgtgcgtgcaagtggcatgactgccattgagaacaatgcccttgcttttcaaagggatttagaaacctcagagcaattcactataggtgtgtgtgtgtgtgtctgtgtgagtgcatgtgtgtgtctgtgcgtgtctgagtatgcatgtgcgtgtctctgagtctgtgtgtgtatgtgtgtccatgtgtgcctgtgggtatgtgtgtgtgtgcctggctctgtgagtctctatgtatgtacctgtgtgtgtgtgtctactgtgtgtctgtgagtctgtctttgtgagtctctgtgtctgtgtgtatgtctatcatatgttaatgtgtgtgtgtatgtgtgtgtgtgcctatctctgagcctctatgtatgtgtctgtgtctgtgtatatgtctatcatatgttaatgtgtgtgtgtatgtgtgtgtgtgcctatctctgagcctctatgtatgtgtctgtgtctgtgtgtatgtgtgtgtctactgcatatgtctttgtctctgtgtgtgtgtctgtgcatatgtgtctgtgcgtatgtgtgtctcatgtctattcgtgtgtctgtttgtctattatgtgtctgtgtgtcattgtgtgtctgtgtatgcatctatgtatgtgtgtactgtgtctgtgtgtttgtgtgggtcattgtgtatctatgtgtgtgtctgtgtctgtctctgtgaatctctgtgtgtgtctgtctcgtgtgtgtctatgtgtgtgtctatccatgtgtgtgtgaatctctatgtgtgtttgtgtctgtgtgttttatgggggtcattatctctgtgtgtgtctgtgtgtctctgtgaatctctctgaatctctatatatgtgtctgtctcttgtgtttctatgtgtgtgtgtacacaccttcatcttacagaggaggtcccagcacagatggtgcaagcagccagccagacctcctgcacactgtgacgaagctggagcaagacaccagggctcaccaggtgaacatgtgacctggaccggtctaactcccaacctctcttcatcactttccttattcttttctcaagaattatagaaaataagcatcttctaggtagtttaccacttagacagttgatcgcaaaacctaaagggtaatggacgaggacagagtgacctcttggtgtctaaagggtagggaataccatgttagacaccaggaagacagagtaaggagcagtcactgtctcactcctccttccatgagacttttgctactattaggggtgaaaagagtcaagcattgagttagctggccagatggggtgagttgctgagtgtttgtctattgtaagtcctggggaaacatcccaaggagaagctgaggtcttggtcctgggattgcacattggggaagggaacttgggctgggagccctaactcagtggctgacctgggagggaggcaggtgttgctgatgccaggagttcccctgcccaaagacaggacagaagaggaggtgggaccttggcatggcagggaagactgccaggtacggactcccagccccatcccctgcagctcccacctccgtcccactggttaatcatcttccctatctcggagtttctgtgttttctatcccggctcccagaccctcgttcactgcttctgtaaagacagaggaatttttttttttttaagcaacaaatgcctttgcctggctctgggaatgttttaagacataattactgccttgaaaaggaataggaaaaactcagttgcaagtaatgtgtagtgctattatgaacaaaatttgcaaatacataaatacacagaaaacagcatacacgtggagaagtatatttatagcaactaaagaaatatgttcagaagtgcaatctaatgtaacccatcttaatcattcagggattatttattgctatctgtttgtaaaaacgtcagccataagattggctgaagaactattctatctcaggtcaaagtcagctactagtgcaaatagcatttttaaaaagactttcttggatgcattttgttatcttttactgatctgatctcaaggtaaaggacaatttctccaagagcaaagcccagtacagttgaggcctaatatcaagaaacttcaaggaattaacgccttagcctaagtcacatctgttctcttggaagaacaaaagaagatcaatagccgatttattccaaagtgagaaggtgataggaaaataaataaatccacaagagtgagagggaaaggcagatatgcactcagaaatgcccatcggtcgtattttctggttttgtagaaagcagatttcttttgtgctttgtgagcagtgagcaggcgtcctctacttctgtgtcacgtaaggacttttccaggtcttaactactaatcggtgttttaatgccacattcctttcctgccttccaacacaagactcaaactgaggtttaaatttactgcaaatttctttctttccatccactgaatgccgttaagcaatctccatgtgtaatcaaaatgctgggtagcagtagtgttggaagctttgttctttaaatgaaggtggcctatcactctttgtcagtgctcttaaaaacgtaaaaataccttattgagatataattgatataccgtatacttcagtcatttaaaatgtacaattcagtggtttcttagtttaatcataggattctacaaccattgccacaatctaattttagaacattttcatcccccaaaagaaaaccacacccattagctgtcattgtcattccccatttctcttcattccccctagctactggcagcctttagtctcctttctgtctccatagatttgccacttttggacattttatattaatggggtctttgtggctgacttctttcacttagcgtaatgttttcaagattcatccatattgtagcatgtgccagtacatttcttttctttgctgaataatatttgattatgtggaaagaccatgttgtgtttatccatgcatcagttgatggacatgtgggttgttcccactctctggctactatcaatgatgctgctataaacacttgtgtaagcatttttgtgaggtgtatgtttttcttgtctcttgggcacatacctcggagtggaattgctgggtcagatggtcattctttgttgaaccatttgaggaactgccagacagttttccaaagcagctgtaccattttacatttccactagcagtgtgtgaaggttccaatttctctacctccttgccaatcttgtttctgattacagccatcctagtgttaagtggtggtgttcttggttttctagctggattctatgacgtggcctttgggtaggatagggtggaggcagcaacagaaagggctgcttttagggggctggtgtgctgtcccccatgctttagcccccagcaggctgcagcagatggaatctggggaaaagaggctggagtacagaagagcccagaatgtcctcttcctctctcaacagcccctccatacctccttcttctgctcctgactctctcacacccaccatggggcaaaagtccaaatatttttggaagttaccatttgccattttctaatccgggttccacttccttggaaaaaaaaatgctatttagaaatagcactggtacggctaactgagtgggtgatatgcaaaacccaaacccaaacagtcttttgaaatcccaaggcatttcaggattgctaactcacacatttaatcccatatttgggtctggaaaacgtcccagctccaaccaagagtcatcatggcatcatcgtttctcaacctgagaacccaaaaaactcatttatataaatgctaggaaactcactgtgttcatcttggggactggagaataaccttttaaaaatgctttgctgtgtatataaaaatattttgggtccctgggaaagtacaggagaggcaggagctgccctctgacttaagcactcccaagcagcaagccaagagctatgcttagaaatattcccctcaagctccacccatgattatacaagtgatcctatggccataaaagtgatgtcatctatcaattaccccttaggaaagtaagctgccatatgcacaccaggccccagtagaaataaaaccagagccgcctgaattaaatcagtccaggccatgagttggaaattaaatgccctcagaccctcttttcttaatctcctgttatttggtttccacgaaattcatcctttcccaaggatgatttttgagtacgtacttcgcaagcatgcatatgtgtaatcaaagccttatgtgaaaaaaaatacatatttgttttgtttaggggttacatgcaggtctggggcctggtgggagtgaagttgtaaagtgggggtcctgctcataagaaaaggaggtctgcttgcttgagaaaggggtccccagagagaagggcaggtgggcctagagtcacttccttttcgcagaggacgattaagctgactttatgctcataggagagttgtttgggagataattaacacttcctttccaaagaggaattaagaggttagaaaatgtgtgtctagaagctgggaagaggttggaggattgctcagtgaggagcagcaagtcagtgtctctttcagatatgaaggaggtgaagtagaatttataagaggtaaaaagagctaagaacactttgttttaacctataacttaaattcctttgaactcttgactcgttgggggtattacattgtttatagtaggtattagaggggttttcagttttcaatgctctattcatttctcatagtctctttgctctctaaaactcatcttcctaaagtagcagtctttctttttaaaaaatctctagcgtcttgagtgtaatgggaatgtaatgactactgaatgaatgaaactatgtatgttctgttaaaacacaggctatggcttctcttgctgcttttaggtggccatgcctacataaaatccaccctggtgcagctgaaactctctaacaggcagggccattgtacttctcatgttggcttctcaagagcgggtctatgagcaccccattccctttcttatttggaaagaaaacaacactcaccacggcattcacaatgctggggacctgatgaatgggaatggagaggctgcactaatgtaagtggggtcaacatccctgctggagggcagatgcaattttggcaaactaatgacttttggaagccattttctagactgcatttttctcttctttcttagaatgcttttctcaaggggaaaaagaaagcagaggtgtaaatggtatctggccgttcgaagagcccgtctgggagactctctgctgaccacagcactgtctctccccagggcccagtcccacagtgtcactgagtccagagtcgggactccaacaagccctccgcattccagcatgactgtggtaaaaacaaaaaaaatctattttattctagtccatcacattttctatatttgctaaagaaatctcgatcactccataaatggtcggttaaaattaaaaatataggctgggtacagcagcttatgccctgtaatcccaatgctttgggacactgaggctggaagatcacttgaggccaggagttcgagaccagcctgggcaacatagaaagaccccatctctacaaaaataaaaaataattagctgggggagcctaagtcccagctacttgggaagctgaggctggaggattgcttgaccctgggagtgagaggctacagtgagctatgattgcaccactgcactccagcttgggcaacagagtgagaccctgtccgtaaaaatcaaatcaaatcaaatattttaaaaattaaattaaaaaaattgttcgttattttaacaaagtcttctcatgaaaccacacccagaccaacgatagtagaaaaatccaacacaaataaaacaaaacaaaaagctgccatgaatgatctgtcttgagttggtccatggagattggattagtcaatgaatcagacttttatattcaaactccaagtgagtaagaaaaaaataaatcctttgatatatgcaaaatcaggcctgttttaggataatctcattaatttagtgagttgcctagactactgctgaagaatttaggctggcctttctcatgaagatctcttgtagataaaaatatatgcatttggagctctgcttcttggaataatttaaatgagcctacctgtaggtagtgtggtgtgttcttgatctgtatttgactgaggatggtagatatgggttatgatttggtaacgaagcttggaaaaccaagaactatcatgggttggaggtccagggaagttgtggaagtcagcacagtggcacaggcaaccagccatccagaatttaaaggtcaaggtgaatcaatgggtttaaagcagtcaaccaaagcatctgtgaataatgaatcgagagtttaggtcgaccaggaggccagaaactaggtatgctgagagcaaacagactgaaaggtgtatgaaaggacaagctatggtggatagaatacttaagggaggccaggcacggtggcttacacctgtaatcccagcactttgggaggccgaggcaggcggatcatgagatcaggagttcaagaccagcctggccaacgtggtgaaaccccgcctctactacaaatacaaaaatcagctgggcatggtggtgggtgcctgtaatcccagctactcaggaagctgaggcaggagaatcgtttcaactccggaggcggaggttgtagtgagccgagatcacgccattgcactccagcctgggcaacagggcaagactccgtgtcaaaaaaaaaaaaaaaaaaaaaaaaaaaagggaggccaaagcaggctggagactgctccatctccctgtgactgcaattttctgttcttcctgttagggcagggggtcaagctcccagtggggatccagtgacctgcaggtagaagcaggtaggtgtgcaggtgaggagaaagtgaggccaggttacctgccggattatatgtattggggctcagaaaatgttactcaaaaatgaaagccttagaagcagctctctctgaccttttcccatctctgatcctcccgtctctggcccctcatcctcccacaggcgtagccatacaaactagaatccctcttccccaaggtggtttctggaaaccagaacccttttttcccaaagccagccataaaacctaaaaatgtcacttgaaatttccccttttacatctttctatgttaaagctaaacacaaagaaattctcagctgggcatagtggctcatgcctgtaatcccagcactttgggaggccaaggcaggaggatcacttgcgcccaggagttcgaggccaccctgggcaacataggaggaccccatctctgcaaaaaataaaaaattagctgggcacggtggcatgcgcctgtaattccaacacttagagaggctgaggtaggagaatgacttgagcccaggaggtcaaggctacagtaagctgtgatttcaccactgtacttcagcctgagaagggaaggggaggggaggggaggggaggggaggggaggggggggaagggatcctctgacctaccttgtttgactgtaggtcataagacccccattccagagagggtcctgccctatacccagaaggaaggaacgctgctcagagaggccaagaagaatctagacagacaggccttactgggtcttcccactcagtccattagacacattttgtccagttgtattatctacatggctgcccatacttcactgaacctaagcataaaaatagacagtttgcctgtatctttgggtctttattttgaaggctcctgtgtcgcataaaagtatgatcaaataaatttgtatgccttttcctctatgaatgtactgattttgtcagctaattttcagcgaactttctgagggcaaaggcaaagatttctcctcgccctacaggtgcatcagccaacaagaagtccctctatttgcaggtcctctttgtcctgtcaatttctttcttttaatttcttttttctttttttgagatggggtctggctctgtcgtgcagtgggaagatctcggctcactgcaacttctgcctcctggttcaagtgattctggattctcctgcctcggcctcccaactagctggggctataggcgtgtgccactacaccaggctaatttttgtatttttagtggagatgaggtttcaccatgtcggccaggctggtcgccaatttctgacagaggccaagtgtcccatataagtgaaatatttacttaacccaaggctcaatgtgttcctaaatttgcaagcagtcctcttcctcatttgcaataaagcaaagttcatcctcccctgagccgaggcaaccgtgaaattgacaagccaggagctgggaaatgaccgatgcaaagaagagcaatgccctttaacgcttcaatagaaaaaaaacgtaattacatcctcctaggccatgaaggcattgaaaatctataaggacaatgagcttagacttgattgttcgagtcatcaaaaaaacccagaatatatatatatttttttccagaaaaatgtttctgggtagtataatttgaggtaaattatactaaaatataattccctagagaagaaggaaattggtttgaggtattggttatttccctcttgttgcagaaacaaaagtggtgatttagaattcagagaccaggagatacctaggaggtgagagccatctgttagatctgttaatgtttcttaataaactgggggccgggcgcggtggctcatgcctgtaatcccagctctttgggaggccgaggcaggcggatcaccttaggtcaggagttcgagaccaaattcgccaatgtggtgaaacctcgtctctactaaaaaaaaaaacaaaaatagccgggcatgatggcgggcacctataatcccagctactcgggaggctgcggcaggagaatcgcttgaacctgggaggcagaggttgcagtgagccgagactgcgccactgtactccagcctgggtggcagaaggagactctgtctcaaaaaaaaaacaactgggaaccacggctcctcactcagctggaactaggggtctcggtagtgagccactgatgaggggcaagtctgagggccccttcctgagtctgaccacggtgaagtggcctggggtgctttctgcagggggcacgccagctccttcagcaaaacccaggacagatttcaaagcgttaaaaccagagcagcccacatggcggggttttatgaagtcgaacgtgtgtccagagcccaggggtgaagtttccccttgtggccaggtgaacagccccttcctcatttcatgtgtgatggatggaagcacctacctgtgggcatccaacccccaaccctttcagttccagatactgacctatttttattgtggtaaaatatacgtaatacaaactttacaattttaaccatttttaaatgtgccgttcagtggcattaagtatattcacagcgttgtgcagccatctccagaagtttttcagattgcaaaaccgacctctgtacccattaaacagtaacttcctattcctcccctctccatcttctggtaactctgttttgctttctgtccctgtcggtttgacaattcttcgtagctcgtataagaggaaacatattatttgtttttttgtgactggcttatttcactcagcataaggtgctcagggttcatccgtggtgtagcatgtgtcagaattcgcttcctttttaaggctgagtaatgttccattgtatggagagaccacattcatccatcagcgggcacttgggttgtttccactttttggctactgtgactcacgttgctgtgactaagagtgtgtaaatatctccccaagtccctgcttcccattcctttggggatttacccaggagtgagactgctggatcccatggcaatcctgtgtgtaatttgggggaagctctgtgctgttagatactgatctttcccacctactatttctgccacaggcagcgcttgctccactcctgaagcaggcagggacgctgcccacagacatgcctgctgacatctaggagtggcttagcctcatgagccctgctggtgtgggcttcaggtaaccctgtgctcctttgactcccaaggtggctggctcaccctgacctttcctccgtctgcttggtttgccttcgcattccgggctggagtgggagcttagctctgaagtccggctcacgtgtttggcccctaggccccagcctcgccctcgggtgtccctcctcctgcatacttggggctggctgatctgctcactgggaccctggagccttggtggtaaggtcagctggtctctctactcaggaccatgggacagggaaggaggctggaatggaggacgcctgctgagcacctcccactggccttgggtggtttgaggggttggtggctacaggctgattctggctctagactcatttaaatctccttgaatgtaggtagtcttcagggagtgggtgtgagttcaggtcaggcctaagagcctggaaagccaggcatatgctaaggttgggatgccggagagagaataggatccttttagatgtgaagaagggccctgagctgggagcagggttagcaaaagccagccatggaaccatgtcgcagccctggcaggcaccagtctccacgggaaagcagagaacaggtccaggctgagggcataagcccactgggttggcctgggtttgggaagaaacaaccacagcctagggcacaggagggcccctggcccatcctaagcctttgacacaagctttagagcaggtttacactgctcactagcgtacagccgccctctagaagtctgccagccctggcgatgctgatttaggaactgagcaggctggcagcttttcacacctgcagctgggagggatgagaaggtgcaatctggcaggacagcaccaactggctccaaacgaagcccctccccagccccactgtcccgacactgcagccacccgtggctttggtcatctcttttgtctagaactgagagtttctaggggctgcttggattctgcacaatgactgcaggctcccttccacaggcgtagacattacagccacggcagcaaccctctcccacctgggtcctcccttcctgtggtcccagggtgtcagccctggctgcccatgggggtcccctgggaagttttaagaaagtatgtttattgcggcactattcacaatagcaaagacttggaaccaacccaaatgtccaacaatgatagactggattaagaaaatgtggcacatatacaccatggaatactatgcagccataaaaaatgatgagttcatgtcctttgtagggacatggatgaaattggaaatcatcattctcagtaaactatcacaaggacaaaaaaccaaacgctaaatgttctcactcatagatgggaattgaacaatgagaacacatggacacaggaaggggaacatcacactctgggaactgttgtggggtggggggaggggggagggatagcattaggagatatacctaatgctaaatgacgagttaatgggtgcagcacaccagcatggcacatgtatacatatgtaactaacctgcacattgtgcacatgtaccctaaaacttaaagtataacaataataataaaaataaataaataaataaaataaatataaggaaaaaaaaaaaagaaaagcttttccctgcaccccgctcctagagattctgattttattggtctgggggagggactcagtattgttatttttgagaagcatctcagggtttctagggtacagccaaggagaagaaccactgctgtagacccctagatcaccaggtcttggtggcttgcagatgagttcttcaattcacaatggaacctaagggtttcggtcagtggttctcatacctgtatgagaatcacctgcagggcatggaaaaacatgtctgtagggcctgggaatttgcatttcaaacaggttaccaggagaggctgatgttctggctatgtgactacactttgagagccatagatctaggccctcagatctcacagatctcatagatctaggctcgtagctcaaccttagttcttggacttagggtgattgagagaaatagaagcaagctgtgtccgtcactgtacttaatgtttacagcttcatattttcacatggcttcgaaagatctgccactttacctctgaactatcgtgggatagaaaccccagcagagcaactggcccatggaaggagttaataaacgatccttcccccatatgcagaatggaaaatcgactcttaagaaacttccacccaactttttcccacccctcccatgaaaaagttaaatcgtgaaaagaaatattttgtttaaagtaacaggatgtctccttccaccatgagggcccacttacagacttgaaaagcctgaatattagtaacatgcatttatttctacattaaagtcatttcttaatgatgtgatatttcagtacttgagttcgcccaacgtcaggaaccaagcagccaagctgagaccctgatcactccctcctttgtctctggatgggagactagaatattcagaggttacaacctgcggccaacagagcattttgactcgttatagaaatgagtgactcatccatgggtcatttactcatccgtctctcttccccgaccacgaggaaactgcaggggacacacttacttttctttaactcgatgcacaaagaacacaaatgttgctgattctgagacctgacttcctgttattaaagaggacatcgtacaatttaacagaacaagatttctaagcaaagcagaaggtctaatgatttcagagtttgcttcctacctacaattaactaggtcacagctgtaaaggaagagaaaaaataaatcactccaaaccaggagcactcaatgtcatcgtggccaaaaaataaacacttcagtttttcttttttaaaagaggggactctcaatttaacagaaacaagcacatttgatatacgctagaaaataaaaaaaatctgatcagacagtaggcaaaagcagtgtctcaggcccacttatttaatagttacacaaaacagaggagtgaaaataatgtacttcatatctaaaggctacaatatgcctcgtatccatgcagaacacttctttagtattatacacaaccgtaaagactcccatttggtcatgtaggagttacagagtttttaaggcccaggactgctcaggtctgtaggacttcgcaatttggcaaatgtgaaattctcatagtggactcttcgaccttggtaggatgtcacagaggaagagatccttttagagtggattgtatttttaagtatccccagtgcccaagaaaggaatgctttcagacagggacatttcaatgtgtttagtcccttcctttctctcttatgatcacctccaccaggaggattttgtttctctttgagtgggttgtacagtcactactaattttgtctaagtgtttgcataaaatagctgtgggaaagataattaatggatggatggatggatagacagatatctacatatatacatagatagatgaatggatgggtacatggatggatgaattggtggatagataccgatggatagataccgatagatcgatagatagataggtctctatagttgaacagatggatggatagatagatggatgaacagagagatctctatgtagatttctatagagatctatctgcctatccatccgtctatctatctatctacctacctacctacctacctgaaacaaagatgaaaaagaaaaataacctatgagcatggacgtcagagaggatactttagatcctcgacctcaaaatgccctttataggctccagcctcagcaactacacgggaacttggaggaatgcagactgcatctgcatttagtaaaacccccagatgattccattataaactgacgcttgagaaggtgtgctttaggacagtgattttcagtaactttttttttttgtcaattatggaaatcttttcccaaatgaaatatttggtggggacataagaaatatcttagaagcagagctctggttgaccaggggtgaggggggtctcagtcttccagccccctagtggcacctcccatcccacactgcgtcttagcggtagtggctcctgcttctgagtgggtatcaggggtcctggtgtttttgattatgttgcaccctaacacctaccagcccagaggctaccatgttgattcttctgaacaaagaagccctggcatattatggatgctcaggtgatattagatgatcattagtaattgatttttttttcttttttttgagacggcgcctcgctctgtcgccaggctggagtgtagtggcgccatcttggctcactgcaacttccgcctcccgggttcaagcgattctcctgactcagcctcccaccacgcccaactaatttttgtatttttagtagagatggggtttcaccatgttggccaagaagatctcaatctcttgacctcgtgatccacccaccttggcctcccaaagtgctgggattagaggcgtgagccaacgcgcccagccaataattgattttaaataagaatacatggacaggtacagctcagttgttccagagatgggcatcagaggggaaatggaagcagggagacagcctattgatgatgagaggaagacaagacagagggcagagagatgggagtggccctatagttaagagttgccagataaaatacaggacacccagttacatttgaatttcagacaaactccatggaacatgcttagatgaaagaatgattcattgtttattgaaatttgatgtaactgggcatcctgtattttcatttgctgaatctggcaaccagacctagagttcctttctaaagggacacttttctcagcagcttggattccaagggtctcactctaggttagacccccatttagattcgctctggagagttttctgaagtcagactacctgggttcaaaccctggatctgccactgctggctgcgtaaccctggacaaatgacttaatctctctctattctctgttttcctattctagaaagtggggttaggaataagagccaacctcaaagggctgctctgaggatcagaggagaaaacagctgcatagattaagcacatagaaagagctcattaaaggtactttctattcttggctgtgcttctgggtctcagtaacttccctctctgcctggatttgctcctggccattttcttggagagtgagacccatccagaggggaatgtgggacaaggagggaggaggaagtaaggactgagaaggcccagagacgtgccttcctcttctttccagggtcctggcctgtcttgtctgttgggcgggtatgcttccttcctggccttccttgtggagcatgtctgggagtgtgctaggaaatgagggaggaaaatatgtaacttgatatctgctccttgaccctggctgacctggttaactctctccaggatggaagcaaagcctgcccgggaaaccttccattgcaggaacatctcggcctgaagctgtcatcagggagcaggatctgcttcccggactctgagcagaacaatgggagccccagcaggctggcgaggctgacaagccctaggacggtgacctctccgatctccagatcggaaactcagaaacgtgtaagtgccagaatccgcatttgggaatctgttatttctccctctgcgagtcaacctgatcaccctggaagcctcactgtctctcagcccttgttcccatttttctttccatgaacaccgcaatcagatacgagattccagtaatgatggttcttgaaaattaaacaaatcaaaaagaaagccagccaaggtatggagtgggggacctctaagttcccctggaggagacactggggccaggttccgaggtgcattcggagccagaatccctaatggaattgaacaattatcctgaagctgctctctgaaagccgcggttttcctaaaacactgtgcttggcgtgcctgggcttcttggcactggcccatgacccacagcagcaaatcgttcccaggaagctattgttatttgtgtatctgatagcattcagctgagtacactgacagcaacatttagaaaggaaaagaaaaaagaagcgtagagtgaaaaggacaaaaaggaggcttccaacatcctggtgggaacagaaaaccagcaaagcctcttttccagcccttatccttgtgagtttggactctgcagaactgtcatcccccaggcatagctgcagcttgtatgaaggtgggcatcaggcgcggagattcaggacagtgtgcacctgctttcctccaacgggaccccctctgttcttcccaggaatgcctgtaaactgccactgcctctaggggctgcaccaagtccctgtgtactcccaggacacaatggagtggaatggagtggctctgttctgtcagggcctaacattccaaatgaattcattcccttctgggaaaaaagaaccaccttgctcagagcacaatgttcccatgtcttggcttaccttgaagcatttttgatacacctgttgggacaatgcgttctgccaagagaagggaagtagcatactttgttctattttttactctcaatgggctacgtttccattgtgttggtttcccttacagaaagtaacacacacagaagagaaggttataggattccatgctgcttggcaaaggcacaaaatatgtgcacatatttacatggaatatgagggtaaactagaaaattaagggtaatctaaaatagaaaaaaagaagaaaacaataagttaaaagtatgaaaagacatccagaatgagcaagttactgaggttgtgcctcaactttagcttgagtttcctggcagcaaaggtaaaaaggtaagtacattgaatcacatacttcttattatcttctaaaaggaattaacggagtggaatatataaaaagcactgaataacataaggaacaagatcttcaatggtcattttgaaaaagcctcagaagcgtgcttatagatgtttcttctgctggctttctcagcaagatgatactaagataccatcctaaccacctcatctctgcctatagcccaggctatgcctagacatgcctggagctatgccagtggttcaaggggtttctacaaacacttgcttctacctttgctttaaattggtttcttctcctctgatttctctggtctccacctgtttcttgattctccagctatatttgacacatctaaccggattcatgagtctttagcctgtctgtgggttggcttgcaggctcactgaccccagcaaactcccatgcctggccttgggtcctgcccacccacctccatgtcctgcctaagtctcgggtcacatggccagccccagtccaggccaagaataggttgctgctcattcaaaacaaaatgacactaaacatcagccctcaatagagaggaattaaatcttaactttgtaaaataatttcagcagggagttgagaaaatacagcataactatgttgatatttgattatttaatttaataaagatctagtgtaggccaggcatggtggctcgcacctgtaatcccagcactttgggaggccaagacacgcggatcacctgaggtcaggagttcaagaccagcttgaccaaatggtgaaaccctgtctctactaaaaatacaaaaattagccaggcatggtggcgcatgcctgtaatcccagctacttgggaggctgaggcaggaggatcgcttgacccccggtggcagaggttgcagtgtgccaagattgtgccattgcactccagcctgggcaatagagtgagactctgtctcaaaaaaaaaaaaaaaaaaaaaaaaaaggatttagtgtaaagagattaaagtaatgactagccaacatatccattgatctgcttctcttgcgtgtcctatgtccctacaaaactttgggctaagtgctagaaggtagtgaattcaaagttgccttatccggcaagagacagtgaggacatcctgagtttaaaactgaagagttgcatctctgctgtggatgtgacaagtgtgagctgctgtttagaagggacaatggagaagcctgacttgcctcctcccccagcagggacatcattctatttgacatcgtggtgagatccagagttcctcagggtttagccaacgtttccatcagaaaaggagctgtgaatccattcaagttcttgctcaaggacttggctgggaccccagaattccactccatctagcatgaaagagatgatttagaactgaaaggttttagtccagctgttaccagtcagccaccttgatcataaaagaacctctgtttggctcttgtgcaatctctagttttaagtaggaccacacactgctggtctgcaaatttgagttagcaaaatatacctctaggtggtagggtgattgttctattggctgaaattgcttgatttgttctgttttaacaccatcaatggagaatatcttcccaaaacaaaaaaatgttgctgatgatattaataagttgttctatcaggcaataattagaccagaggttcagttgcttctgaagttgttgtcctattgctaggtaataaaaccatgttctcagcaaagaggatgtcatcttcctgtttcctctagctggaggacgtgtattcaatgtattcaaatatattttaaaatttgcatttgacctgtcagaataggttttttttttttaaaaaaatatatattctgatttagcactaggattatgctgcagctggagggcctgaggatctattttaagattagttttttttgtagcaagatgtttcctttttatgaaaatcaagcctggggcaggggagaatatgtagatatttagggtgggacagtccttttttttttttttgagatggagccttgcttcgttgcccaggctggagtgcagtgatgcgatcttggctcactgcaaccttcacctcccgggttcagcgattctgctgtctcagcctcccgagtagctgggatgacaggagtgtgccaccacgcccagctaatttttttttttttttttttttttttgagacagtctcattctgtcaccaggctggagtgcagtggtgtgatattggctcactgcaatctcttcctcccgggttcaagcaattcccctgcctcagcctcccgagtagctgggactacaggcgtgccccaccacactcagctaatttttgtattttagtagagatggggtttcaccatgttggccaggatggtctcgatctcccgacctcatgatctgcctgcctcggcctcccaaagtactgggattacaggtgtaagccaccatgcctggctaatgcccagctaagttttgtactttcgtagagacacggtttcaccatgttggtcaggctggtctcaaactcctgacttcagatcatctgcctgcctcaggacagtgctcttttacttgtagaaattgaaaactggcatcttaggcaatgttattctttaaagttggattataaaaatagagatatttcatatctctcactctgttcctctctcacatacacacatacagacatatgtattttttccttaaatataagaacaacgcatacatacattttcttttgtaaagttagaagatccaggaacaccggccctggttttcccgtggcacagctgagtagtagctggcctcacctgctggggcaggagttttccaggttgcaatgtgcctctttctgtattttcctgctacatttcttccctgcctggctttgacacatatttgagtttataatgcctctacgaggttgtattttctcaggtgactagagtgaacaggagcgcagccacaggagttaagataaaggattaggtcttatgtgtaccatctgagatagaaaccaactctcaaacctagccagtttctgaccactggatctcttaaggacagaagttttcttgtactgcatgggccccactctaagatacatgagacatgtttctcttatgccaccttaaggccattgacagaagaaaaaaggaagtcacagagtcccgaagatatttttgtttgctcttaggtatgttggtttaataccatcaaggagaacacagaacacccaaccagagattctactagaaataaagggcgagtaagatgatctgggctgggcgtggtggatcacacctgtaatcccagcactttgggaggcctaggcaggtggattgcttgaggccaagagttttgagaccagcctggccaacataatgaaaccctgtctctactaaaaatacaaaaattaactaggtgtggtggtgcatgcctgtaatcccagctgcttgggaggctgaggcacaagaatcactagaacgtgggaggtgggggttgcagtgagctgagattgtgccactgcactccagcctgggcaacagagcaagactctgtctcagacaaacacaagatgatctgcagatggacgctatggctgaaccaaaagccataggatctaggtattgccccgagagtaatgtcaaatggcacggcatgtggccttgggagctgaggttctgctcgttgacaattggtcttcaggaagccaagttgaccagtaggctgacataagcacaccattctacgttgttgatttcaaatcgacaagtgcccgtatgcatttccagactgctttttttttttttttcttaatgagctcctctccctaaatgctctgctacctgacaacccagagctggggctcagcaggggaggaagcgccctctcctcgtcctccctttaaggatggcatcttagcctctccatgctgctataacaaatcccataaactggggagcttacaaacaacagaagtttattgctcatagttctggaagctggaaagtctaatattaaggcagattcggtgcctggggagcactcactttctggcttacaagcaaaactttcttcctgtgtcctcacatggtggaagggactactgagcttttgagggcctcttttataagggcactaactgtctcccaaaggccccatctcttaatgccattactttaggggataggatttcaatatattaattgcagaggaacaaaaacattcagaccatagcatatgggattcacatcttaatgacagtgattccagaacctgacacctgcactgctgcctacatgggtggacccggcacctatgcaccaggccagtgacaaagcaaggctgtcactgcccctgcacaggaacagcttttgcagagccctgatgactctgctcatctacacccaggcacataaatttcactttggtaacaaaataggcaaattcacaagaatcggcacagactcgtgggagggctcctgtaccacttgtctgcttcttaaacttctctttcagtggtatgaatttcatgtgtcaggggtaccatcttacttaaaggaaaattaaaggggctggtgaaggggaactaggcataatgtaactgggtgaatcccacatagaaagccttctctggataggatctacacggaagacttccttcctagtgttggcacctgttacttactttccttcaccctaattggcagataatagcaggattttcttctacaagaactccacgagatcttagaaatgatttcttccaatttgatccaaatccatttgcttttacagaatagatgtcgatccccaaattcggagttcaaattaggacttgctcatttcgggcagttgatggctggctccagcctaaattatactttctaaatctattctgggactcagctgggttatgaagccctgacccatgattacatcaagccattgaaaaaaattgaggcaaaacaaaacaaaacaaaacaaaacaaaacaaaacaaaacaaaacaggttttccctctgctagatcttaggacacctaagacttaggggtagagtgctggcttttgacataggtgaccaatagatgatactgaaattggtctttcatcttctctcttgcctttttttttgcatgggttgtggaagctggaaaagacctaagggacaattgcagctccatttttctgacatagtggctgaagggagggatatttaaaagaggaacatgctgtttctttggtgctatagggagaaaactcactcttggccttagttgtaataatcttcaccccaagagtctctaccatggtctctaattgctctctgtgtccaggactgaccttagggtgagtaaaaattgttctaagagtttctctcttttcccatctgcattattcatcacttcctctgctgtgttcttttctctaccccactgtgcctgtttttctggaacactatatattaaggcactgcttctcaaactgtcttctctgttatatgcccatgagcattaggttcaggatgtctgaggtggagaccaggcatctgatccatgtactgtacttagaaacacatggcaattcttttcttttcttttcttttttttttttttttgagataatatcttattctgtcacccaggctggattgcagtgatgtaatcttggctcactgcagcctcgacctcttgggttcaaacaagccttccatctcagcccccagagtagctgggactacatgtgagtgccaccacacccagctaatttgtttgtagagatggggttttgccatgttgcccagtttgttctcaaaactcctgacctcaagtgatctgctcacctctacctcccaaagtgctgggattacagccactaagcccggccaacacaaagcaattttgatgcatgcaatttgtgcaatcttttatgacaatgctgcaataaggtgatttcttagtccttatctcacttgactatcagcagcatttgaaaatccatcatgcccttctgggatcctctttctacctcactggctgctctctgctcatctccagtgctggttccaccacatggagcccatctctaagctttggagtggcttcaggtccagtgtgctgacaattttctttccatccacacacattccccagatgttatcatatagtcctctagctttaaatgccaatctccagtggtatactggagaatgtgtaactcttatcaactctctaggggaataaaagccctgctttgtaatgtttgccaatttccatggtgtaaattccctgccatggcccatttcaaactgctcatctgtcatcactgaatgtagagttgagaagaaatcacataattggctctggagagcctctcaagccagctccagtgaacccctgataatgtccacatcttatctccaatacagacctctcacccaaagagaaaacatatgtttttaacatcctactgtatatctccatttgaatttttactcattatctcaagtttagcacatcacgaatagaacccagtctctcccgcccaggctgtcatcactgaccagctcttcctgcagtggttcccatcttggtaagcgtcagctgcagtctacagctgctcagggggccgttcttgactcctgtcttcctttctccctccacacccaatctgtcaggaaatcctgccagctctcccttctagataaattcagagtccattcacttctcaccacctccagggtatccgctggcctaaatcatcatcatctgtcactaagatgattgtactagtaacctcatgcaacaccctgattccagccttcttctctatcaacctagtagctaacgtcatctttcagcccctgatcccctgatctttttcagtcttacccagagtaaaacccaaaggtccttctcatggcctgcacagcctgtgccagctgggctcctaactcttctctgactctttaacctcacttctgaccacccccatctcaccccttcactctgctccagctacctgcttgccatccctcaagtacatcaagcccactcctgcctctggcctgttgtacttgctgtgccctctgtgtgggatgttctttccccacatggctgtgtggcttgctcccatctccctccctgtccttccttgagagccacattatataaccatgctgcacgctccgtctccccctgctccttactctgctttatttctctttagagaactcatcaccacttgacgtactaccaattcacgaaagcgcagacttagctgtgtctcttgggcctagaacactgtctggcatgtagtcgatgttaaataaatatctgtgaaattaataaataaaatgttaggtcctaggtattccattcccagggatatctgtattctgggactgattctgtgtggttggactaggaccgcattttctagcaatgatcaatatacttctaacccttattggttttcctcattaatgttccaatagagtgattggagaaattgtgtctgaatgatccctccaatccctccaatcactctatgggaatgttaatgaggaaagccagtcaggcttggaagcctatagcgtttttgagaaaagttagcaagtaatgtaggaaaatgatcagaaggatatttctgtactatctcaaaatatccccacaagggttgtgattgggaagaaaagggactgcccatgcacccaaaggtgttaattgtgtagtaggattttaggaagtttttcatgatcaagttctccaccaagaagagctagcatcttaaaataagtcactgttaggactggtgatgacacggatgttcgtctgcatacaagcacaggcacactgcaaccctggcccttgaaggacaattctgttttattaaaggcttgagtttataaccacaaaggtattctttttgttcaggtagtcagcattcactcaataaacacttgtttatcctatctttatcccaggtattgttgtaggctctgagacctagtagaaaaactgaccaagtcctttgaagtattagttattgagtggccaataagagaagacaaaaaagaattaaaaatccgtagatgtggttcatccactcccagattagaataaagatccattgcacagtttcttctatatagttttatggatgtaggatagataatattatcctctgaggctcattgatgagtaaatacaaataaaagtggattgttttcaactatgtgttcaaagaaagtcttatattacacaggtggataatattcattatgttagagcagtttctaagagatctgtttcaaagcatttaaagaaagccatttcccccggggcaggtgtggtggctcacacctgtaattccagcagtttgggaggctaaagcgggtggatcacttgaggtcaggagttcaagaccagcctggccaacctggtgaaaccctgtctctactaaaaatacaaaaattagccaggcatggtgatggatgcctttattgtcagccactcaggaggctgaggcaggagaaccacctgaacccaggaagaggaggttgcagtaagctaaaatcatgccactgcactccagcctgggtgacagagcaagacgccacctcaaaaaaaaaaaaaaaaaaaaaagagaagaaagctatgtcccctttctccttgagaacacgattgactttgtgtacatatttgcaatatggcagattgaaagacacacaaaagggactttgtccatgcaccagtcaagaaaagaagcatacaggagaagctagattggatgtttttgatcttaaatagcctggaaggaagtcatgcacaattctagactctatgacttcggaaggcctcaggtaactatccagagactctcctcaatgtgctggacactgcataggatgtgccaggaatatggacccaactttcaaggagcctaaatagtttttttcccctattgagaatgacatgacccaaaaacccaacccaaccaacccatttatttctcttttatgtaaagtcaccagaaaacacaaaaactagctggtttccttatgctagcatcttgcccaaatcatcgatcttggtaatattatttccttggggcagctgttctcagtgttggctgcaggttggaatcacctggggatttaaatactgatgcctggatcctatccccagagattctgatgtacatagtctggggtacagatgggttcttaaaagctccttgagtgtttccaatgcaacaccaaagttgaaaagcattgttttaacatgacccatggcatgatggtgaggcatgacgaggggacaagctattcaaagaagagaaccatagctcagtttcaggcccagcctgagagctgccattttgcataggatgctgaaacgcctgggagtcctgaccatttgcatagatatttgcaatcctgctttccacaccagcttgaggaatgaaaactctggagtggtacccatagagacagcctttccttccccacactgagccaataagcaatgtcattctacccaagatgagaagtcaatggcttaacatgacataagctgctatacaaaacaaaataaatatcggttcaccaagtttgggtcacttaaaattgcacgggcctaaccaatgcagggaaaatggccttcaatgcattctatgaaccagagaattggagtccccagtagtctgtgttctttttctccagagaggcgtatatttatagaaggaacaaaaccccatgcaggatgagggggctggctaataatatgtgtgaatacactgatctgtctgaacagttcttggctgcctgcgctcaatggtaataaatatccactgaaagccgtctgctgtatgtgtttttggtaacgtctcacacttccctgcatgaatacattcagaatgtaagcagcacacactcaacgatagagactctgttgtattccgaattcttaagttatgcagcttagcagctgtgataatgtaatggtttgcaaaataatagactggcaagacgtcaacctggaataacacatcatataatgaatgatgtgggtacaaaaacgtttaatttatgctgtgttaaaaatatcgctccagaaatatcccaccatttcagtctttcccagacacacaaaaaccctttcacctaaagtattggaataattgtgataaaagagaatgctttcttgtctcatttttcccccaataaaatcatcagatttgtactactttgtgaagagatctatgatttgagtctgattggctgttcatgcattaactttgttccacttaaagatgtacagcatggtcttagagttccgaataaataagaaaagagcatttcgctttctccgcttgtactgacacgtaagagtgaacacattttccaccagagataatgggacttgtggtaggttagcacgaggatggaggctgttccagtgtaggtcttaattctgatcctcttctcgaatttgctcactgacagtttatatgaacttttagatttcattcattctgtcatctagtggatatttattgcactcctgttatgaaccaggaacccaggggtgttccctgtcctcaagatgcctgccatcgtacggaggattatgactgaagcaaaccagtggtttcaatgcagtgtgatttgtgctattgtaaagggatcctagagtactacgggagccagcagggagagcatttactcagacttggggaagggatggggtgctggaagagcttcctgtggaattggctttaggctgaaagaagtaaagggggtggagggaggaggcagaaattgccaggaagatgaaaacacacgcaaagttcctggggcaagagcaagctccgtagtttggaggaacagcaaacatgtccacgcatggttggaatataacattcccagggtaaagcatgggaagaggtgaggctggagggctgtgattaggaaaggccttgtgatttgtccttatcctgaggcagggagccacttaagggtttcagtagacgagtgacacaatcacccctcggttttagaaagagcacagtggctgcagcacagagcgtgaattgaggggagcaagactggccacggcgagaaggcaacacgcaggcaagagatggtggcgggctgcaccacggaatagaggagcaggacggggagagacgtttcagagctggaatggacagtgccttgtggctgtgagaaggagacgatggaaagagaggaggcaggaagacgccagggtctagtttgggttttaggaagctgggggtgttggaggagaagcaggattattaggagagatgacgaagttcatcgtggacatgctggatttgaggtgttgagatgttcaagagaacagtgatgtccagtccagcttgggggtctgtgggtgtggatattagagatgataagtcaacggggcagacgagcaatccagtaaatgcaggaaattatgctcccacttcaacaggtgatcttacagctggaaaatcagtgggtgaaaacggagatacagcaactctgtaagtatttgcacgactgggtcagagccctcataggcgggcatctcagggtgtgaagaaatatacatttctcagcttcctggagcccaaactacagcagcagagaatacagacagaagcctagcagatttcacctccacttaaaaccacaaactaagacaacatggggtgggccacataaaaggttcactcactcattcttaggctttgcatctataaaggtaatctccaacataaaaccatttcctcgtattgcaaagttatagcagtttaataaaaacttcctccctgccccaaggcaaacgcccaggaaaaaatttccacattttctctttccttaactcatttatatgttttgttcttacatttattagaattttccatgaagttcatttttactttacttctggaataaaaaccatctggctttagaaggaagagaccatacagaaggatgtgggcttgagtaagttgagttacttgggattcacgtgtagtcagttagaaaaattttgttttccacgtgtcttacataaaattgggagtcccagaaaagttatcaccacgacacaatatactgcttgtcttggctttagcaagcgaatagccctaaaggatctccccaggagacagggaggtgtgtctaaatataaaaaattgtcatctgtttattaaaaatacaagactgggtgcggtggctcacgcctataatctcagcactttgggaggccaaggcaggtggatcacctgaggtcaggagttcgagaccagcctggccaacatggtgaaaccccgtctctactaaaaatataaaattatccaagtgtggtggcgcacgcctgtaataccagttgctctggaggctgaggcaggagaatcacttgaacccaggaggtggaggttgcagtgagccaagatcgtgccactgaactccagcccgggcaacacagcgagactctgtctcaagaaaaaaacaaacagaaaaaaaaagatacaagccaaatgttcttatacacaaagacaggcaatcttaaaaatgatgcctatcattatggactacattttatatgattgccaggtattgtgttacgtccttgcatacatttttggtgatcctttacaagcactgcaaaggggtgggcagtgtggatgaataaaccgaagctgagaaagtttgagtcactctatcaaggccatatgactcgtaaatattcaatagttaaagagtaaatagtaaaactcgtaaatagcaaatagacaagcctcactcttgtcaccccaccctgctgctttctgtagcacctaaattgtctttgttacttattttgtagcttaattctagcctgtattatactgacttctaattgttttatttatataaactttacaggcctaatctctcctcccataccaaacgtggcattttatatttctttctttctttctttctttcttttttttttgagacctgagtctttctctgtcaccaggctcgagtgcagtggctccatcttggctcacagcaacctccacctcccaggttcaagcgattcccctgccacagcctcctgagtagctgggattataagcgcataccaccacgcctggctaatttttttgtattttagtacagacagggtttcaccatgttggccaggatggtctccatctcctgacctcgtgatccgaccagctcggtctcccaaagtgctgggattacaggtgtgagccatcacacccagtccattttatatttcctttatgttttccaccctccctagcacagtgacgggctcttggcagtctgaagaagcatgaaccagaactaagcctggtctctcaggatttggtggatgtctaagttgcagggttaagaagttgcagttccttctttcaactcaacctctagcagttggatacagaagcaattgtcgaacctgggcacctaaggggacaggactgtcagtgtcctggaaatcatgttcttctctttggttttcaccacctcttaatggcatatcttctatatttcctttaatgcgaacacaggtaacgagttggttataacccttttctcagggccaggctgccatgccatcgctcctccagagagcaaacacgaaacatgatcctatggcaagaacatacaatgccaggtccctggatttaggtcctgctctgtcattgactgtatattcccataaagaagattaaaactctccacgccttggtttccctgtttatacaggacaagggtagtaacccctgggctctgtgccttgttagtgactcgcaatggtaaagcaggggaatgaactgaaagccttacagaaatgtaaggtcttccgcgtcattagatgctgtgagacaatggaaaccaactcaaatgcctggcgcccttagagccgctgatggaactgaacaaactgctattgctttacactcccaatggaagggtgctggctctcagtgtttgcccttacctctcctcctcttctataaacacaggactccattctgaaaattgtcacagaattgtcaattcctctgacccacagtgttagatgtccagtggaattgacaggacatcatacatttcaattagttccactctccattgctctggagggtgaggtgctacctcaccttcacggggaagacccaatgttccaaggatgtgcagcgcgggagggccccaaaccattcagaccatactcatgttaaggcccatgtaacggtggggtgtgctcaagggcagaaaatagccctgtgtgctttgaaggcaagtgtgtgcaaacatacccaataacagacatgttttgtgtatgatactatattcccatattgtcaatttttcttaaattagtaaacaatgactaacagaagtggtaactgcctatatttgaatttatgcaaacatacatgatttattaaacactttatctggagaacataatggtataaatggaggtttccaggcgactggatttgtgtgtgtgtgtgtgcgcgtctataaaggaagactatgtgctcaatgtggccattcacacagccctaaggcacacaattcacacttccatgttagcatttgtgaataaatatcttaataatagaacacgtgataaaaattttgttaccatacagaccaaagagttttcactaacacctaacatcacactcaatagcagcctgatcaatgtgtaaattttgctgtcactgatggcctaagatctaagctattggaataacatgaaatacacagtaagcatttaatacatattagttgatgatcttgacattcagaacaagaaataagtctcaaaataaagaccgacacacaaccagaatagaaagcaacgtttttttcattattcaaatggcagaaaaaatgtaactcatcaaaactcaggaaatcaacccgacctaagtatttagttagcccctcacatttttaaacctttagtttttttttttaaataaaacatcgctgagtagtaagttataccaaccagaaaaagtcacttgaattcagttctgatcttctttataagatgctgcggatagctgatctaacaagagagcttcatgtgatgctatttgctttattaggtcttggactacaccttaactgaagacgtctatgtaggtgacgaaaactcatggaaggacttgccacaattcaaacatgggcttttggggtttctgagaccaacagaaccaccatatactttgtgggtgtagggattctccctgcatgttgagcctgtcaccctaatgacaaccagctttgcattaactagagtcagccccaaaaatgcatctgttactccagagaaggacaaatccttattattactttataggattttctctactaggggcttccataaagtaaacatgctttcaggaaattaacagagtaattttaagccaaaatccatagcattaaaaacaaataaaccccaaatgatagcaatgtatttggggggaaaaaagcatgtaatcaactgcctgcataatttaaactaccaaagctttgaagctccttaacatcaccatcacctcccttttagacactgtcacccagtagaagaaattcacagccctgctgctctaatgagtatgtttcagtaaacacagaagaaatcattttcacagcccccatgcatttctcagcaagcactcaaatctttcaaacccattccagggggaagtttccatcccaatcttttccctcatatttcatctctaagagcacccctcccccatctgagatccacaagttacaaaaattactgtttcaggtttctcatcattatctgttaaaaaactaaaattacagatgagatagtattctacagtcccaggaactccaactgttcaggaaacgtgagtaacagaagtaacgcggtatacaatgaaaacaaacatcttcctgtctttggagcaactgagaagcaaacaacccgccacgtagcttaccctttcaacgctgcgccttctcagagatccataaggaattttcagtaaaagtctttgggatctattcggagccactgcagcctgaaccaccatggtgtacagctgtgtgtgtgtgtgtgtgtgtgtgtgtgtgtgtgtgtgtgtgtgtgtgttcccagcaaagggagagaaggagcctccctcaaaaataagttatggtctcctggagggttcccaaatatcaaataactgaaagagtttttctttcgaccatctgagtcaagatgtggtttgtcaggaggaggggggatgggaagaaagaaaaccagcccaagttctgcaacttcagcgcccacgaagcagcatctctagctttcttccatctgtccctctgcacagctggctcagcgagactgccgtgtcccgcttgtgggcaagtgacgcgtctggggagagtgatccagaaatgtcaactttgcttctcgtggctgcagatggtaatcaggtcagttgtctaatcaaagctctatcagacgtattattcattccatcacgtgactcccaagcccctcggccgtacagtaggtcacatgctcaccttaaaaagactatttggaatatcaccatctggagtggagattaatgcagaatcctacactctgatttcactcccttctgaacggaggaacaatatctgaagaccacagacagaacacatcagggacctctttgaaatcataaattctatctataaaactgagcatcagacatgcgtatctgtttacccttcctgctttctaacgcataaaaataaacgcacgggtattactcactgtatatgtgaatacagtccacagagagaaagtatgagggaaagaagaagaaactgttgcaatcacatggttcagatgaatcaaatcaaatcgaacaggcttgtgtttggcaccttctcatttaaatgtttgtgttatagaacatttatttttacgtgtgccagtaaacaagaagaaattatgtttcgttttacacggctgtgtcgaagcagattcatccatcacgtctgtcaattattttctgatcatattgtgtaatttcagatcacacagccttctttgatggatggcataaatggtctcaaacgttaacttttctgtaatattttcccctaccttccccatctctactcctcctgaaatcggcttatttccatagcagaaaaaattactacaaagaaaatcaagtaaggtgcttccaggatatggggtatgtttgggttttttttttctttttctttttaaagcatttctacatacactgcttctgtctgttctgagttttatgaaagggatggccatttcctttgtaatcatcccgtggtttttggtattagccttgataccactcatacgctctgggcaccagctttgagacactgtctgcagaccagtgtgcttacttcattgaaaatgacggaaatgaaggttctgtttattcaaacacacctaataggaaatgggggtggggtgcgaaggaaagaagcagagttttgtactatgagaaaatgaatcagaagaaagaggcgaagggtgccacggcggcggcagcagcgcacgggctggaaacctgggttcagccctccagcgcagacacacatcacgagtcagttaaagaaagcatcaggttgatgtgggaaattccaaatatacaacaattgggctttgttcgtaattggttccatgtgtgcagtaggagagtcagtgagagggtgagagagacggggagacggaaacctcttaaccacggctcacacggcgtctttggtgaggtggtttaggtttacatctcttttttctctctttcttgcttcttgcctgcactgcctggtttcagagcattggcggggggtgggaaaaaatctggaacgatacccgatgattgagccaaagcaagagaaactcatttctttgtaaaactgcacttgacgttgtaacggttttgaacaaaggataggcacactttcagaacactttatctgttgagagtcacggcatgtcattcttccagctcagttttggggtcggtgggggggacaatgatgagatggactgagaagccactgtcctcttctctgacccaggccagggcaaagccccggggagctgaatttatttacatttgactaaatgcaacttcctgtttcccaggggtattaatgagtgtttcactgtggagcttaggcttatggcatagttcagatcataagggacattttgatgaactaagtgcaaataaaacaaaaacacatgcatttgattaaggttaaaatacatatagaagagaatgttaatggtaacaaaaataaccctgggccagactcccacacatctgagtctcacacattccacatccttcccttgggaggcggggagaaggatcacttttcatattagcacaaaagcctcctcccagataatggagccctccccagtccccgcggagtaggtgaccccctccttggagtgatttcaaggctctcaaaggttgctggtccaaaaatatctttctgattgtcttgccatgggtgtcggagacttacatattcaaaattaattgtcgagtttaggtcttttttttttttttttttttttttaaatagagacagggtctcactatattgctcagggtggtcttgaactcctgggctcaagcaatctcctcgcttcggccccccaaagtgctaggattacaggcatgagccaccatgcctggccaagtatttctttccattgttagaatacaaatatgtttccccggaagggatatgcattcatactctcacagttatgaccactttaggagaagcaaggggaatgaatgttcactgagcacctacccattggcaggccatgtgctgtgaggttatcaaaggctacttccatggaggaaatgcgtttcattatccctgtttcagtggtgaagaaactggtgctcagaggggcttagtaagttggccaaggcagcacagctagaaatgtcagagctaggatgaaaaccaaagtcaactggtgtgatttcagggcccagcttgcctgtcctacaggactttatcagattacagcagtttggaaatcccaaaggaagatacatccattgaacccaacaggaaaatggaaaactctgtctttgaaaagaagagaatgtcaatataggaaattgttagattgagcaattttagagtttctggagctgctgctttgatgtcaccaggagttgggcacaggggacggaggggctaagaaccacaaagggggaggcagggaggctggcctaaggggtcaagggaggagccgagttattagagccaggggccaggtcacctagtggagtctagaaccttggagacccatccagtgggagactcagccgctgctgaagccttcatccatggtcaaggggaggtgaggagaaatgcctggcccttctttccatctgccttccaatctcctggcagcatcttccagccagttgaaagggaactgtggaaatagccatataggcagggcagggaaagggagagccatagatctgagtatatgtggctctgggccagccctgagggaccgagacattggaccaaaggaatgggaaatggtgaattaagggtgaactgaaaagaacagcaagagaaggcgggacacggtggctcatgcctgtaatcccagcactttgggactcagaggtaggtggatcacctgaggtcaggagttcaagaccagcctggccaacatagtgaaaccccgtctctactaagaacacaaacattagctgggcatggtggtgggcacctgtcatcccagctacttgggaggctgaggcaggaggatggcttgaacctgggaggtggaggttgtagcgagctgagattgcaccactgcactccagcctgggaggcagacagcatgagactctgtctcaaaggaaaaaaaaaaaaaaagaacagcaagaggaaaacctatggaacaatattacatagaaagagcaggttgttgtcaggatagtggatgacacggtaccctcagcatccaggaatggcctaatggctgctggatgtggggtgggagttgaggggggaaagatgcctcagggatggggggcagtcaacaaactgtgtgcaggagagggagatgtagaagacactcttcagttctagactctccgaagctgctgcttttgatgcctcagggagcagcacacttaaggctggcaaagccttttgtttgtttgctttgaacatttccttccagtctcaatgaaaatgtttgcattaaaaccctggaaggaaaatgcataggaatccattgagccaggtttcaggaaagtcaatggtcttgacatgccacagcaagatgtatcaaagcaaatgggtgttcttggtcacgaacagcagggtgtgaaaggggtggcgggaatggggggaatgttccattggagagagaacattttgcagtgttggtgataatggaggcagcagcaggagggggaagagtctgccgagccaacgtgtatgcacggtcacaggagcagactcatagatgaagccagtgcccgcgcggatgcatgctgaaaagccacgtgaagggtaaatgatctcctgatggaatcctgggtgctggcacggacatgcagcctggtcattgcagcccagggtgatcctgatgagccggcctcaactatttgtccaatcttttgcccagtgcctgaaattaccactagtgaggctggcctgtctgtcccctggaagtccactcacatgtgcatctgacctcagaactgccacttgctggcactaaataaactcattttcattgctttattttgttcatttggcagaatactgaaaggacaggccacaggacagacaggtttcagctggggacgtgactgaggtcacactgtataatagatgctgtcgtgacactcccagggcagaaggcaggctgaggccaccatgagccccagcagaaggggcaaaggatggtgagctggagaaagagatgggaaggtgacctaaggggcctttctgattttgttccttatcattctttcctttgcaaaaaaggcgaaataccacttacatgaaggaaacagaaacaatccaaggctgacattgtaaatatctgtcctaacctccatcttgagccatacttccttgtaacatcttgcagggtattaaaagcgggctctttctcagtgtcgtttgagggctccaggcaatagatggcaactattcccaccctctcccacacgccactcaaggagttaggcctctaagcaggacatgcacaaggggtgtctgagaagcaggtttgaaatccctcaatgacctcacctccaggctgtaggaggagggagagggaaacaaaagaggggtgtggggctcagggaaagagaggtgcctgaaatggcttattggaagagagacatctcttggaccagggaattgcagagataaatccccagagatccccagcaaaaaacccacaaggcaccctgcaaggacaagaggtgggcttaaacacccattagtcccagagaaaaccatggccagcccagccaggcagggtgactcatgcctgtaatcccagcactttgggaggctgaggcaggtggatcccctgaggtcgggagttcaagacgagcctgaccaacatggagaaaccccgtctctaccaaaaatacaaaattagccaggtgtggtggtgcatccctgtaatcccagttactcgggaggctgaggcaggagaatcacttgagcctgggaggcggaggttgcagtgagccgagattgtgccattgcactccagcctgggcaacaagagagaaactccatttcaaaacaaaaacaaacaaacaaaaaacccaaagtccaaggccagcccatgacagctcaggcatgaaagctccctgctaggccctggcctctggtccacttcagccctggacgggtgaagacagcgcagtgagtatcggggaggtgggtggggatgcaggggaaggatttggaggtggagacacacacccatggttcccactgcagccatcacccgaacctgcccccagctgggggatgggagaaaccgtcgctttgatggaagttggtgttgtaattattgtcatgtgaagaagagaagaggagcaataggatgaaattgaaccaaaacacacgcaagaagaaaacatattcttcctaataccctgactcgattattacacattctatgcatgtaacaaaatatcacacgccccccattaatatgtacgtgtattatatatcaatacaaaaatgaaaaatagctgaatcttcaaaaagtacattcttaaaagacttggaaaattcctagagcaggaggggggagtttggaagggaaaccctgtgtttcttcaacattccatctccatcccattacctccccacccagctatagcctaggtaattcatgtcacgtctcattagaggaagctgggactgaggttagacaaacagaaaggctgcctacatccataattttctgtttgaaaactggctggaatttaggccaaacatgaaacccaatatccgtaagaacaggaccaagacatcaagcaacactcctatcaccagacctcacatgcccaggggctgcgagattatctccagctcaccagtgtgggaaagctttctcttggttttacctacggtttgctctgacacagtgcgctgtttgcagtatctgtctttggacagacttttcctcctcctgtgccatttggaagactctaggcagaattgtagctagctagggtgggcagatacatttttccctccctccctcccttccttcctttccttacttcttcctttcttcttccttctttccttccttccttccctccctcccttcctttcatcctttcttatctccttccttcctccctccctcccttccttccttcctccctcccttcctttcttccttccttttcttctgtccttccttctctctctctctttccctccctcccacccttcctttcatcctttcttctcttccctttctccttccttccttcctttcttctttccttccttttcttctgtccctccctccctcccacccttcctttaatcttttcttcccttccctttctccttccttccctccctccctccctcccttccttcctttccttcctttcttccttccttccctccctcccttcctttcatcctttcttcccttcctcttctctccttgcttcctctctttcttcccttcccttttctccttccttccttcctttttctcttcccctcccctcgcctcccctccttccccttcccttccttgactctctcttccttcccttgccttgctggactgcagtctaggcttcatttaatacttgtcctccatgagcagacaggcaaatgagataaaggatgtttagactgaattgtgcagtttgactcctgcttatccttgctgtgggagagggtgtggtgttctaggataagtggtcaactcctcgcttctgccatgacactgcccatgctcttcttgtattctgtaccaagctccatgatactggcttcatccttgtctaaatgaattgtattattttcatttattgcttatgttacatcattcattcaaccattattttattgagtgtctaataaaataaggcaattctcttatacggcatattctattacaggcactattctaaagttttaaaatatataatttagttagttctcatgacactttatcaaataggtactcttattttccctggatgaagacaaaaggactgaggtacagagactgaagtaactcactcagggtcacaatgagaggctccagtgtccattgaccgcctccctcttctgtgtcactacaacggatcaagtgctgagccaagaactggggatgcaagataacttttgcttattggaagagttttcttttgttcctcaaactcagctcctctctgtgatgaggcgtctgtggtgaagtgaaagactgctggccttagccctgagtctgcatgtgaaaatgtcatcacaaggggaagtagacctggccctcttccagggcagggaggaaaacgcagcctgtgctgcatgggaacttcacgtgctaattggacatcccagaatctcactaaatctttatcatagcaagcatcaatcactcaatcttcatcatagcgagcatcagtcatagagaatgtcaagtctgctgaacacctacccaacaggatgaaacaatgtttgtgaaagttctttgtaaacaagacgtgtgcaccttcccttttcttccagtctcaattctgcacacggttttcctgttgtctcatttgccacaacagcctcctgcacttcaccgtctagccatctgcctcttcctgtctgttctgctataaggtccacgtttcatctgcctgaattccttaaaggccatccggcttagccacctattttgagtggtaaacagacttcttcttgaacctttgagagctccctgtttagtagatttcatttgagtaactatgagtacagaattaattcacccaggttaagaccccctatccccatcaaatgaaaatcacacatgacaaaggaagctagaccttatcctcttgcagggcagggaggaaaatgcaccatctgctgcatggaaacctcatgtgaaaatcaggtgtcccaggatctcactcgatctttctggcaaggatctagccatagagaatgtcaaatatgaatgacccatgtggaagatttgtcggtatctgtgtcagaaggccttgccttatggacatcaaggacaaggcccatcagcatccttgcaggctgttcagctcgtcatccacagacagagatcttgctcacaagctgcagatggattttatgcctccacacgaaggtccttcacatctggtcttgatatgatttgtccccaaaagaactccacttgcccttcccagcatgaggccaaatcaggtcatcagtggctatagcctggctaaaggctattctacatggtagtaatggcttattgtgtgtgctattaggagtgatgtcatgcccagggtttgaggaataacgctcctgcaagatggccatgtgattaaacgggtaataagctgacctctgtgaagctggctgtgtagattggctttcaagatcattttgcaaagcccgttttcatgtgctgtcagtcgtggatggattttgataactagcattgatttgccatgtttatgaagtgcagtttcacagggtaaactgtgtaattgcacctggaatggcaatataaataacgtccttatctatggtattgactgcccaggattcgctgaatatatatagcatacctccaaacagagccaatagctgttgactcaatttttactaggcttagctctcaaatttcaggtgtcttaataaggattgggtggcgaatgatcaacttttacatctgtttctaatttccatgcttccttttccaggaggagaaatttaacaagcaattttcttcaacaggggaatagttcatcttggttcaagtaatccctctggtgctgcaaaggacaatggctttctttagggccatcagattcctttcgctcctgtgcccagggacatatcactcccagggtcaactgtccatttgctcatggacatctgggatgagtcacgtggtatattttcccaaagtgaggaaggaagaaaagaaagcatcttgaatctgttagaaagacagtctctttgaagcctcatgtcatgggaatatggtttatgttgaatgtgttctagagtatacccaacatcctgtaaatcaaaacaccaaagtgcaagctgtgaccagaatgggtaaaacacctccagtggacaaatccttagaggtagatgaggatgagtaggggattctaactgctcttgcttgctgggggtactccattctaagaattttaaacctctatggcacgaatgcagttaatagactgttgacatgaaaattacatgagatagcacagttctgtctgtgagaacaagggtggtaagaaatgacattaaggcagctgggtgcagtggctcacatctgtaatcccagcactttggaaggccgaggcaggcagatcagaaggtcagaagatcatagaccatcctggctaacatggtgaaaccccgtctctactaaaaatacaaaaaaaaaaaaaaattagccgggcatggtggcaggcgtctgtagtcccagctactcaggaggctgaggcaggagaatggtgtgaacccgggaggcagaggttgcagtgagccgaggtcgtgccactgcactccagcctgggcgacaatgcaagactccatctcaaaaaaaaaaaaaaaaaaaaaaaaatgacattaaggcaagattctgacttgcatactatagaacaatatattttagatctcattccatgagcaagggggagccattttaagttacttttagggaggaagtgacaccatccaatctgagttttggggacttgattgataaaagatgaatggtagaatgaagaaccaaggtatattggaggccaagagagcaggtacaagattattgcaattgtccaaatgagaaatgattaagtgcagaactaggacattgttcttttacaatttctattctgacagactacaggaaggatggtcctattagtcaaaataaatgcacaggaagaggggaagatttggggagatgataatgagtagctcggggcatgcagagcttctgatgcctgaacattttgacctggaacttaggagaagagtcaagcctgtaaatgcagctctggatttcaacaagagaataccgatcactagataagttattagttaagtgtgagggcagacattcaataacacgcacatttacttctcatgcacctttactggaagatgtctccagcagaagaatgttagaagggaatatgaattccaggaaaaggattgatcacaggagaggtaccaagggagttcccagaataatagaaaagaggatcctcaagaagacagtcacgcaagagaccaagagaagagctaatccaattgatgcaggaggaagtagagcttcagaaagaatgtctcaaaaaagaaaaaaaaagaaaggagtgggttaagtatctgatgaatttaccaaattgagaggagttacatagctctattgaaaatcttagataaaaatgattgataaatacatagaacataaagcaaacactgaaataaggcaattatcaactccaggaaaaacataaagttgtaaaatccaagacatgccatcataatgtataacatttctcagatgtaaataatattttaatattcataataaaactgaattttgatttaagctgtgatgccaatatattcagtagacagagggggaagagacacatgtgtttatagggaaagagactcataagttggcaggaaaggactggagcctgggtttttctttctaagccttctagtactcttcagctttcaaatgttatgaatattgccatgtacacatattattttgataaaaataaaaattaaattataaacagaaggatcaatataaacaggggatttgagccagatcagatggacagtgatggggctgatgcctttgagaacgtgcccatgcaatgtcagtagcagaagtagggctgtggagggtgacctagaaccacaggcctctttctgaaaggacagatttgagtctgatactgggttatttaatccaatgagaaatgtttcaggaaacctgcttgatttcctctgtttctttttttcctttggggtgcgttgtggggctcctcatctatggacctgctgttggaatggctgctgaatgcatagcctccaaggtatgcctcggagagaagcattttaaatcttctgaaacgagatgcagacagacaaaacgaaacaggacaaagacgtcactgagggcactgccaacacttctggagcttgtcctgaagagccattcgtgtgcttggactgatctcccgtcttgtgctcttggcattggtgcaggatcctgcatgtacatttgcaggtgcgagcttgtgcacgcgaacatgtgtgctgcttcctctcacgaacccagcagcatagcagcagccagagacgccccagagtgatgacaactaattatgaaacaccagtctgatctgtcccttttatctcatcttgcagaagccttgcattcccccaaagccccccagtggccctttgtaatcccagaaaagaagtgtcaatatggaaacagctgttcttgagatagtgggatgacagcctaatgagcatgccatcagctatagaggaaacccaaggctaatgggcttctgatgcaaatattctttctagaccatcccactcatatgagaaaggctacagtccccagcaagactgggagaggacacactggcctatagatgtcaagtcttcttttgttcttatttaggtttttagcctctcaaaccccatggggcatcaggcaatctccctgactcctctggaaggtgactggaaaaaaggcagccccaatttttttttttgttttgtttagaggccatgctagggaagccagcaggagcacagggctcctgcaattttggtagcaggagaaacagccacaggttgctgtggttcaggcagggagtgaaggctgtgcttagaaagaacccaaattcccaatcattcaagggggaaaggttagggagaaatagtgggagagagctgtagaggtggaggaaagggggatgatggattgcagcaggcgacttaaaacagatgccttttctaggggcaaggcaagggatgaagagaactgacctaccatgtgcctccttggcatcagacacacccctggacacttgctctatgtcacctcttctgaatcttcaccatgatcctgtaagccgggtagcattagctgcactgtattgataaggaaactgaagctcacaaagacgaaatgcttgccaacaatctcacatctaggaagtggtaccaagctgggattgagacttgagcccatgagactttaaagctccctctcaattttctttggggatgtgtatataggtggggaagctatacagaaaataaaaaaaatctttatataaaagctggggggtccagacatggtggctcacacctgtaataatcctagcactttcggggctgaagcaaaatgtttgcttgaacccagacattcaagacaagcctgggcaatataacaagacctcatctccacaaaaataaaaaaaaaaaataataaaaaaaacagctgggcatggtggcttatacctgtagtcccacctacttgggaggctgaggtgggaggattgtttgagcccaggaggtcgaggctgcagtgagccaacatcatgtcaccacactccagcctgggggatagagggagaccctgactcaaataaatacataaatacaataaaataaaaataaataaataaaaactgggggagggttctgtttccctctgggggagggagagaattttaatctagaggggatactcagagactcctggagtcctcactcacaatatttcatttttaatctgggtggtggttacacagggtgttcatgttgtaaataatcctttagactatccatacatgttttatggacttttgtgcacctcaccgatatcttacaataacaaattacaaacaaaaaagagtccctattatttttgcatccagtgatttcttcagtatatcaccagaacggcatctgaaatgactgtgtcagacaccagagtacaacctggtaagaaatgcatgcaatcatgagatttctgcgtttttttttgcattttattgctcccagcaaaagttaaattttacaataacagtaaaaatatactagttaaaactcaagcgattgatatgtatctattgaggtccttgtatacaatattctaggtgccatggaggttacaaaggtgtccttgccttttggatctcaggatcaccttgaggaggaggcaagacagagacacagaatgagagaattaactaagtgaggtcaacaaataatgagtggtacagagaggaagtgcgacagaaatccacgtgtctaagcttcgcagaggggagagaatttcattgaggcttgaaggatgtatgaacttcagacaggtcaagaggaagcagaattacaagcacaaagacatagtaatgagaagaggctcgctgtcttgcagagactaatgttgaccagtttggagtggggaactcacaatgggaaattataagagataggcttaaaagagaacttgacctccaaaaccttgtgtgatctggcccaaactttgtctagctgcctgaatttgttggaatcacatgatttaatataaacattgcataatgttaaatgtgatttaaatgcttctcaagggagaagcaggggcacaaatgttgctacagagggcaggcaaatgctatgtaaataaggggtaaaaattgagtgtggggaggttgggctagagatgataatggatggaagaactggagaagtgctggctgtgggaggatgagaaggtgagttcaagtgataagtcaaagatgcacactggggctatgaaaagatgggttgtatttagagaaaaggatggagtgtctgaccccattctctttcaaggtggagtgcatcttggagctgggaaaggagacgaaggtggtagaagtgttaggagaggagcctgcgggtaggggaagttaaggagagaatgggaaatgtattaatgactttgtggtattgaaataaaacagttccctgattaattcgtttcctccaatacgaccaaactcacaccaacactttggcatgccacagatcacccccaagagtgactccacagccatcagccaccatccccaccatcccaggcagtggcagccaggcagaggaagtggtccaagaaacctccctgtctgcagttcagtttctactcatacttctcataaagtcatgaccctggccatgaatctcccatccctggaaacccagaaggacgctctcccttctggacgcattcctcctccaggcataacttccaacacgaaggtcagaatgaatgcgagtcgcccagagccccacacccagccctgggaagggcgattccctctgggaattctgccagcacaatgttgcctcaatttgaagacaaattttaaattaataaagaaaaaaaaaagcctcagactctcacgtctgccaaaacacaccattccctgaaaggttcctgaaaaggactcagtgatgtactataaagaaagcgccaaccttccatagccttctccagctgcgagacgcagactggcgggtcctggaaaggtaacagctcacagccgccttcccgggggcagcgcagtgttgttcttggatcgagaagacctttcagctgccttaccacctgtgtatttcacagtcttgcagttccctaaacccctatgaacaacacagaacgaacagacccgtggccaacagaaaaccctgagaaaagtactggaagaaagagtgtggttggtttaagatagaaatgatgtgaaggttgcagtgcgtgccctgcagttttcaaagcctgcatcgctaaaatcatcacaggaatagaagtgtccttgtcagctgctcttttctttagcagagaatctctcaaacagcctcaggccacaaaatcacttcctgaggaactcttggtaactgaatgcctctccaagtagcagggacccacacactggaattctggggacagtgaagttcatgcttctatcctagattcagcatcctctaaaaaaaaaattagcattttgagcaccctccccacttttttttctgggatggtcacttcataaacaaacaaatgtggttcattcagggaatagctactgaagctgctttgatctcttctggcaaatggtttctatttcttcaccctattcattcagatttctgcaagtgacttgattctaaacccacatctctactatttaatctgcatggactattctgtgccactcaggcactgaggaactttacggttttctcccctgaccgcacatgagtaagaataaatcatgtggacttgggaactgcacagttgcagatcagaatgagattccgtaatggggacagggtcccaaggactttcggagtggcaggggagactctcttgcgcctggaataggaaaagcctttacttacaaacacatccatgagcaggtgctccagtgtcagctcaaagtcttccagcttggcagccaaagtcatgatgaatgtcccgatttgctctcagtccccgctgacagatcagatctgcaaactccccagctcaggaaacaccgtcggcgtcaaatttgatcacaaggcagggttgccactaatgggaagtagaaacccttaaaagaaagcagaacatcgcaggctggactgctcgagctgtgtagccagaaactgtacaaggatattttgaaaaaacaaacaccaaactctaataatggtgctatgggatcagaatgggcataaagcgaggccaccagatgaagactgcagccactgccttccctgtgtaacttcacagtccgaggtgctggccaagcgcagagaacctcaccagtgagtgaaagagagaagtgagatggggtgaaagcaagagtggggaaaatggaatagactgtctgactctgatatttatagggccacatgtttttgactctagcccatttctcagttgatttctgacctttcataaatggctaaacacactggagtgtattgtcgaacgggggcagtgggtcccacagaagttggctgtgaccaatgctagggcaattcacacagacacaccatcaatagttctttgtagagaacgtatcagaccttgttttgtacacgatgactgaaaagcacatagtcttgtgaaaaacaaggaaacgaaagttgtgagggtactaaatttttcctcagaatattattagatccctcacactgtctttcttctccatcctatgcaccccctctgctgcaagagtagataaacatcaaggaaaaaatttaatatctcgtgtcaattcctcaagcttctgccagttacagaatatccacgaaatcttgcaaatgcagtttctccttttctgcttccaaagtttgctttttttttttaacttaaaaatgtttggaaattgtggtaaaatatacctcacataaattttgccatcttaactatttttaagtgtactgttccgtagtgttaagtacattcaccttgtacttggttcacattgtactggaataaacaagatagacttgtttatttcatcaatgctcttcctgggatggacaagggatcagactgtggataacagctagtgtttcttatttaaggcagtctgctagtctcaacaatgacatcacatgattattgtctaagaaaaattttggggccttaaggatagtcactattacaccaccatccatctccagaactcttctcattttgcaaaacggaaacactgtgaccattaaacaataactccatttctcccctcccacagctgcctggccatcatcattctacttagtgtctctatcaatttgaccactctagggacctcgtataagtgagatcatatagtgtttgtcctttggtgactggcttatttcacttagtgtaatgtcctcaaggttcacccacggggtagcctgtgtcggactttcttccctttttaaggctgaaatcacgtatcctaagaaagatactgctttggacagtttttcaggcctgagaaaatctctcagggacacgtggctgtcaagacgctaatggccatccttgctgtgactgtagtaacaaaatcagccttcgtctagcaagccagtgcccagttctgtcctcttagttccctaaacactttctgttaaactctggtctcctgattccaaacagagtgtgaccacttaacagccaacattgatgtcaaagaaggtgggcctcatgagatcgagagggaaatataaatataacatttctgctttacagtaaaactcccctccctgcatatcagagctctctcgggtatgaacggttaaaactctccattttagtatctctctgtgaattttcttttcccagaggagatagacacagacttaattcaacatttcacacttaaacaaagctaccataaaattaagggcaaagataaagaaatggacaaaaagcactgtattatttcaaaagcagatttggagtcttgtcagatgagtttagcttgacagtgggtcctaaattgtacatgcatgttcttcgagttatggtttctattttgttttcaggcctctaatggaagaattagagcgggtcccacagcaggtgtctcttgttaggaacggcataggaaggggcgggcagtgctgagatgaatgtcttcaatagccaagaatgcacagaaaatctatttccctgatgggctaactgagctacagaccttcctaggggctcatggttttgccatgtctgaaattgattcaataaccagctgcatcacatcagcaagaaagtctcaacacaagaggacttcttgccacatagttgccatcttttgttaaaactatagctgccctgaaggtcctcaaaaagccaagtgccttctctcaccaagcaagacagcctgatgcccatgaggggccctatcataaggagactagggggagggtatgtatctgcatatgtgcaacattgttctagttttccagcgatctcagaggagtgttcaacatcaaattttctttctttttttaaaagaatttatttttattgtttgtgggtacatagtaggtgtatatatttatgggttacatgagatattttgatccaggcatgcaatgcatcataatcacatcatggaaaatgggggtctccatcccctcaagcatttatccttcgaaaaccaagtcctcttagcccctttccttatgaattaaatttggacaaaatgtttttaatagctggaatttcataagagatatactacttgtttgtttcatcaaccctcttcctgggatggacaagggatcagaccttggagaagagctattgtttccatttaaagcagttgccaagagagagttgagtctcccagtctcaaccatgactttatgtgactattttctaagacaattttttggggggctttaaaaacagtcaatgcggccgggcatggtggctcacgcctataatcccagcactttgggaggccgaggcgggtggacagcctgaccaatatgatgaaaccctgtctctactaaaaatacaaaaattagctgggcttggtggcatgtgcctgtaatcccagctactcgggaggctgagacaggagaattgcttgaacctgggagacagagattgcagtgagccgagatggcgccattgcactccagcctgaacaacaagagctaaactctgtctcaaacaaaaacaaaaacaaaaacaaaacaaaaatcaaacagtcagtgcattggcttctcttagaatgtaaatagcaaacttcagggataagaaattgtacatgatttgggcagagtgtgtggttcttactctagcactggggctctagaagaatgtattcagaacatcctgttcttccaacaaaagtcactttaatagtttccaaaggagagaaattgaccagaagggagttagcctgaagaatgcacaggaaattagtgtatgcggatgtcaccccgaagagacattaatcatgaattcggattttagtgaatgatatgagccacttggagtaactgggtaccagggaggaagtagaaccacaccagtgttaagacagaaaaacttgaagatacattcatacaagcaagttcacgggtgtcagtgcttatcggtatatgagaacatggtgaaggctggcttgggccgatcgattgtggatgttttcttagtaactatattctaactacctgttatatatttttttgataattatggggacattttattaatacttatatcaaatgtgaacattcatttgttcattcattaatgcaccctttggacaaatgtttatttactaactggggtatatactggcataggtgctggtgcctacaaagatgattaagatattgtttcttcttcaagaccttacagactagaaaagaggaggcctgatgtgattgaagtaatcttacattattttttcttgggaaatatgaatgtagagcgtaactccttatcaggggactcactctgggacttggggatgagggagagtcactgacaaagggggagaagaggctgttgccctacctaagaaacattaactgttctccatgctctgatcccttgtccaccccaggaggaaggttgatgaaataaacatatctcttatgaaaatccagatattaaaaacattttgtccaaatttaattcataaggaaagggactaacaaaacttgcttttcaaaggataaatgcttgaggggatggagacccccattttccacagtgtgattatgacacattgcacgcttgtatcgatatccatactcccaccctgtgggaagggcaatgagtgagaatgagggaggtatgtagtacacctcctgaggttgggatttgcagcactaagtggcagggacatcagggcagtgatggatcctagggttgagcccagggatcattgggtttgaagagttgacagccaaggtctcaatgctgacagcacaggatcctgctactatttatagacatttctttgatggtgtaaatttctgttggaaaaaaatccactttaaccgttgatcaaagcttggtggccacctaagaatgatctgacatgaaccatcctgctggggctggccggttgagaataattaatcagtgacacactctatacggtaggcaaacaccggaatttgttctgtgcatttaaataacaacacttgtgggtatgtttttaaattcagaaccgttaaatttctttctctttgaacctcagatgatcatctctttctcccatttctatgaaacatctcctccagcgggcttaacgttttagtggtaagattcaaataaaatagaagtctcggtggtggggtgggaattggctgaattatttgtaaaggcatgaagctggtctctccttagtccttctccctagggaaacggtgggcagatcgttcttctagagagagtattatagatttctgcagccctgaaaatgaatcatctgcttcaaacgcatgagtgctccgcaaaagtgaggttcttgcctcaactagattaattcagttcatatcaaccaatctctattaaggacaaccacgtgtaagcccaaagcagtaggcaattgcatatacaaaatgtgttccttgaaccattttcctgtctaacctagagcagtggttttctattcagcaagatcacatatttgaagatcaggtttgggcaggtgatcagaccaccacacagtggatcagaatcagtcagtaagacacattagttacctattttcatgcctgggtcagtaaacctaagtagaagtttaatccaattattaaataagtactgagatacttttaaagagcaaaaccactggcttttattttgatcacccaattagtcccacagatccagtttacatgaaaaaaaaaaaaaaaactacatgtttgtttttaatcgtttttgagttgatttttgtatatggtataaaataaaggtccagtttcattattctgcgttgtggatatccagtttttacaacaccatttattgaagagattgtctttttcccaaacctggaggatattacgctaagtgaaaaatgtcagacacagaaagacacatatactgcatcatctcacttctaggtagaaggctaaaatagccagactcacagaggaacagggtagaatgtggtttccaggagctggaggagggggaaatggggagatgttggtcaaggggtacaaagtttcagttacgcaggaggaataagttctgggcacccaatgcacagcgatgtgactgagttaacaatgctgtactgtctacttgaaatttgctgagaggatagatcttaagtgttctcatcataaaatgttttttagaaaaagaaagcaaaaaagaaaatggcaactatatgaggtgatagatacattaattagcttgatcctggtgattatttcacaatgtatacctgcataggaacattacatcatacaccttaaatacatacaatttttgtccgtgatatctccataaagatggaaaagaaaactctcaatgatatgtgtaagagcaactgatattaatgtcctaatgacatacttgtctatcaagcttctgccttaccttcaaactacaaagagagaggattttaaagattgtttgtttgtttaagtaaaacaagcccttttgatggccatatagacaacaagctgcctgtctgggtctagttaaaggctggcctgtctgctccagctatctcttggagaacagacatgttaatttaaaggtttgcttctatagggcccctggcagcctggcactggcctgggatcaggcagtggttctcagaagactacactcttagcatctgcccttattcttccatgtttgtgtagatggcttacacaaccaaccttgtctttcccactcaggatgcattttccattttgacagcctctccaatgagtacaaagcctctattcctctgcatccatctccagccccaccgcagtccctggctcatgcacccacaacccctgaccagtcacaaggatgaatttcaagactttcaaaactcagaagcagggaaatgagtgtcaggcacacccaggagtaccctgaacttatgatggggtgaaacataataactcatcttttctcagtcttgccatctgtcacttactgtaccatttggagtcaaagaggcttgcagggattccgaggtcgccaccagaagtgtgcaactggaatgtgccaggaatgatcgcctgggcttcaccacgtggactttctaaggcatttgtttgctagggttcaaatacacattgtggagacactaatctttactgcatcctcctgaatcttttatagacatttttttttttttttgagatggagtttcactcttgttgcctaggctggagtgcaatggcacaatctcggctcactgcaacctccgcctcccgggttcaagtgattctcctgccttagcctcctgagtagctgagaatacaggcgccaaccaccatgcctggctaatttttgtatttttagtagagatgggggttcaccatgttggtcaggctggtcttgaactcctggcctcaggtgatccacctgcctcggcctcccgaagtgctgggattttaggcacacccagccttacagatgttttttaatggctctttcccatctgtaacagacacacaggatttaaagatttccatgccttccggagttgtttagagaaccaaggcatgagctctaggcgaagctcttagagctggtctgaaatgagaagctgtggaataggagctggagctatgtgacgactactaccattgcatgttctgcactttggacaactttgagtggggcattttgctcattaatgtcattgccaaatccaggaagtctgctggttgtaaaacaatcttgaggaagaaccaccatccatttcacccaactctgacttagattttttttttttcttcccccattgcctttcccatgggccttagaatgatcaatgatgtttaatccctttagagtcagcggccttggttctaagaaatattctaagtttttaattttttgagatggggtctttctatgttgcccaggctgaccctgaactcccagactcaagcaatcctcaggcctcagcctcttgagtagctgggacttcacgcattctaccactgctggctctaacaagtatttaaaaatactcccttactgtcctcaaataaaattcatggatcgtgcaacctgcttacacatattattgaaaaaaattagcacaattctctgttatgtaaacaaaagatagtaggaaagtaatctgtcagcaaataacatatattacaatatgtaaatgtttgcagataatgcaactacaaccagaaatcatgaagaagtgatcgatttcttaattactgtgaggccagaactccaaatgctaattgccaaatgtctgtcatgttggagactcaaatgccactggggtattgccattagtgaagcgcttttcctgaaacatgaatagttcttggtgaacttccggctaaaacaaagcattatcaccccttgacttgcaggagagttgtacttgggagagtctgtaaacggtgaaccgcaagtagcgctatccacacccgcgacccctccctcactgttgctgcctgggaactacgttgccaccacttccagtgaaggccaccagggggcgccagcaagggggagctgctggcggacaccaccctaagacgcccaccctttggtggatgcggtgttctgtgccgtgtccaccatcacccctcagacaccagcatggcatcccctcaccccatctgttgctaggagccagcatccctggactgcactagtgataaaaggcgggggacatcctgcaggaaggaaatggggctgagtgtgtttgtgtctttgagcaggagacggtggtggtgggaaatcatgcacagtctgtttcccagtcttggtaactttgcctggtattgccagatatacccaagagcaattcaagtggctgcagtagtcaccaggtaggtctggaacgaaactgaatatctgcgaggctccactacgttcttttaagataattgtattggctgggcgcggtggctcacgcctataatcccagcactttgggatgctgaggtgggcggatcacctgaggtcaggagttcgagatcagcctggccaacatggtgaaaccctgtctctactaaaaatacaaaaattagccgggcgtggtggcacatgcttgtaatcccagctactcaggaggctgaggcaggagaatcgcttgagcctgggaggtggaggttgcagttagcctagattgtgccactgcactccagactggccaacagagcgagactgtgtctcaaaaaaaaaaaaaaaattattttagattcagggcacatgtgcttgttacatggatattattaatacatgcttattggtggagtgtgggcttctagtgtgaccatcacccaaatattgagcattgtacccaatagctaatgtcaaggaaccaacctaagtgtccaccaatggctgattggataaagaaaatgtgataggccgggcatggtggctcatgcctgtaatctcagcaatttgagaggctgaggcgagtggatcacttgagctcagaagttcaagaccagcctggccaacaaggcgaaaccccatctctactaaaaatacaaaaattagctgggcatggtggcatgtgcctgtaatcccagttacgtgggaggctgaggcaggagaatctcttgaacccaggaggtggaggttgcagtgagccgagatcgtgtcattgccctccagcctgagcaacatagcaaaactcagaaagagagagagagagagagagacagagagagaaagaaaagaaagaaaaaaaagaaaagaaaagaaaaaagaaaagaaaagaagttaggaaggaagggagaaaatgtgatatatagacaccatggaatgctacacagccctaaaaaagaataaaatcacctcatttgcagcaacatgcatggagcttgaggcattcatcctaagtgaactaacttagaagcagaaaatcaaatatcgcatgttctcacttataagtgggagctaaacacgggtccactatgttgttgagacactacattccccaatagcaagagctatctgttataacttggacatttttctatttggtccctagggtcccccactaaggacatgcttgggaggtcatggcactgtgtaccctgcctttccctagatgttcattaagcgcatttgttgcattgtgcatatccttgcctgctccctaggctgtggaggagctatcggtacccagctggttgtctgtggcaggctggtagcaggtgagggcaggtctcggggttccgagtgatgagaatccagagacgcacgtccctgactattgctggatccttgagcagacagggccctctgttacccacactcgagttccagaacttagaagaagagttccaagaacagctggctgtggaacagccatgggaggatgtctcttgccctttaagcttccatgaggtgaatatatacagtgtccatccctgagaaaaatgaagcttccacaagacaacagataaatattttcaggagaaaatgaaatattttcatgagagatgatcagatctgatcctgggccttgggtgggtgggtctctacctgcactttacaaccctaatcaataaataacctgagctccttgttcagcttacaagtccttggtccagtttagctcaaagagagacggatgtccagtgacctaaatttatcttacaatggcagtgctgtgcctgacaccaggttcatgcatcttcacacaggccgtccctagaagagaaaaggatgcctcccctcattggctttctaatattactgcaacaactacaaccttggggacaatttcctggtgggaggacatgcccaataatgcaggtgcatagtggaacactggcatcacttagttggtgacttgaggacctcagtctccctgggttcagtttcctcatgtgtcaaattcccagcttaactagatgagggtttccagactttgagtaatatgaaacagtacaatctgaaaatgaaattaaataccggggggaccaacctatagggttgtcagtatcttatatgctacgttagggaattaaaaacaaaatagactgggcacggtggctcacacctataatcccagcactttgggaggctgaggcgggtggatcgcctgaggtcaggagtttgagaccaccctggccaacaaggtgaaaccctgtttctcctaaaaatacaaaattagctgggcgtggtagcaggcatctgtaatcccaggtactcaggaggctgaggcgggaggactgcatgaatccgtgaggctgaggttgcagtgagccaagatcacgccattacactccagcctgggcaacaaagcaagactccatctcaaaaacaaacaaataaacaaaaaaaaaaaaagaagaaaaaaatgaaacaagccaaatataatctgctgtctccatgattttattaaagaaaagacattttaacacacactgaaaacaggagagataaaaatattgggttttaaagtggataaatttagcttgatagaaaaatccttctgttgtctgtatttttctcctgggctgcgtacccacgaggattttattataacggagatcaggaaagggcatctgggaccagagcacaagaggatcccagcctcgatccagctgtatttttatctctagtttttaatctccagtttttatctctagtttttaatacagcctcacactgttcctatgaaatagactaaagatatgcaagaaacacactagtaagcgaatctctggaaacagaatcctccaccttcctttccatgtgttttgcttctctgaccatctcaatgccaaaatacaaaaattagccaggcgtggtggttggcgcctgtaatcccagctacttgggaggctgaggcaggagaatcacttgaacctgggaggcggaggttgcagtgagccgacatcgtgccattgcactccagcatgggcaacaagagtgaaactccacctcaaaaaaaaaaaaaaaaaagtctataaaagattcaggaggatgcagtaaggattagtgtctccacaatgtgcatttgaaccctagaaaacaagtgccttagaaagtccacgtggtgaagcccaggcgatcattcctggcacattccaattgcacacttctggtggtgacctcggaatccttgtaagcctctgactccaaatggtacagtaagtgaaagatggcaagactgagaaaagatgagttattatgtttcgccccatcattagttcagggtactcctgggtgtgcctgacactcatttccctgcttgtgagttttgaaagtcttgaaactcacagcagagaacatcagcaagacggaaagggaaagctggaaagataaacaccccgccttcctgttcggagtctgcagaaaagggacaaagccaggccaaggggagcggagtatagtgatgcttgtttcacttcttaacccggattgcttgcatttgtactttctgggtgatgctacccacttcctaccatgacggaatcactgatttttacctcttctctaagcacatgcttgagagggagcaactcaagtttttgggatggagtcttgctctgttgcccaggctggagcacagtagacaggctcaagcaattcacctccctcagcctcccgagtagctggaattacaggctattgaccattatactcgtctaatttttttgtatttttagtagagatggggtttcgccaggttggccagactggtctcgaactcctgacctcaagtgatctacccgcctcagcctcccaaagtggcaagaatacaggcatgctccaccgtgcccagttgggagcaacccaattcttaccctcaaaactgaaaagctctgcttttgaaactcttttgttactattttttgagtaggtaatatatgcagatgatacaaaattcaaaattaacaagggagcagaaacaaaaagttaatttctcttatacctctgacctacagccacccagttctcactagtggcaaccacttttacatgcttcttgagatattctaatcagattcaggcataaaatgttaccattggtgattatatatacacacacacatatgcacgtgtccacacacaaacacacaaatagaacatactttacaactataaattgtacttcactgtccggatctggaatatttcctttttctttactttttttgaaacagtctcgttctgtcatccaggctggagggcagtacactctgcctccagggctcaagcgattctcctgcctcagcctcctgagcagctgggattacagatgggcaccaccatgtccacctaatttttgtatttttagtagagacgggggtttgccatgttggccaggctggtcttgaactcctgacctcatgtgatccacccaccttagcctctcaaagtgctgggattacaggtgtgagccacctagcccggaacatttcattaaatcagtcttctattgatggatatttgaatatgtcactaattcaatgtgaaaatgtttttgtacatctgtcaatgtatctctaaggtagacttctaggagtagaattgttggctcaaaagtcatgtgtatttaaaaaaaaaattagacattgtcaattttgctccccatggaggttataccaatttatatccccagtatagagagtgtctgactccctccactcttatgttacagtgagggtgtgtaccataaaactttcaaatcttgggcactgtgatgggtaaaaaatggcatctcatttttatttcaattgataatctcctttcataagccaaaatgctgtttcacaaaatttccccaagaccaattcccttttttaaaccaagctttcattgatccaaatggatccagttttgtctcataaacatcccaataatggacacaagctaataattaagagaaacatgttagaaccatctactcactgaagtccacatttaaaggcaatttaaggccggtcgcggtggctcacgccagtaatcccagcattttgggaggccgaggcgggtggatcacgaagtcaggagatcgagaccatcctggctaacacagtgaaaccccgtctctaataaaaatacaaaaaaattagctgggcgaggtggcgggcgcctgtagtcccagcttctcgggaggctgaggcaggagaatggcatgaacccgggcggcggagcttgcagtgagccaagatcgcaccactgcactccagcctgggcgacaaagcgagactccgtctcaaaataaataaataaataaataaaaataaaataaaggcaatttacaagaatctttattaatggctcccttatgtatctctgtattgtatatgccacgcatacctgttagaggagatgaaaattaaaatgacgctaagcaaaaacaaagggcaattcatccaaatattcctcttagtccaatttctccttagccttgaaaagagataggcaagcccccaaaagattgaatcttgaaagactcaagaccatgacacctgatcagatgtcgactgcataaaattgataacatttgtcagctactcacgctcaaatctaccaagctcagaaactaatctcatagacgatcagcagggcaggcaataaaggtcctcagaatttccattgtgtacgaagatatgcgagagcatcaactaccccaagtaaggctgaaggttccccggtgactttagtgagctaaaacttgttacccacgacttttatcagtcaagctgaccccagcacctcactaaatgtctgattggcgcctctgttactctcctgcgaatctgattaggtttctatgtattctcaaggtcactagctgtgtttggacaaaacgataataatatcaaccttcaggacaccatttcttgagcatttttgaaagggccagtgtggacaccgttaatttctcaggcaaataagaaaatcattatagaacagcagccaaagaacttgaataaattaattaacatattcaatatttaccgagcttgttgctttctattgaatttgtattgtggttgtagtgatttttgtcatgtactgcaagcatcgggctattgatactgtggctgaaatgcttagactcatgaattgttagctatgttttagaatatgagttgtacttagactatttaattgtatcgttatttaattatatccttttgcttacaatagggtagatgccatatatactatatcaaaggtttttcacatctaaaaatttgcatttctaattgctaagtaagatctttttcttgctcactttctgatctgtccgtccgtccatccatccatccatccatccatccatccatccatccatctatctatctatctatctatctatattggaaccccaaaatcaatcaatctatctatctatctatctatctatctatctatctatctatctatctatctatctatctatctatcatcttggaaccccaaaatcactaagctaaagggaaaaatcaagctgggaatggcttaggctaaacctgccttccattctattcaaagtcatccctctgctcactgagataaatgcatatctgatttcttccttaggaaaggctggtcagaaactcaaaagaatgcaaccatttgtctcttatctacctatgacctgtgaaccctcttcctcactttgagttgtcctggctttctggcctgaaccaatgtgcatcttacatatactgattgataacaccaagctgtacccaaccaccttgggcgcatgtcgtcaggacctcgtgaggctgtgtcacggccgtgcatccttaactttggcaaaataaatttcctaaattgagacctgtctcagatatttggggttcatatatgtatgtatgtgagtatgtatgtatgtatctatccatttatctgtcatctcatctaatctttgctttgtgctaggcactgttccaagtgccttagaaatatgaacttacttaatcctcacaacagcccatatggtgcttaattatttttaccatccttgttttacagatggagaaactcaggaacagagaggttaagtcactggctcagagtcacacagccagtcgaatgacagagcctgaataggaatgcaagcctctggctccggggtcagtgataatcactgctacactgggcttgtgtgtgtacaacattctaatttttgtgaacagtcacttgctccctgtcaccgagagaaaatccttcttctgttgaatgaaacagagaaagttcttgtggggaagcaaagctgggtaagaagtgtgtgtagcagggctgtaggggtggtttctggaaaatgtttggtattcatttacaagataatcttaatagcatctccattgtgtaatggagagactcaataatggtactgaaggaatttagctgaagttaatgttcttgcaaaaaaacagagaatgatgcaattctttaactctgggaggagtgtaacattcatctgagactaactgcattttggagataaaggaacaggccccagggactttggccttacttggcctgtttgctgaaggccatgcatggtgcctgcgaccagaatctagactttccacctgcagttagggttctccttcttatttacttcttattaacaggatgagtactcctcagaaaccatagactgtctcagtttctccttccctctctgcaaatgtgttctccagaggaaataagacggagacgccagcttaggcctgcagtggatacagtggttttggcttcatgtacacaggtgttccatttaatgaggtgttgaagggaaggtggttgaaaaagaaatatacagggtgtgagaagaaggaaggcaaaacgtctattacccacaagcccagagaaatctatttctccaggctgcaaagtagcaagtgccaggattttggagtggaataactgctctacttcctcttaatcaaaggaattatataactcccctgagagaaagcaaaatgacttattttatcataatgaagcttttaaaatggcaacttgcagtactttgaaaaagtcgtagagtatatggggttatactcgtttcttcttctttgttttgttttttagttttcttgctgaaattggacaatcagagcacatgtcaaacacttctgctttcttcaaagaaaacagagctctttctgtgcctcaaattcttctgagctgcttttaagggagtctaacttggttccttatctcttttttcaaaaggcgtttctcatgacattcttcaaaaagctttgctttgttgtagtttccaatatttcaacatttttattttacagcttaacttgtcatcatgaaaattctgactaatgtccttttgtctgtttacaaattagtttcattttctgccaccaaaagggaaacatactgtgatctccatacttgagctattttgtcaaacaagagttaaaatcaggaaacgtttacaaataagttctgcgtctaggcgtatacccaaaacagatgagtccatatgagccccaaaaggcgtgaccagggattttcatagcaggactattcataacagctccaaaatgaaaatgatccaaatgttcatcagaggtagaacaaataaatgtgtagtctacgcataaggtagaatcgtataatgggataaaatatagcaatgaaaaggaatggaccactgttgagttcaacagcatggatcaatcttataagtatttttgagtaaaagaagctagacacaaacaaatatgaattgtgtctttatgtttatataaggttcaaaaacagagaaaactcaactatgctggtagaagtcagaacaggggctatgtttgtggagggagggagacagtgactgaaacgagcacagggagcttgcagggtgctggtgatgctctactgcaagatccttattccagtaggttcactttgtgaaaagtaaagtagaggtttctcttcaaaaattttcctccccgtctaattaggaataaacagaaacttctctcagaagcaaaatgtattcaaagacctgtgctaacatttttaaatgtctgctagccgtaataaagaaatcgatgtactttatgttcttagctcccaccatgtagcctaaatatttgccctggcacgcttatactggtccaagcaagcattaggtcatagcctgttcctcttccttatttgaagttgtttttacctttctcagtattccacaagttacttcctccttcctttgttctcctctgcctttgcctcttttaaaaagttctaagttacaggccaatcaggacaaatacagaatgtgaggtcccgctccagccaatagaaaccagacacagcagtaaagtggacgcgtcaagttataaataacgctggctcctttgttcagtgtactcttgtggcaaaactgctggcgaatgtaccctttctgcagaaagtataaaaatggccttgctgaggaaattaaatttatgttcaagtgctttttcttcacggcaccgaagaacaggcatttcaaacaactttgtgggtatttacgaaggtgtacttgtgatttgtgctctttcctgagcacaggttatacttagataagaaatttatttgaaaacaggccggcgcagtggctcatgcctgtaatcccagcactttgggaggtcgagatgggtggatcattcgaggtcaggagtttgagaccagcctggccaatatggtgacactgcacctctactaaaaatacaaaaaaaattaggtgggcgtggtagtgcaaacctgtaatcctagctactcgggacgctgtaagccaagatcgtaccactgcactccagcctgggtgatagagcaagactccatctcaaaaaaaaaaaaaaaaaaaaaaaaagaaattcatttcgaaacaaaactcagtactgaattctccctggtgcagaaagagaaaatcaacctgtacaatcctcatgacaaaaatctatatattttcatcagacacttagaaaatgttcagatcttccaggtgtagagatgggagaggagagagagaaaaaattttttaaagcatccttttacttccagaaggttaccatgttatctatgtgttgacaaaaacattttcttcaccaaaaagtgtgcacatttaacattaaagttgctgagaattcaatacaaatatatttctgagggatttttttatgagaaattctagccatatgtcccatgttagttctgaaggaattctaaaatttgatgtgtgttgtgtggatataaaggtgatactcaaaggaaatgtctgagaatgtgtatttatattttataacaagattaaatcacatgatttatccacaaattttttttccttcctttaccaatttcactccctgcccactgatttcttgaattctcccatttcatctcctctattcctctctgatgtgcagttgaggtatttgtcaaaattctcccttctcccctctcctgtcctctcactgtctggaaacttgtccactctgatgaggatttctctgtttcctttggctggatgatttctcactccccagcacctgctctaacttctgtccatcactccagcctcgactgcacagctgcctggacaggcacagacaacgacgccatccatcagcattacaatagaagacacaaaatcaaattgacttctcatcaaactagctgcagctttccactgccttacctaggttagtggtaccatcattcaactaggtgtccggtcccagatctctgggtcatcttttttttttcttaagacaaggtcttgccctctcgcccagactgcagtgaagtggtgcaatcacagctcactataacttcgaactgtgggactcaagcattcttcctacttcattctcctgaatagctgggactacaggcacatgccaccatgcctggctatttattaaaacttatttgtagagatggggtcccactgtgttgcccaggctggtctccagttcctgtcctcaagtgatccttctgccttaaactccctaggtgctgggattacaggtatgaaccactgtgtcctgccctttgggtcatctttaacgtctctgctctccaatttcaaatcagttgtccaacccagttgattctaccttttacattctctttcctgtcgcccctttacttcccacagtgttgttactgttgtttgagctctattgttttagccgtgtggctctttgctgatctctctattgccatcttttccttctctaattctttctgcatttggctgcttcactatttagaatagtggctccctgacccccattcctgtctggtaaaacctatgaatgtgaccttatttggaaataggttctttgtacatgtcaagttaacatgagatcatcctggattagggtgggccctaagtccaatatgactagcccttctacgaagagtgaatttggacacagacacatagaaagaacaccatatgaggacagaggcacattggaagaggcatctagaagcccaggaatgccaaggactgctggcaagcagcaggagctgggagagggcacagaacagatttctcctgagccttcagaggcagtggggctctgctgaggcctcaatttcatacttctagacttgggcactgtggaagaacagatttctgttgttttaagccagccagtttgtgacattttgttatgggaggcttaagaaagtaatacagctaccaccataaccttcatagaacattgttttcaaccacaacactgctctgctgaagaatatccaatgcctatctctcgtctaccagattgaattcagcgatacctttgccagtcaggctacattctctggcccctttttctttttcttgagatagggtctcactgtgtcacccaggctggaatgctgtggtgagcagcctcaaactcctggcctcaagtaatcttcccacctcagcctcccgagtagctgggactacaggcacccaccaccgtgcccagctaattttgcttatttttgtagtgacagggcctatctatgttgccctggctggtcttgaactcctggactcgaatgatcctcctaaactgctgggattagaagagtgagccactatgcctggccattccctggtccttctgccatcatgacttcatgtgacttacactgtagcctagcaaaactgcttgctcctccttcagcacacctttgcctttccacctggtgtgcaacatctggtgtgttctcactttgacctcttcccactaacactgtaccgctttttcaaggtgttcagatgccactgtcttcatgaagctttccctaggttcagcaaggtgtgggtactcgctctcttaatgtccactgctgacatgtctattacgcacacactttgccccctttcatggtgagttatatactttaaacacatttattataaaacatttaagatataaccataaatatgtatcgttattgaataatatgtatgtgaatacatattactattacatatttttatatacaataaaatatattactataattatgtataagatgatatacaataattataatcacattcttatgatataattatgtcatatttatattatattatatatgatataattatattataatatttatcatattatattagatataattgtctaccagacatatataatgtaaagtataatatatatctataatcatattatatatgatataattatatagaatagatatgtattatatataattgcctacaaatatatatatcacatataattatatatcatattatatatggtataattatgatagtaaaactatattataattatcatatttaatgtattaatacatattcaattttatacatatgtattcatattattcaatacatacatattattcaatgttatacatatgtattcatattatacatattacatattatcaatatgtatgtattgaaaagtatatttcaatgatcaaatgtactaaaacagaatttatttaaataaatacatttgattattgaaatatactttcacattttactaatcaaatacaataggccttttgggaccatcagctttgatatattctatcatgctcacaaattctgactcactttcctcaacatttgttaaatgatttgttaaaataattcaagtacttatttaaaacacaattggaccttacagtcactactgctctagtgatttacagtgataaggagttgtgacacttttctctatataaaacctagagctgaaagtttgttaatgtaataaaaggagccactattttcttcttttccactcatgtatatgctgtaggaatgttctataatataaaaaaccatacggcaagatacaaagctgttccacaactaatattttgaaaactcatttccaggtcaactgagcccaaaatgcctaatttgatgacattttaagaaaatgaaaggtagaattattttaatattcttaatgccaaggtagaggtaattttcaactctactgttttgctggtgatcttatccctggttgcagcctttctggttcctgacttaatagagaaaatcatttctgtttgttcagaatgatgatcaaacccctgacgtgatggtgctcacggctgtaatgctttgatggacagggatttagtgttctgcctggctttgccctggagcagcctgaagactgggtaaggaaatggttttgtggctgctctgatgaggaaaatctaagttaatccacacatgaggatataaaattcccatccagtgctaactcccaccattgtgaggcatgggagtcgctggtccctcctagggctggtcgctggacatcatctggacaaaagaaagggcagagtctttatcatgtgtggagttacatcctggggccatgttgtccacagtcctgatttgtcagaagatggggtgctcaggcctccacctccaatataactctcagaatgtgaaagaatgactctctgtgaggcatggggacaattttgatgactcttgtgccacgatggcaattccatgaaatagattcattgagtaaagaatagactgtgatggaaattcaccaatgcaaattgcttcattttaccgtctctatcctttggaattttgcttttattgatggtcttgcttggtggaaaagaagaaccaagaaggttacgtgggtgtgatattgcccacggtacctgatgtgctctggttttaatcggctggtacctcacagtgaatctcccaaacagtaacacggttgctatggtctgggtatgaaaggaaggtgcaagaaaggtcctcagaggcctgcctactggtatgtgatccacacacatttccatcattttcagtcatttaagaggccagaggctgatggaggattgataggatctctaggcaatctttaatctgtacaatctttaatgctcaccagctgattatcagctgatggggaagataacttacatattcttgtaaatttctctcctcctcctgttcccagaacccaaagaagagccccattgtactagtcctcaataatccaggaaacaaaactgactgtagactgaaaagtgaaacttcacgtctgcaaagtacttttcatcttagaaatactttcttttgagggacttccaagtccaggaagtatgggagaatggaaccctttggggttttaaccccagtgagtggcaaagcggtgacttggaataggaggaggccctggaattattcagagtggagtcagaattgtgtcattgcgcttcccagctgcagggcctgtgtagactattgaagttaggtcttggctttcttcaccaccaaatagggacaatttccactgcatagagccatttctaccatttaacaacaaatgtataaggcatttagcgcacagcccagcacatagtcactcaataaaaaatagatatcattgtctgttttgttaatcagtaagaacccaagacaaggtgggaggcggtagagatcttgtggaggagaagaaagggtggaaataaaggcggttgctctgagctaggctaaagaaggcagcaccgtaccaagatatcactaggactgattccactgccctgaagatcccagccagtgacaggacccggagtggtccccatggatagtcaagccagagcacacgactgctgggactggaatggatttggaccgggaagcaggaactttgcaaaatctggccagcaaactttgtaactgcctatttgcttcattttcctcttaatagcacgtcgtctcattttgtgggactgattttttgggaactccccactacattacaacattatgccagaatttcacagtagtaaaaacaataatttttgtaaacagaatagggctcttcctagtcatcactaagacatgccttaagtttgctgagaaatatggtgggtgggccgggtgtggtggctcatgcctgtaatcacagcattttgagaggcgaaggcaggcggatcacttgaggtcaggagtacaagaccagcctggccaacatggtgaaaccctgtctctactaaaaatacaaaaattagccaggcgtggtgtcaggcacctgtagtcccagctacttgggaggctgaggcaggataatcgcttgaacctgggaagcggaggttgcagtgagctgagatcgcaccaccgcactccagcctgggtgacagagcgagactcttgtctcaaataaaatagaatagattagaatagaatagaatagaatagaatagaatagaatagaatagaatagaatagaatagaatagaatagaatagaatagaaaataaaatgaaatatggtgggagtaggatgggcctgtaacaacaaagtgtcttattggcaaaatgtggaaaacccacgtgtagcacaaaaagcaggatgcttggaaggattgcagccaccagagttctgtgttcaggaactccagaggcttggagaatcatgtaataagaagttgagaagtaagtcactgtgggaaaaaagtcttggctgtgtctactgctgtactcctgatctagggatgtggcctgttcagttcattacagaaccaggataagagcagctgagacttttctcatacctttttcagataaaaatgaagatggtaataaacagagcaattaaaccgattataattacatatgcacagtggggatttgggggatgaggagatcattgtccatgtaagtaattaatggtgaggcatagaatttcgcactaggtggggttttccaaacaggttgagaacaggaagtcaggagcaatgcactggcaagtattcaagatctttagggaccagaggtggactccgaccttttaaaaactggaattccccacagtttgggtttcagtgtattaggaaagaggtcagcccaactgtgtccttccatagctgcataattcataatgtcgtaaagtaaatatttttttcctctcaaatttcctcagaggcagttggattttatccgtttcagagttgagtcttactgtggaaagatttgattaaaatgaggaaaacggtcaggagtttgagaccagcctggccaccatggcaaaaccctgtctctactaaaaatacaaaaattagccaggcatggtggcgctcgcctagaatcgcagctacctgggaggctgaggcaggagaatcgcttgaaccgtggaggcagaggttgcagtgagccaagatcatgccactgcactccagcctgggcaacagagtgagactccatctcaaataaaacaaaataaaataaaataaggaaaattttggcttttacgcgttgactgtctttttgcagttgtctgatcctgcacacttgccgcacttccgtctagttcatattctcacgtcgacaatatttactgagcacctacgacacggaggcaagagctgcctttgactgtaggctttggcaccatcacttacacactgcatgatgttaggcagtttcctacctttgctatgcctccgttttttccatctataaaatggggctaatgacattcttctcactgagttatcgtgaggattaaatgaattaatacacataaagcactcaggacagtgcctggtagaaagcaaagacacattaagcagtgactgctctcactcaccaaactgtttccctgtgccaggtgctgctgtcctgaggactttcagtgaattaactcatttaattaggacaggaccctgtgaggtaggtatgattattaccccattttgcagatggtaaaactgaggcttagagctggaaagtgatgctctggttattgtaaagactaatagagatgatgaaagacctaataaaatacaaattaccattgtggtataataaaaaataaatatttggtctctgtacccagttcctggtacagggctcctgtcttctgtatgctagtaagattggctcataagatcgttaagggaggctccaggtagcttgggggtgggggctggtcaccagaaggaccaagatgtaattagagggttgggagtttcaatcccactccctgacctccagggagggcagggggcctacggattgaatccatcactcatggccaatgatttaaccaaccacgcctatgtaatgaaactccaataaaacccctaatggacaggctttggagagcttccaagtgggtgaacccatggaggtccttgcaagggggtgtacccagaaagggcctagcagctccacgccctcccgcatgccctgcccagtgcacctcttccatttggctgcttctttataataaactggtaaacataagcaaagcctttccctgagttctgcaagtcattctagcaaatgactgaaactgaggaggggatgtgggaccccctaatttattgccattttgaagtacaggaggcccaggcttgccactggcagtcttgtgtcctgagccctttacttgggggatctgacactgattccagatagaaggtgtcaggattgcaaaggcattgttggacacccggctggtgtcagagaattgtagaatcgggaagtatttaatagcctaaccaaaatgcagtatctagcctttcgatgctctctttctctgtgctttaactgattttttatcttttccaccttggggcagcctctccttaccgagtatcacaccctgtcccttctctgaagctacactcccaggtcatgcttatatgctcagccacaggaatattccaaccgtatctctaatgttcatcctggggtttagatctatcttagcattcttgagagtatctatggcacagccctgccaggtgtcctgaaaataattccaaaggaggagagaatcacgttccataagagaaaaccaaggacgccggggtgagcgcaaggataagcctgccactcagcttgttctctgtactctgtcccgttggtgcccacttggattgcaggaagaggagctggaaatgaaatgctcagaacacagagaagagctgcttccctgaaacctccatggttgacactggcagattcagcagcctggggagcagcagtgacaggtgacaggctctttcatggcagggttggccctgggagagagaggtgagactgcagttctagtgtcccgtgggcagcctagtctggcacagagcactagcagctttcatggcacctcggcagcctatgcagtaagcgtctcttcaggaaagggccctgagcagggcaggaggagatcgcagatgccaggtagctgctgagagatccacggcattgcatttgcatggcatcctgaattgaatagtgtctcaccctcaattaatgtccttcccagaatctcagaatgtgagcttatttgggaatagggtggttgcagatgtaattaaggtaacatgaggtcacactggagtagggtaagcccttaatgcagtatagctggtattcttgtaagaggagactcagagacagacacagagagaagaacaccatgggccaatggaagcagggatggcagtgaagtgtctacaagccaatggatgccaagtatgcctggcaaccaccagaactaggagaggggcatggaacacactctcccttgaggtctccagagggaactaaccctgaggagaccttgactttcgactttcagcctccagaactgtgaaagaataaatttctgttgtcttaaactacctggtttgcagtgttttgttatggcagccacaagaagctcatacacacagctgtatctgtctgctttgcattgctataaaggagtacctgaagctgggtaatttataaagaaaagaggtttatttggcttacagttttgcaggctgtacaagcatggcatcagcatctgcttggcttctagtgaggcctcaggaagcttttactcatggcagaaaagaaggggagccagcatgacatggcaagagaggaagcaagagagtggggaggaggtgccaggctcttttctttttgttttttgagacagagtctcactctggtcacccaggctggagcacaatggcacagtcttggctcactgcaacctccgcctcccaggttcaagtgattctccggcctcagcctcccgagtagctgggatttcaggtgctcaccaccataactggctatttttttttctgtatttttagtagagatgaggtttcaccatgttggtcaggctggtcttgaactcctgacctcaagtgatccaaccacctcggcttcccaaagtgctgggattataggtatgagccactgcgctcagccaccaggctcttttttaacactcagatcttgccgtaactcatagagtgataactcattctttactgcaaggagggtgccaagccatgcatgagggatttatccccacaacccgaacatctctcaccagtccccatctccaacactgcggatcatatttcaataagagatttgaagggaacaaacatccaaaccacatccataccttagacatcctcctaagtgctcccagactacgtgagcaaacgttttgaagggtttctacggagatggtggggccaggaccacaaaaacactgtgcagtgatttatttgttttctctctcaggttaataactgtgaggaaaagaggtcatacacctgttgtttctacagaatggtgtattagcatagacccttggcactgatccctgatggtggagcatggctgatgttctgtgcaaaggagggtgagatccctgtgagtaattctccttccctgtaaacaaacacctctcacaacatgaggattacggggcaagggtgtgcagggggcaccttgtgcagcctgaaaaccatgttaatcttaaagctttactatcagcacagcccagccctgctgatctacccccagtggaagctggaatgctctcattttccatgcccttcacctccctagaactgagcttccaatacaccttgcccattttcccttgcctacctatcctctgccaactctggtaagtgcctcactttactttccaggagaacgtggttttagttattaatttttcacccctattgcctagtagctgcccatctttgacttggaaggaaggttacacttgctttgttgattgttatggcccccatccacctccatcaaaaagacccttgtggctgggcatggtggctcatgcctataatgaaagtgttttgggaggccgaggtgaggtaagaggattgcttgagggaaggagcttgagaccagcctgggcaacatagcaagatcccgtctctacaaaaaaatgaaaaaactagtggattgtggtggtacaggtgtcccagctacgcaggaggatcacctgagcccaggagctccaggctgcagtgagttatgatcaccccactgcactccagcctcggcaatagagtgagaccctgtccctacaaaatttttttttaaaaattagctaggtacctgcagttttagctacttgggagggtgaggtgggatgatttcttgagccaaggaatttgaggctgcagtgagctctgatcgcaccactgcactccagcctccatgacagagtgagactctgtctcttaacaaaaaagacccctgtggtttctcagcacttctggaggccctatcttcagcatgctctgaaacaaaccaccctggttctttgtctctggcctttgtatctcactattatggccttgccacctcttctgtggctgctgaccctggagaggtcacctcccctgccccagcactgtgactttcccagtgtggattcaggaaaacggacgctgctttttctcccctgcatgactctgtcctaagagtccacagccttgccctaatttcccaaaacacagctgaggccagtggaaaagttttcatatggctaaactttaggttcaacgatactccaaaaaaaaatcaaaatttctctacgagtgtggatccaagctagagtcttctacacagccagcatcctatttgatacctgggcagtgtccactgaacaggggcagtccacgcacacccagcacccttgaggctcagagctccctgtgactcattgtcaggagaaactgtcccctccaatgccaagtgatatggtttggctgtgtccccacccaaatctcatcttgaattgtagctcccataatccccacatgttgtgggagggacctcgtgggaggtaactgaatcgtgggggcagggttttcccctgctgttcttgtgatagtaagtctcatgagatctgatggttttataaagggcagtttttgcttttgcctgccaccatgtaagatgtgactttgctcctcctttgccttcctccatgattgtgaggactttccagccacatggaactgtgagtccattaaacctctctcctttataaattacccagtctcaggtatgtccttatagcagtgtgagaatggacgcaagagaagaagtttactccccacctgtatctcaaagccactttgctggatcttcaatttttgcctttccccaggaagatgggaggtgagagcactgaagtacttcagagaagatcccaggtctatatactctggacctctgtccccagtactcaacctcagtcactttgttaataaaattaatgaatagatcaatgttccatcttcttccaaaggagattcaaggaactgaggttttcaggttactctgtatggatatgctttggtggatctggtctttccagacgcagtcttcatcctcacgtctttatgatgtttcccatcaaggcagtaagatgtgcaataatagaaggtaaggcttgtgtttcctctcttctgacttccctgcactctatccctatgctgatctagctacacacacacacacacacacacaaacacacacacacacacacacacacacacacacacactcaagacctaagacagtgaattgcacatagcacaaactatacgatcactagatttattttctcacaaggattctgaacaactgaaaggttaaaaactgtacattatgcctgccctcaggttacagatatttgctcttttcagttttaaaacaccaactttatttcttttatgtaattgaaaattgtttcaactttttattttcgtgggtccatagtaggtgtatatatttacggggtacatgagacgttttgatacaggcatgcaatgtgtaatgatcacatcatggagaatggggtgtccaacccctcaagcatttatctttagtgttataaacaatgcaattatagtcttttcgttattttaacatgtacaatgaaattatcattgactattgtcaccccgttgtgctatcaaataatagtgggtcttattaattctctctcttttttttttgagacggagtctcgctctttcgcccaggccagagtgcagtggcgcgatctcggctcactgcaagctccgcctcctgggttcacgtcattcttttttagagatgtagtctcactctgtcgcccaggctggagtgcaatgacacaatcttgacttactgcaacctccacctcccatgttcaagcaattcttctgcctcagcctcctgagtagctgggattacaggcacgtgccaccacacctggctggtttttgtatttttagtagagatagggtttctccatgttggccaggctggtcttgaactcctgacctcaagtgatatgcccgcctcagcctcctaaagtgctgggattacaggcgtgagccaccggacctgatcttattcattctttataactatgtttttgtgttgattaaacatccccacctctccccaaccccccgtgattgaaaaaaaaatttaaagttttttcccccagtatttctttagttgcagcctctgtcccagcgaatgacttccttggacctctgaataagtaggtctaattcattctttctaactatatttttttgtacccattaaacatcctcacttcccccctccaccctctgtaactgaaaaaatattttaagttttggccccagtatttctccagtcgcatcctctgtcccagctaactgcttctttgggcctctgtggtgtgcatggtgttgcttgtttgctactggctttctaaactgctgcacactcatctttcagcctatggagacctctcaccatctgccgcggctctttcatgtgcaaatagtcaggcatttcacatccaagctctttgctgcttctttgtttcttctagggagagaaacgagcttgtgttatagttcttgttctctgtcattcataaatttgaaaaataaataaataaaaggtattgctggtgagatatttggaaaaattcttgttcctggcatctccccaattaacaagtgagtcttttgtggctctctttagccttgcgaggtctggcaggctatgtttttctcacaaaaccttgaagcctgagtcagtggcaatgttctgtatctcttctggcttgtcacagctgagcaacacatgagaaaaatgctagtcttcttcactcaggcttaggaatgaggcctcaaagggttttgcaattgaaggcattttgcttatgggtcagcggatgttatgtaatgtaatattgtcaatatagttcctaggctcttaattatttgcctcttggttgtggcaacacaaacagagaacacacagtcacctgactactcaaattccaataaatacaggaacatgattcattcaagaaaagcaataaaagagagacttcccccccattcagcataagctgaatatagtatcttcacacatcgtctttaccctagagctggggttataggattaggtcatgttgacaaacacaacaaaataataccaggctccatggctattttgttactgcttcaattcaagaaatttcaaggaaaaggcaacatgagtcaagcaagacaaaagtcaacgcatgctgcagccagttttgaaaccaaaggcctcccttcctatctactgtgtgaatttataatctttttttttttttcgagatggagattcacacttgttgcccaggctggaatgcaatggcgcgatctctgctcaccacaacctccgcctcctgggttcaagagattctccagcctcagcctcccaagtagctgggattacaggcaggggccaccctgcccggctaattttgtatttttagtagagatggggtttcaccatgttggtcaggctggtctcaaactcctgacctcaggtgatccacccatcttggcctcacaaagtgctgggattacaagcgtgagccacaacacctggcctacaatcttaacgctcactggttgtgtcggtttctcttggagccaaattcagtttgcgtgtctgcgtcagtggacaagattttgtttgaaataacaaaactcactcagaaataaaaagagagctctggtcaggaagtaatatatagttacatgcaagtaaaaccattcattaattcccacccaggccttccagggacacaggcatagatgtgtgtgttttctggttcctccaatgagtagaactggagagaaatgattaggaaagtccaggcttggttgaaggaggtgatagtccccaaatgctagcttcccaaacccatagggacaagaaagccgaggggatttgggctatctttatactgaattcatcctcccataaaattcatttagggtcaatctgaagtttgagttacacacctattgctttttttcaaagataaattatcatttgctacatgtttgagatgcatattttactttcaaaatattcatttctcatcctagaatttttttcccaattaccttttaggtacgttgtctagtctagatcaacaaaccactggcaggcaatgggagagtctgggagagaagaaatgtaaatgatgttttttaaataacatccatgttaccattcatatgcaagactccattttccatagtgtggtaaaaactagaaaaaaatgaccacatttcgtaagaaggataaagatagaaattcactgttgactgggaacctgatctagggaggcacagattggattctcaaggtcctttctctgcttcttacatgaccagagggaggttggctggtggaaacactgaacacatccctgtagggtggtccttgaggttacatgaggccctttggtggaagaccatatgccacagggtcccggtgactacagggtctccaaagagctgattggctgggcatgattacacatatccacctgctaaatcgtagctccaaatgcaacatccagcactcagaggccacatgtggacttctaggtcaccttgatcacgcatagtatctacccttggtttagaaggtggtgggatgatcaagggaaaaatgccctggtcaaactaaaaatgattttcattgtcaagacaatgacaatgcatttggatataactgaggagaaaacaaaaaaaaatgcaaagcataccttctttatccagccattttgatgaaaaaacagtgaaaagacaaagagcttactccaaatcatatgagaattgaaagggagtgccaacctggtccaaactgaattcagctctgtgaatgtcattgtgaagtctaatatttgtatgtaaataaaatcacgtggttactgtaactcctccctcctctggaattccagtgctgttacctcctaaatgaagaataatgtacaggctagaggtaggatgtcttagagactatctgctccttcaatacaattcctgtattgaatccccaaccaccagcatggcaatatctggagagggtgcctctaaggatgtaattaaaaataaataatatcatatgggtgaggccctgattggataggattagtgtgcttacaagaagagatgtcagagagccctctctctttctctctctttctctccatgtgtgaactgaggaaaggctatgtgagcagacagcgagaaggtggccaccttaagcaaggaagagagctctcactgggaagtgggtaagtgggaacattgaccttgaactccccagcatccagaactgtgagaaatacatttctactgtttaggccacccagtctgctttattttgttatagcagcctcagcagactaacacaccattcctctgcctgttcagttgtttgactcaataacggaagcttctcacgagcatctcaaaattgttctccatcctcctctaatcaataagcaggatctgacaattgtttgaaatcaagcaatgatatcctttgagtagtcaaaatagctatcacatattttgtattttctatgtgccaggcacccttccaggtatgaatgtatttgataattacaacaatcctatgaactagatgctattattacaccattttatagaaaaggaaaccgaggcatagtggtgctaactcgctaactcaactagtaagtgtggggagaaggattctaactcatgcagtctagttccacagtctatacctttaactactctatctctaagtttaagcagtagctggcgtttattgcatcctccttttgagcccgacgttaaatattatatgtcaattcacttatttaattatcacatacaatactttccattttctgtagtgtggcaaaaaccagaaaaaaatgactacatttcataagaaggataaagatagaaattcactgttgactgggaacctagtctagggaggcacagattggattctcatggtccattctttgcttcttacacaaccagcgggaggttggctggtgggaacactgaacacatccttgtaggggatatcaactctatgaaataggtactattattacaatcctgttttgcataagagaaaaatggaagcacagagaggtgagtaatgtacttaagggcatctaaggtgaccacttttacaagtggactacttgggaagccagccaggcactcttgcttcgaagcctgccctcttcagtagaaggcattttcatgttcaaagacaagcactgggcctattttatttctgcttctactttgaacctcaagcaaagtgctttcaacattggaaaaatcaataatatgtgtcaaatgcctcattttcaaaagataaggtacgcaaatcatttccatatatgggaatttggtgggtgatcaaggcaacattctccaattaatgggaagaagatggattatttgattcatgttttctgggacaaatggctggccacttatatagagaggaaatacagatgaatcttttctgatctttgggtccccatggacttctaagcataataacaaagccaaaaataatataaaaaaattaaaattctgtatggcaaaacctaccatgagtaatgttaatagactgactcactagtggaaagattagcaacagctttgatttttatgtataagatttccttttcctaatatactcagagcacttacaaaccaataaggaaaaaaaaatgaccaaagggcagaggatataatcaagtagttttacaaaacaagagccaaaatcgccaacattttggctataaatgtgcaatatttaaaagcacattctggctataaatatgcaatatttaaaagcacatttaggccgggcgtagtggcttatgcctttaattccacaatttggaggccgaagcgggtggactacctgaggtcaggagttcaagaccagcttgatcaacatgggtgttgatcaaccccgtctctactaaaaatacaaaaattatccaggtgtggtgatgtgcacctgcaatcccagctacttgggaggcagaggcaggagaatcacttgaacccggaggcggaggttgcaatgagccaagattccagtctgagcgacagagtgagactccatctcaaaaaaggcacatttaacgaatggaaaatataaaaataagctgtcattttaaatatattattgattatcaaagggtagaaaaccaggtgctcatgacgtaaacctaagtgggtacaatctttccagagactagtttgtcaatttcctccctatcctgagacttttctatctaatagatcactgatttctgatttctgttcagtgtctagcccattctggctaaatgaaacaagggggattggcagggagcttatgggaaacgttgtccttatgataaaaagagatgcataggaggaaataccccttttcttcccatgggcattgtcacgtggtacctggaactatgacaccacttagtgaccatgaagcccaagccaatacgttgaagataccatatgagccacaggagaaaagactttatgtttggtgacattactgagttgctgacttaggactacaatgccccaacttccaaaatcttgttatgtgacagtcaattccttacttacaaaatttctttaattggatctcttgttccttgcagctaaaggaattctgacaaaataaatcaaaactcaaaatgtgcatacccttggaacacaaaatgtaatttctagagctctgactcaaggaaatattcagacaagtaaacagaggtatatataacatgctatttatagtactgaaaaactacaaagccatgtaaatgcccttcaaaaagaagttggttaaatacgtggttaagtatttcactgttacagagccaataagatgtgatatggattaatatttacagacagaaatgtttatttgaggtctatcgtttagggggaaaaagaagattacaaaagggcacatacaggtaggattacatttatgtaaaattttgtgtatctgattacagagctgcacggaaggctattctccaagttgggagtggggtgggattgatcagccatggacgtgtagaaaggaaactcccagagataaacatagtcaggggctttgtggccaatgctgaagggaaagaaagtcttagccattgaacttcaagcatgtttatactaatggtgaaaccgactctaagaaagcaatacaaataaggcgttgtaaccaacgagcttcaagtatttctggtctcattggcaagaccatctcttgtgagacagtgcatccctctaagtaggtgtcatttgttttcatttggatgccttcagctgcaagttacagaattcccgactttcaactgtgagggaattatctcacataactgaagtcctgagtcagagtggacttcaggtgtgattgattcaagtgccactgattcatcaaagacccagtcctggccaggcacagtggctcacgtgtgtaattccagcactttgggaggttgcagtgagatcatgccattgcactccagtgaaaggggaagatacatggatggtgggtgggcaacctacagtgtccattaatccacaccagttgtcattttattcctccggctctcatgttttaaatcctagtggttttgcctatagagacaaaatgtgctgatcctatcgacgttgaatgtttcctgtttcattgacagtgcttctcatgataactccaattacacaacttagctatgacttacgaaacacttaatatgggccagacatgatattaagagctttacacttaagaagcagagaacgtattttgcagacatgactatttctattgcaaggaataaatctgcttttttttttctttttaagattaacagtatgttggtgcccagctcagactcccagaagttatgtttagtgcgtgttcggttccagcttgaatgactcccagatgttgatgagagtcagtctccgactcttcaaaagaggcaagattcagattcttcctctagcttcagccctgatttggctcatcgaaatgagccagacatttgctgtgccatttacatttattatgttattgttctcttggcaacactaagatgaattttattatctctgaatattttatagaaaattgaggttcagagagttcaaggaacatagcccaaattaaagagctggaaagtgtgataaaaacctgagttcttacattattttaccttttctcattaaaaaaaaaaagtcatatacttgaattgtacaactttagacatactctttgtaattctgttgaaacccactagggttcaactggatgtcgggcacacagttatctcttaataactatctggctattatccaatcaaggaaggatagacaggggatcaccgttttaaaccacacaatcttgtacgtggatttagctaactcccatctggtatgcattctaaactccttaggatttctatctgcctcagtaagaaagataccacagtcaaaacatgcgaattaactctacttgttatatatgtgtcactaaaaaaccgccccaggagttttcagctcactaaaaattaagaatctgaaaatagaaattttacagcttccctgagacttctgagccctactgaacggttcaaaagcttaagagcagcattatgtcaaccagggatttgaaaaatcaagtcatgttcttcccgctccttaagtcaataccaagggtaaagattttgcaatcagaagctcactagcaattttgctgggaagtgctcaccaatggaattccacttaattcctccccagctgggtgggagctacagcccaacagtggccaagtgtgttgcccttgcaaaatgtgactcagaagcattcaaagagctgagatactgaggtcctgaaaataggctatttttatattgatgttttccgtaactacagccttgctgaaagaatgcatgtgttcccagttgcacttttccttctgtagtgcttttaaattacatgtcgttaaggccacttccagtagtctcagaaatatttctccttgtaaaacagtgccctgtgaaaactaccatcaaattcttccactccacattgccgtggccacctgaggggaaggctttgggaaagaataaatgcttattcttgggaaattctgattccttctgcgtgaacttttccaggctctatgctgattctcattactctggtcctcctggtgaacttcagcagtgtattctgcttatttttttatttatttattttgaggcagagtcttgctccatcgtctaggctggagtacagtggcgcgatctcggctcactgcaacctctgcctcctgggttcaggtgattctcctgcctcagcctcctgagtacctgggactacaggtgctcaccatcacactcagctattgtttgtatttttagtagagacagggtttgactgtgttggccaggatggtcttgaactcttgatctcaggtgatccacctgctttgacctcccaaagtgctgggagtaaaggtgtgagccaccgcgcccagccctctctgcttatttttaacagcgaagcaatggatcattcattgaaatggcagcagaggcaatattagaatgcaaaactgcagtggtaatactatattagagtgttgccaccacacatttattgactaccatactgtttttaagcatttcaacgtatactactgaatttgagtggtagggagtgccaaatccatgttgtgggctcgtggggtccttcttcacacccactattgacgaccattatatcagcaacaggaggaaacagatagagaatagcctcgcctaattcattcattgggactttttttttccttcttttttgagagatggaggatctcgctctgtcacccaggctggagtgcagtagcacgatctcagctcactgcaacctctgcctcctgggttgaagcaattctcatgcctcagcctcccgagtagctgggactacaggcattcgccaccatacctggataattttttgtatttttagtagagacagggtttcaccatgttcgccaggctggtttcaaactcctgaactcaggtgatctgccttggcctcccaaagtgctgggcttgcagatgtgagccaccatacccggccctaattcagtggaactttgtctttccagttctcctttgaggtagcatccaggtggtggtcacagggcagcctcctccaattccccactgaaatatctaagacccagaaatcactcactcaagccctgaaaacttgagtaaaatctcactcaagcccccaaaactaaaatatcgagaaacagagtttagagaaatgtccccatcagaagggctgatgtaaccaaaattaaataaaccgtggcccaatcatgcttaattttataaaacaaagaagccccactctcatgaaagaagacaggaacacactttgttgctcccctgtgtgtccctggctgaatgattcagggtctgaacaaaccaagaataaaccaggaaagggggtcacagcattcttctctgcatgtagcaggttggagatacccggggtcctagccccctgttatccttgctgacatcattctactgccatcagcaaactacaacttccagaaaacaacgtatgaggaagtatgaagtgggggtatgtatttgtgtgtgtgtgtgtgtgtgtgtgtgtgtgtgtgtcggtagggggagtgggatgaggatagagaatggtggtagctcagtgcctgcagtatatcctttggacgtgaaatataatagcagcacatagaagggaacaaatattcagaaacactccattgattcagagttgcagaaagctgggcacctgaggaggagatccaccttagtatgtagagctgcaccaggagttggccagaagctatttactgtcacctgctgccaaaccaaagtcacgtacttcctctgacaacttcctcttggtggggggtgtggggggtggtccctgttgtccacacagggaaggggtgggtatggatctgtttcctcagttcagtgccataagatcaggaacctggctgattgtagcttaggtaggcatttaatatttgttgaagaaacaagcaaatgctttgaatctggatagagagaatgagtagggaagataaagagtgtgaagttgtatgtgtgtgtgtgtatgtgtgcatgcgctggaagtgggatgagaactgtgtaaagtgtacacagaagaacaagaaaagggaacacacagcatccaaagaattcagacctggagcctacgcctgtgtgccgcactctgaattcatggcgaaaagcctcccaaaggactaagaaggtcaaagcagattgaaaagagatgcaggatcgacaatggcaataaaagtcatgaagctttatgtagcaaataacctagcataaaaatctgcaaagcaaaacgtatcaaaaaaaagaaagagaaattgaggggaaaatgatcgttattgttatgagagacttaaatggacttctttccgttccgactaatggaatagacaaaacccagtaataatgtcgaaaaatgttaactatcatgaggtattatcagtagacgcacatttaaccttctatccttcaagaaacaaactctttcatgagagctcatacacaaacttgcaatggaataagtcaaatagaaaatattaatatgtctcggctaggtgcagtggctcacgcctgtaatcccagcactttgggaggccgaggtgggtggatcatgaggtcaggaattcgagaccagcctggccaacatggtgaaaccccgtctctaataaaaatacaaaaattagctgggcgtggtggcgggtgcctgtaatccaagctactcgggaggctgaggcaggagaatcgcttgaacccaggaggtaggggctgcagtgagccgagaccatgccattgcactccagcctgggcgacagagagagagactccctctcaaaaaaaaattagtatgtctcattgatattaatgacaagtatttagacaataacaaccagtatagaggggaacaggaaagatttattataacaacacttaaaggaaaagaaagctaaacatagaacaatcggtcagctttatttatgacagcagaactaggaaatagcatcaatatatcaggtcccttgcccactgccttattaataacactgtcatgaggccgggcgcagtggctcacacttgtaatcccagcactttgggaggccgaggcgggcggatcacgaggtcaggagttcaagaccagcctggccaatatggtgaaactccatctctactaaaaatacaaaacttagctgggcgtggtggtgcatgcccgtagtcccagctactcgggaggctgaggcagaagaattccttgaacctgggaggtggaggttgcagtgagcagagattgtgcaactgcactccagcctgggtaacagagcgagactccgtctcaaaacaaaaacaaaaaacaaacaaaaaaccaaaaacactgtcatgaacacacacccaaatgtatatacacaaacagagtcatttcagtagcattagtagcagtagaagtaccagggctatttctaggcatcaaaaataactagcatagtaagacaactagcactggataagtcttcctccactccaaatagcttctccatcaaaatgccattctatctgaaattccaccagtagaagtgtattttattaaattaatcaatgtgctttctgggatcatctttcaaagtataaatatttcggagagcagtaacatcttcaaacactaacatcttagcaggaattatggattatgctatgaagtcaatcttttccaggctcagagccaggctgggggcgcaggggttggggcagaggctcagctggtatcagtaggtaggaagaggcaccatctctctgacagcttctctgggttgtgattgtatcacatatctgaacagagtgtttaggagagtgaaatggttatgcctaagaactgctaatacatatcagatccccaatatatatttgctttcctgtgaattgcatattttataatctaagtgtgaagtagaaagattctagttcaataaagctttgattacttttaagctagtaaatatttatactgctgtattttgttcattacgtttgaatttaaacctaactttggactgtattaagtagttgtacttggagttcttagccttggtatctgaaaaaggttatggggattgggaggaaacttctcctttcctcagtgaaattaattaaattctacagaaacaaactttacatttgacatcacttacatatgtgtgagttcaaagttcccacacatatgtcatcatagagtgctgtgtagaagccaaactcaagatattcacatattaagacacttactatattaggtttaattggagtagtttcctgtttgtttgtttttttccacttaggctaagtgagatgaaggaagaaagctgtcttatttagtgagttcattctctctctctctttctccctccctccctccctctccctctctttctctctccctccctccctctccctctctttctctctcttaaatacgtctcgaatgttttgtgggtatattcttcactcatgttcaatgcatcatttttgttttctgtcctcagtggctctcttgtttccaacacctccatccccacccccaataccagcttctgcccccagggtaggaagagggtagatttggtgattcactttttagggaaatatcattggccttctgtgttatattctcaggatgttaagtagtttggctaagtcagtgttggacttgtgacttgggtcatgtgaattttatttcttggtctgccactaattcatatggtgatagactatgttattgaactgccatacctcaatatacacagctataaaaaatgacagtagccatggcacgtttcaatcaaatgaccatctctgtcaacacaatgggtcctacgcagcataggtgcttgccttagagatggactccttggatttcttcatggaagcttgtgtacatatgcatatttgggggtcagggagagggctcataagtttgataagagttcactgtgacctgtgtgccttggggcctcaaaaatagctgttcccaaacactgctctggggagccatgaagaatttttcattgatctatgacagcatgcagaaaatactgtaagaacaatttaaggggatttccacaaagctaaatttagtaagctttaaagactacactttatttaaaatatatattttctgatttttctgctggttaatttactattatatgatttactatttacttaataatatgatttactattatatgatactgttaatgtaggttagttctccctgcccctgccccagtggcttcccttagcaaaatctaaaagttagtttcaaaaagctttttaatatttgcacggcccatggaactaaatatttgggaattacagcttttatagagaattctcctggccctttatttgcctttctaacttttgctgtctgtctttggctatttcaagaataatattaaggaagtattattaagctgcctctggggccaatctgttcaacacaaatcaattgccatatgccttaaagaacaagtagatcttcaccaggatgttcttggtgggacagcttatacagcacattgctgcatgtagactttctcttccctcaaatcacacatttaccagagctgctcagtgtctgtctctctgtccccacactgtcatattgcccctgcattctccacctctctctgagtgctatgacatgcccatcccttggaagcctcctcatttgggactctccaccctgcagggacccctgtgaggtgtaatccagcacctcctctatccacacttactgctctcagcagtcttcctagaattttgggagataaactctcacaaattgtaatgtaatttacagctcagataagtgacactccaaaatgacaacctcaactacaatccgcatccttcatcttcatttgtctccctcccctccccaatatcttttggctatcaatattttattatcggtttagaaagtcagcccattggaaaataattgaatggaggtaaaatgaccaaggaaggtaagcattgaagagatggggtattagaagagctggcagaagaagggacatgatgatggaatgagcaccttctgctttgggtttcagagacactggaaccctcattcaccttagggctctgaagcttctttggtctgttatctatgttgtagtactattatttgttatattatattctttgttataaccacaatagatgtttatttaacatctttctattaagtgctggttgtgtgctagacatcatgctaggcactgggattatgacagtgaaaaaatgcagacatgtcactgcaaacactgttcatactgaccctgaatcatcaggactggggagaaaggtatatttaaagatccctgacttgtttttgacagattcaatgctaaaggaagtttccatagcctgttaaaagaagattcaaagatttcaggacacaattgatgcatccaatcaaagggaacagatggattgcaagacaaaattcatgccagtgaatcttcagtaagtattctctggaaaaaggcttagacagagatcgctgatgtaccaaggcaaacgccccttaccagggaaagaacccggatccctggacacgagtccttcttactttcttgatttgcctttctgatgcctatgtggctgttccatgcatgaagacttttagatctcagtttctcagaagccagtaaagagtaaataagattccaaggctaactaagtcccctctgaaactacatgccacattcagaaacgacattaattctctaagagaccaagattaaatcaggctggcatcttggatctgctggggaggaagtctgtttaatgcaattgacctctaaacagagttcatattaacagtgaccactgtgtacatcctgcttttttagctgaaagataaaccgtatgcccatgttatagagaagcatgagaaaacattggtttaggatgaattacatttaaaaattgaaatggaaagatcttctttgtaaatgactcagtaattttccatcatccgaaaacattttatataaagaaacaatttaggaagaaaaaaagacctactttagattagaaaatatttttaaattaggagataaagaggtggagatgggacggaaaaagaagttaacatacaaattattactgtccttaaactcagtttttaggaggtaagtggactgggcttgggtgttcttggtggcttaggatatgggtgctgatggggcagagaggaccaggtatgtgtgcagaaagatacgcacttagtgggatcttctccaagtaagtgttgaatgtagaagaattagacttgatgagaacactgggtgagggtggactcttaggtggatccttggatgaagtaggagcctgcagctgaaagggtgaaagaaggaggtggtaggaagggtttccttccccgtgttgcaaggctgcttctcttaattctgtgactttactacaaagcacagaggactgtgaccaacatttaataagccttcaataaatgttgatattgatacctaaaattccacctattagacattgatttatgttaacaacttccttcttaaagtaaaaattctcttgggaaggcccaagtcaattgaccattcattctttatgatgaatgtttaataagactgctttcttctggatatctagttgagatcagctgaacaacgagagttttatggctaaatggatatgaagacacgaggcaatttagggtcacggagatgctcggctgagttcaggcacaaatggggccttgagaagtcagaagttcttacttctctagataatatcctcaaaaagccaagtgaagatattaagaagaaaaagccaaaaataacaaccgtggctataccattttgggaacagagttggattcacatatcctccgtccttctactttataaacattatttggaaaattaaaagtcgaaaatattataagattaaaattctgtgagttggagtcaacttgtcttctaaagcctaacgctttctgagcctcagttaagttaccacaagaagcaagccaccaaatttgccatccagaactgtgatgcatgctctcatttccagcaagatgtaaagcagggttttcataactgttgaagctgcatcacaaccatctccacaaaggaccatttatcagttattttgggaaaggggagggtttttttagaagagaagaaaccacgctaataagctttttgtctgcaatcatttcccactgagattccatatcagtacatctccatttgctacatatttagctttaaaggaaaatgaggtgagatggagatatttgagtcataaaagcaataaaacgtgcttccggaaaatagctttcctttcagtccccagacctgcacttcccagatataaagtttgtttctttaacaaaagtcttggtcaagtatagccaggcatactgattatcagagaaatatatacatatgtttataattcatatgaaaggaaagagagaaagagccaaaaagaagggataaaaaaataatagctttagaaatagagaaaagaaacaaaaacaagacatacactacgagaaccccttgtaacctgcacccttaccagctgtccaggaaacccagggtacctccatctctcagctcagaggttggtgacaggtggtgtcttttattcatatgccctccctggggctcttaataattggtgtatttcttgtagtccctttagtaggctgggggcagtagtgggagtgagggcgagttggatgctggcttgttaatggagctgaagggagggctacaaggtgacagatgggatgaagctggaagcttctttggtgggaagggagggtgttctaggtcatgaagaattagatccattgagttgctgcaagaaatgtcccattccttgagttcctaggtgattgacttaatctgcccatcagtctttgtgtggttggttttgtggttgtgtggataaatctagacaccaaggaccctggatataccctcccaaagcaaaataacactgggggctggggtcacttattacttggctggtgtccatgatgggaaagatctcagggatgatggctgatgttgttggcattgtctttgcttgtccaagggctgctgtagaagaagcgaacggagtgaggggaagtccaggggtatgaatgtgtcgtgttcatgggtttttcaccaccaccgggatcctgttgtgacctacccactggtcaagatgaaatccctaataacttaggtgttaaaagactggaggttgccctgtataaattgggtcaccaaaagttccttttaaattttgcatagggcggtggctcatgtctgtaatcccagcactttggaaggctgaggtgggaggatcacttgagggcaggagttcaagactagactgggcaacatagtgaaactctggttctactaaaatacaaaatttagccaggcatggtggtgtgtgcctgtaatcccagctactcgggaggctgaggcaggagaattgcttgaaacctggaggcagaggctgaacagagctgagatcgtgcccctgcactccagcctggatgacagagcaagatagtctcaaaaaaaattttttttgtttcatatgtagtaccatagcaccaagaaagtgcttaggtggtaagtacaaaggtggccaaggtgagttctgacagtacagaatggggtttccatggagacggcaaataatgaagcagtggatgggggagggggatgtatgctccaaggttgtgcccactcggcacgacccaggttccatgctacaggcctctacttgtccagacctgagggtcagattcagatggtgcaaatgtttaagacctgggtcttcaacgagatgaattatcagctatttcatagctgcagtgttggatatgccgagacgataaaagcaacagcaatcagaatcaacagttgaaacgacatggcagacgctgtgaatgctatgaactgctgtgctgagcagcaggattcctgtgtcctggcgcaatgcccatggggattcatgctttcagagggtcacgcctcaggaacacgtagaagggcaagcatttcatctggcagggcactgatttaatctgcacgcatgtttggctgtaaaactagctcctcccccttaccatttttgagtcgctgccggactcaaattccacagattctggaaggtgtccaggaactcgttgatttgtcaaacttatggctacacacagctggaatggagacggactccactgaggagactcatacaggacaggagggaattttaagaggataaccctggtaagccatggtggattgggtgatgggaggctgtgtaagaaaagctctctgaccttgacttccaggaatttactcttagatggtttaatctagatactaccagagcttgtaatacagaaaatcctgcaggtagggagaagagattacccagaattagttgacagtctatgtttcatagagtagaatcaaagaaagatgtccttatgaattaaaaaagcaagcaaactatggtaacttgaaccagtttccagtgctaacgtagcactgccaagaaaagacactgtaaggtcaccactggtcactagatacagcttgttttaagttacaatcacatttacataaaaacaataaatggtctacatcaccttgaaaaatggtttttccttccagttgtaagcactttatgtcctggtgaaatgctgctcatctgattattttactatattgagaagaggaaaggggaggacatattattttcttaacacctaatggatccagacacatgttaaatgcttgacctccacaaccatgtttaactgttagaacaacatgatgtgtgtgtggtttattatttctattttccaaatcaggagaccaaggtctatagagattacgtagccttcctgggcactaggaacagggacagaactggaacctgtgcctatctctttctgtcgttgctccttccaacatatcatgttgcttctcaaaaccaacagtgaaaaagtattctttagcctaacctgagctgaaatggcttagatatgaaagcgtaaagtttcactggctgtgcatgatgcaaatttcttaaatataggcaaatataagcatgtgtgggtataatttctgtattatgtgtatacctttatatccatatgctgtatagtatgtgtgtatacatatagtgtgtgtgtatattttatatttatacacacacatatgtatatgcacacacacacacatatatataaaccattaatctaggaatcaacaaaccacatctgatgatatttctgcattgtcataaagccggagagagaagcttcccccagttacaggaagagattgtgtgattgtgtctgtgcttgctttttcctaatgtctgcatgttggacagaacttggcctaactctcatgttcatggtaatgtagcatctattttgaaccacaggaggatggaacattgaccagaagaacctgaccttagttgatggcaactctgttttatttccgctgctcacctgggcctctgaataaccgggtttcattactacaaggctggctcactatgcaccccttcacctgttcatttgcccagtgtgtgtctaacccagccatccacagctatgtcatgaagacctgtgcatggatccccacctgcctttcccatgttacctgcgagcttaccaaagacttgggatttttccagcatggtgaaagatgaaaatgtgcttgggtttactttgtcatttccagggctgggttaaagccatcatgtaatgaagccagatccacattaaaatgtggatcatggccaggtgtagtggctcatgcatgtaatcccagcactttggggggccgaggcaggtggatcatgaggtcaggagatcgagaccatcctggctaacacagtgagaccctgtctctactaaaaatacaaaaaattagctgggtgtggtggtgggagcctgtagtcccagctactcgggaggctgaggcaggagaaccgcgtgaacccgggaggcagagcttgcagtgagctgagatcacgccactgcactccagcctgggcgacagagcgagactccgtctcaaaaaaaaaaaaatgtggatcattgttagatgcattactatgaactttggggtgggggaaagggtcaacgtggaaaaacatccaggcatttccctttttctacacttgtctgtatctctccccaataattcattacttgattactttcctcattcattcattccacagatattccctggccattgaaatcaactacttgtgtcagaatacaaagctacatgagatgtggtccttgtcctcaataagcacacaagtcagggagttggaggggagattatgagtaaggaagagatacagaggtgaagaggggaggtgtccaagctggagggttctcaagggagagggaagagtctggaggcttacagagaagatagctcttgggggttttgccctttgagcctctcacagaggtcctgggccaaggaggactttgcgttttccatcagggtcagcctggtgtcacccaaacacctagaggagtgaggagacaccagaaatcccagattgtgtgacagcacctgggtaggcactgcaagggactaaagatgctacttgcaaccaaggatgatccccaagacaaaaaatatgcattataagaattatattttggtcctcaaacttctggttctataaatgctgttctcactgtctgggaagtaagatttggacttggccagtggaaattcagtttcttcatttgtcactcgatgcctgtgaaaactttgccaaaagcctgacttcttggagctttggttttctcatctatcaagtgagaatactaataatcataacaataatgcctacctcactgatctcttagggttgttatgagacttaaagtgtgctgtgcaaagtctgaaactgtgccataactctttacggtcattattattagtattggcaaaaatgtccatttctgcacccccttccatttgagtggtgagcgttttccttgccctgctattaagaggtcactcgtgtcaatgctgagaggcccatggaagcctgacagcttgatgttgcatctgtgagaagtgattcattggagcaatctccccttaagttctgatgaatgcattaagttttagaaggaaatctgtttgaattgtggcttgatgtctaatgcttggaggattatataattgaattgtagatgctaaattgcatcttctgaaatactgagaaatagtcccattctcatataggcttaacatccatctagaatattccaattgcttgttactaggagatatgtgtgttacatggcaagcatgtgctcatgtggactcacccacctgtgaggatggcataggtgaggaaagaagaagatgagaaaggttttataaggtaaactcaattgtgaaaactattacatgatggtggacaatttcagcttcaattcacctgatgatgaccctggcttcaataattaatgaccctgttattagatttctgaggcagacagcatctcattgcaagggaccactttgatgaatgaataatcgtaataaatacaaaccactggccagagggtcaacttctactgtctgcttagctggaacatgaatgaacccagccatgattgcaacattctcatggccattcttttggaattccaagtaggagaagaacctggagggtcattaagctgtgtcctttgtcttcaggcaagattatctccaaaccaaccaaatggggtagaacccacattgacactctcctggcaacaggctcaaggctattgggaaatcttccgacttgtgtcaaatctaacatttgtctttcatttagttgagaccaatctacataaatccaggttaaagggaagcttcttcccgccctccagaagacacaggcagtggctcaggtgacctgccagcatggaacctgtctctctcaacagtaagttactgagcacctactacgtgtgagatgctctcctggatgtgtttcattttatagtatttgacatctgttttctcatgtgagcctcacaacaattttatgtgtttaggtcatggtggggggtatgaccattataggatggatgaaaaaaacgaagcttgaagaagttatgtgaatctcctgaagtccagaaatggcaaagttcaaactcaggtctcctggctccaagcccatgtgtttccccttctactatgtcaacctctccctgccctgggctgccttgtggcaccgtccctttctgtggagactggtacatctgccttagtgtcttccggctgtgtgatgcttgtgttaaggctccatattctggaggtgtcctgcgaattctccactggaaaagggaaacaggactaaccctaggtcttgaagggtttccctcagagcttgagatagtcagaggaaaggactgagtgtccagggtttggccatctctaagtgctcttttgcttttgaaacagaaatagaccttgcatctgttgggcccatagtactagctcctgctgtaggtgcttttgtgggcactgcatgttaaatcctcacatcaacctcatgaggtgctgctgttacctccagttgtggatggggaaggtgagctgtggggagtttacatacggaggtggaaaatggccaaactgggatttgaacccctgccagggatctgctcttagcctctttaccatgttaaggagcctgggctccagcaccctctcctcctgtctgctgcccttggtccatagaaggaaaagcccagacctcctggtgtcctgggcactcagagataaccaaagcctggaaactcagcctttccatctcaaaagtgaaagaaaagtcaatcaaacaaaaatgaccgaagtgttttctaatattttcattaattaaaattatggttcctgatttcatctttttgacatccaacaccaatgtactaataatcaagcccctggaataatggtgtttaataaaaagggtgaaacctgcaatgcttttaggcaacacatttaccatggctagagagtagtgggatgtgttggtgtgattctgtgtgtcccttggtacgtcaaacacccacgacacttagtaagactgtgtgacaacagcgctgagcagtttaagtgcttgtaatccgctgcctgggaccaggctgagactcagaactgggtgttcttgctttttcacatttgctgctgattatgctgaggaattagatgggaaggtgggccagggatggggcagatagacatattgaatgtgtacccagaaacacagtgagggtctgtggtcaaggatgtggagtttctatccacttggcaaggggtggggagggtgagtctatacaatgaaatcactccctgtgtccattgcgcccaacaccaagcataacatgagcagctgcagttaggaggaaaaggccaaaacctccccttggacctcctgcctggacctccctgctttaagcaggaattgaatgtaaaatgctgtctgggccagccctgcctgggtctgcaaaaggagaggtgcctgcagcaatggctagtgggccagcccctggcagcacatgaagccacaaagatgccccagctactgggcttgtcacccacaaaggcccccactctagcctgccccctaccctgcagctggagtgtctctggagaagtatttccaaacagcccattccctgcccctcttcatttttgtgttatgtgccacctgaaggtctttatgatgttctatatccccgcttcttctcccatgttgttttgcctcctatgacattggaactggctcctgaacaaggggttaatgtaggaagggagcccccacctgccataatgagaacccccccagcacctcagactctttctcatccaattcatggggaggaatgatttgacaagcaggacaagttctatcctcaggccatgtgagtgctccagccaagatgattgagcctcttctggggtgggactgtttgccagtggtttgctgcatcagatggccttttggatcctggacacagctacaatcacagaagcgatcttggaagccactaagccagccctaccattttgcagatgaggaaactgaagactgcgagggaggatattcagcttgaatttagggtcagcaaaaggatgcattgaggaaagagcccaaggtgatcagtgtccagttggcatctctatacctcatggtgctgtcttcctgccccattgccaggcttggattgtcaaaataaggaactgatctccaggagataaattcgtcaagtagaagacaggcttcaagaaaagaaaggcactctgttttgcagtggggagcactctgctgggggcctatgtggctcagacgttgatggaaccgtcatctctgtaagtggagacagtaagcactgtcctaactaaatcacagctctttactgcttttatataaagattactcaggttgtaataatagcccataaattagtaagtaccattaagtttatgggcttctcctagtcagagtcctttctagctatcaatttggtagagtttaataaactctccatgacttataaaaccacggtagtcaagttttggtctgtactgagtggcgtttctgatactgacttccttctctacttgcgtgaaatgaaggcaaaaggacccataacaacacaattagaccacaagacaggtgtcagcttatcacattagacagctgcattaaagccaatgtacctccttcagggtctgggtgcctgcaaccactgggggtcttgcaagcatctagcaggataggagaacagctcagatggaagaacagacaacaaacccactgcccactgagattctgtgaaggagaactcctgtgcagtggcagaattgagtgggaaccatgtctgccccagcaaggaacttaacttctcatctaaaaatcacaccagtcctgcatacctcataggagcaattgaagataaaaataagtcaaggttcagtacaagctcaatctcatggaaaatatgaaagtgccatcatccaataatcataataatccagagctatgatatacaaaatgtcttttatcatgcaaagctctgtgccaagcactagacattcattcttgttttgatccctgctgccctcctagcaggcaagaagtctcgctctaccaaggctcagagaggatggcaacttgcttaaggtgacatagccagcctactgtggcaaattcagacatccaatgcaggtcattgactccaaagaccataggcctacactgccccagactatttaacacatcacttttattaggttgtatttgtcctaattcactccatacttcttaaagattttctatcaatggtcaaaaatacaaatacaggttgggcacagtggctcacgcctgtaatcccagcactttgggaggctgaggcaggtggatcacgaggtcagagatcgagaccattctggctaacatggtgaaaccccatctctactaaaaatacaagaaattagctgggcatggtggcacgtgcctgaactcccagctacttgggaggctgaggcaggagaattgcttgaacctgggaggcagaggttgcagtgagccgagattgcaccactgcactccagcctgggcaacagagcgagactccagataaaaaaaaaatacaaacacaatctaagatatttttattaatagcccaggcttggattctgcaaaagatgtggaatctctgttgaaaaccaacataagtaatttcagatagaactactaccaaactagatatcaacttacttaagtaggttgatggaacttaacctcactttcctaggagtagctagacgtcctacagacttgaaggttaggggatgaggggtagacattgaggatcctggaaatgaattagtgttctttcctccatgctgtggtatctgttaggctgggtggtataaccagtcgcccatagttctgcatttcattgcaatccaagctgcagtgaggtggagctgaggccccagcactgaagttgagtgacgaaaaggcacctgaaactcaggtgcatttcagttggtgactggttttcatgggaactgctaaaatgtaaagagaatggctttgtagcccataacgcggagtctgcagtcatccctcccatggcatttttggagctacccatgaccatgataggttgccattaacagggatggatttggctgtgactgatctgcagtgccctccaaaggtctgacaaagatctgagcaaatagattttacaagaatgttcactattttgttcccagcacctagcagagtgtcttatacatagcaaacactgatacatatttgccaaacaagatagatattaatgtcttaatttattgaaacaaagactccaagaagctaaatgcattaacttgttgcacatcacgcagatctaactaaggtgcaaggtaagatttgaagttgggtctgtctgactgtagagcccctgcctcgatcactaaaacacttctggaaccttccgtggagactgaatctgtaagatccttgtcacaagcacctcaggtaattttggtgcaagtggatcacacttgaaaaaaggccattgtagtgacatttgaatgacagctgacatgtttgagctcttactctttcctcagcacagctgcataatcttctcaccaactctacgactgttgcattctagagattgaaaacatcaaaccaaacctgaagcactgagaggttgggtaaccagctctggtcactgagttggtgagggatggattcagaagaggtctccaattgtgacaccgcagaggacctgctcttggccactacactctaccagctctgcaagaaggtgagggagggagggtggagtgtgatgggctcttactgtctccattcggttttgtcttagataaagggaactgagtccttaggcccctccagcaggaaaggctcacaacagcagcccctccggccctggggtcagtctgtattcacacctaagggcaagctaagttgtgaatttgacagaggacttggacagtgtctctagttgtcccggttatagctgtggttagtgtccaccgatggatgaggagatgcttccggcagattgctctcttagccacaattccctcatttatggcagcaaagcaggccaacgattgcaaaagacagaaataaaacagaaaatcttggaatgagcatcatcctgtaaaaagcatagagtgacatcaataacgggtagacaccttctccccaccttcgcacaactgtaactttttggttgttaaaggaacagataatcatatttctaaagaaagaatgccatgattcaagccctggagtgaataaagactcatttatgggaggttataccaagaggaaaatagtaaacgggcacgtgttttagcccttttagacttgtaaatggtccacatgtaatgtgctccaaaaatggtgaaatcatccagtaaagcactcacagccctgactgctgcttgtggcatcatgggggaaagtaaaaaggcccatgcacagagggcttttttaacttttcctctagacagagtcttgatctgttgcccgggctggagtgcagtggcatgatcttggctcactgcaacctccgcctcctgggttcaagtgattctcttccctcagcctcctgagtagctgggattacaggcatgcgccaccatgcctggctaatttttgtatttttagtagagacggggtttcaccatgttggtcaggctggtcttgaactcctgacctcaagtgatccgcctgccttggccccccaaagtgctgggattacaggcgtgagccactgcacccggctggggtttttaattaatatataccctcctgtactaagtatattttaaattttctatgttatgtgatgctttgacatctcaggtcttacagactggaggagagatgtcctttcctggagttagctaattcctagagatcccaagcaacttgctcataagcacacttttgatatgcaaaccaaccggttcagagttcatactcctacctgcctcctttatcagggtcctgccatatgggacacaacccttctgccctaaatcgccccagggccagctaccagacaactaggaccccccatataacccagagcccacgggacatatttgaactcgtttgaaccaaccctaagcctgctcaactgcttaccctgcctcgactgctccttctcctgaaaaccaccataaagctgtctgtccgtgctttttcctcactccttctgcctcctggctgaccctggtgcttccccgcatggccctgtgtggcgtggcttgtctcctactcttgggaattgtcaataacaaactattttttcaatggtaatgatcccctgatctgttgaccttgccacacctgaataaaaacaaacccctcgggtacgctctgaatcacctccttactgaaaaccacaatacattcttctaattcttacaaagggaatcccacctccatctgtttataaatcaagaagtgttcatcacatgctctggaaactttcatgcaaagtagttttcttgtgccatcgtagacgcatggttatgtctagggatgtttggagatgaagacgcacaactgactcctgactcctgtttacttaactgtgtggccttgcgcaggttattcccttaagtcccagctttgtcatctgaaaatgccacggcagatgcgcacctcacgtggttgcagggtttccacgagccgatggatgtaaagaacccagcaggacgttggctttcagttaatactgcaaaaatagtagcttttcagcagttcttctctccccaatccacagctttggtactgtcactccacagcccctggatgaggctctgacactttgcagggaggacgcattctcatcagaaagagacggaacgggtctcagaagcttgctttcagagggcttgcctttcaactcaaagcccatggggatgctggggacagagcctgcctcccatgtgagaggccaccatgcgccagagagctcagcctgtggaacacagagcaaaatggcaactatcttcccatcttcatttgcgctcgctgtcctgtggaaacctcctctctgtgaaactggtggagtcacgattttggggctggaccatctgcctggtcccaaatgtaattcatgaacttggagggatctgcattactgttcatttcagcaggaaaaatgatcaatgtatttcacagctttgagaatctgcaccttttttctggactgcggcaggcatatatgggttctggcattctgattagtaaagcagccaaattttcccttttatttttttgcaaaatcctctgtcttccactttaatacgagcgccagtaaatattttatgccgaggtcttttcagagcactgtttcctatctaaaggcatatacttccaccctagatatgtatttctttagttaatgtacacatgtaacacacatataaaataaatgaaagtagtgtatttttccagttatctccaaagaagtaaaactaattagatagaatggagaaggggctatgctgattaatttaattatctgtttaactaaaggctaaacagaaagcttattgaggtttctaccctggtaataaaaaaaatctttcaaatgtacaagcccacttgtatgccttccgtagactgaacatgtaattaattttgagaattcagctctgagcctcaggttcactaatgttgaaatcaagtttgttgatataaaagatttgattggattttcatgcgttctaagaagtgttagaaaaaaattatgtaaaaaaatcttcatagcttattttttataatttgcatcttatgcttggtaagtggaacataggattatttcccactaacagaattggggataatcaagtttaattaaaaagtattttatcataaactcttctcatctccagtgcaaaaggtaacggctctttccaacaatgactatattgccatttttactgccctccttaaccagggtacggtttaacatcccaaagaaagcctatcttgaaaaccttttatgactcaatctcttatgagagcttacttatataatgtatgggttttttttgttattgttttagaatgatgagtgatcaccataacataaacagacaccactgagcggactcattcttggtcttctgtctgattctgggagattcagagctctggctctgccactaacagcagggagttggagaaacgattttgctgctctggagctcagcttcctgattttgagggggatgtcttggaggttctccccacatctggaattctgggattatatggtgccttatgctagtggtagggggtgtgtattgacaaccaaacatcccgatttgcccagcattgagagagggttcctgggacttgggaattggggtatgaacactggaaactgccagggcaaattggaaccagctggctaccctggttgcggggggtgggcatgtggtttggtgtgtgtgggcacagcctctgatttatagaattataaattatatgttaattatatactacataaattatatttatacacttataggattataaattatatattaattatataatataaaaattatatttataaaattataaattaattaatatatgtgttatatatctataaaattataaattatatattaactttataatatataaattatatttatatattataaaattatatttatagaattataaaatatatattaattctatttaattccaagcattgggttgagaaggaagatacacaggtaaagtactttgtatattttctggcacagaagcactaagtaaacattagctatgattattattgtttttgtttttctcaagcgcttccacacttttcatctcagacccacagagccagtgtgtgcggctgaggtgctcagactggcaggtgaaatgacttcattagtgccctggctcctggtgggatgagagtggaaacccagccttctgagttgaagaactggaacaaacatcagccctgacacattgatgtcagtttacctttgtgagaaacaggaacgaaatgtgaacatctatttcaggtgatgtcataaagcccgactcagaagatggctatgatttcaacagcctgtcggcagcacggatttcagagtaacttacaatcagtaattaatctaaacaacagtgccgtgtgcactccattattaaaacagaaggggaaacaaaaggagactgagaggattgcttttgaagggtcatgttgcagcggcttctgctggatactaaaaagcaaattattatcgggggttgtttgtcattcacaggaggaattggattcctttatgtttataaagtcaccttggtatctggaaggagagcagaaactaacagagcctactttacttaggaatgtaggatgctaatttatttgcctttttcttatattaatatccttatctgtaaaaagggggaagaaaatagggctgttttgaggagatgtggctgagaaaacagaaaaagagaattacaggcctgaaatcccagcactctgggaggctgaggtaagaggaacgcttgattccagggatctgagaccagcctgggcaacatgacgaaaccctgtctctatttaaaaaacgacatttagcgggctgtggtggtgtgcatcagtggtcctaactactcaggaggctaagttgggaggactgcctgagcgtgggcggccgaagctgcaatgagccatgattgtgcctctgctccagcctgggtgacagaacaagactcttcctaaaagaaaaaaaaaaaaaaaggaacgacgaatcaggccaggcacagtggctcaagcctgtaatccctaatcctagaactttgggaggctgaggctggtggatcacctaaggtcaaggggtcaagacaagcctggcctacacggcaaaaccccatttctaccaaaaaatgcaaaaactagccggacgtgatggcgcatgcctgtggtcccaggtacttgggaggctgaggcaggagaatgccatgaacctgggagcttgcatgaacccaggaggcggagcttgccgcgagccaagatcacgccactgcactccagcctgggggacagagcaagactctgtctcaaaaaaaaaaaaaaaaaaaagtaaaataatcacttccactcaaatcctgggttcacactgttttccccaggagggactagaggtccataaagaggcagtcacggtcggggctcacacagctaaggtgtggaggagcaggggcggggaccaggggtgtggctggaggctgtgtgcttgtcagttctccagctgcctgtaataataagcctgatgctagcttacccagaaggggcgaagataagcgcaggggtgggatgggggctgctgagcagagcctggaagatgagtcctcattgaggaggaagcccatggagttggcccagtgatgataaaatcagctgggaaagtcgatggagtttcccagcgcttgaagtccattgactttcccagctaatgttaccaaagcctccttctgactgtacctgttttcccacaggcccctggcgctggttctctctggaggttgagtttccgtggggagagaagagtgcccagcgtgaccaccgttggctgacttcccatgccttattccttgtttcccccgctggggcccagcccaccagccccgcagtgcatgaagccacttatcaccacggttcccagagaggacgggctggcccaagtctgcattgtcacctgctctggggaaaacaaagccctctcccccgccctccccgcagcatgctgggcacagggccagcccgttctatgttttcagtaaattttcaaacatgctggttttggtggcagcttttgcagtgattatctcattaggggcttggccctgaaacaccttatttattgtggattgaaaaaagttcaccttttcaagcaaaaaaaaaaacaaaaaaaaacaaacaaaaaaaaaacagaagaaagaaataaaagaaccagactgtagtttccctggaaaattttcgcttgtgggaaaatacctccccggcccgtagagagacgccatcaccaacagtgtggagttatcagatgggactggtccagctttgtggggccggggcacacagtgccaatgtccaggtagtttccaaaccgtgttttgtttcctctgtcctctttataaacccacggattgaacctcatgggcccacaagttcctgattgcttcgtatatattgtacagattttttcaggaaaataaaatagatcttgctctaccctgacagagcagggccgatattctctagaagagaggagaactctagaatggatggcagcactctgagtgtgtaacccaaacagcatgctgaaatagtaaaactctgccgcaggggcagatggctgctgggagaatatttatagcagggatctagaaataaccgtaagggaaaagccttctgaggaggaacggaacaagagtcttcggggtggcacttggagacactcttgctcttgcctgaggtcctggagggctgcaggccgaccgctgcacgggagagaatatacgtggtattcacagggtacacagaagtcataatacttcatgtagatctgtgccacacagatgtgagagctaggacttggaaacaggaagagaagtgggaggatgattaggagcgtaattggtaaatgtagtacagtcaaggcagacgctgtaaaaggaccgggcactgcagagctgcaggacaagagcctggggacacgacagtcaaccagcccgtgggcatcatggaaacagcactttgcaggcacctgagtgaagcacaggaaggaaatgcagacacaggtgaaggagcacggggttgggttagagccaggcagcatccccccagccgctccatgctaaagccttcatcgattgcccagagagtgggggttctcagttaacgttggaaccatacagcaatgaggcctgggtactacttgtaattttctgtttatttctaactttatgaactgcgtcaagtatacttcctagcatgggttcagtattttgcaacaaatctttctgccgtggatataaattcatgagcttcaggtttcattaaagagaagtacacaaatgaagtacccagactaacatttgaaaatttaattttatgtttgtttttattttttaagggacagggtttcactatgctcaggctggactcaaactcctgggcacaagtgatcctcctgcctcagcctcctgagtagccgggaccataggcacacaccaccacgcccagctcaaactaacatttgactgccttgtgaaatattacctagtcactatcccaggtccctgacagcatagaccagcaaaacattagaatgacaccagacctattataactgcaagccatgaacaggatttcaagaaaagagatggaagaatgttcagattcctaaaaatcttcttaaaagagaactcctagctttccacaaaattcacttaatttcttaagtgatttttatcttttaaaagcacaataaaaagcaatcagatgttgtgtgtctgtgcatctgtacagcagtaaaggtatctctcacatggcattaaaaaaaaggcaaacaaatccaacacaccactagaactcaaatttggagaaaatagctgcaggaaaaaattgcgctgtgtgtataaaggttttttttaaagagtgtcttttcctgaactgacatttccattcttagttttttggttttgttttgttttgttgttgttttgagacggagtcccactctgtcaccaggctggactgcagtggtgtgatctcagctcactgcaacctccgcctcccgggtttaagcgatccttctgcctcagcctcctgagtagctgggactacaggcatgggccaccatgcccagctaattatttgaacttttagtagagatggggtttcaccatgttgaccaggatggtctcgatctcttgacctcatgatccgcccaccttggcctcccaaagtgctgggattacaggcgtgagccaccgtgcctggcccattcttagttttcttacttgggtatttttccctgtctgcctcagggaaatgaggaaaccaatagaagcttggcacttatttacttttcagttagtatatgatgtgatttattaaatgtatctttaagtctccaactggaatcacccatgttcttaacaacttaggttactcctttcaaggaaatgaacatattattacaagcacagccattctggaaaatacaactgtccactacatatagaaacttggcctcagatgattgtgtcttcttagcaagggacagtttctattcccctgaaccccacctcacagctctggatgacatgattgaagctaaggcaaggtcattttctaccccgactcaaatctctcttacagcaagttaaccaggtggggcttgagtggtcccaagcttcacactccgagtcaggcaggtttcttaggtctgctcccatactgaaccggctactaggggcacctgaccacgtagaacccaacagacagtgaccgggtaaatactcagcactcgggttctattctcctattgaataaaggcagcatcaacctgcctatggacagtgattgaaagcatttcactccaaattgagctgcacactctggtgtcttcaggcacagccaggcatagccaggacagttggttgcaacaggactgggccgactgggagcccagtgaggcagggctgggaatggactctgttgctggccttgggagaacacacaagggcaaaatgagaaactggaggtagctgtaatccctctgatgtcagggactgtgtcttacttccactgtgtcttcagtgcccagctcggagtctagcacatagtaaccttccatcagtgttcattgagtatagacatcagagaaagctggagtttgcaggggtgatcctcatcgaagggatacatcgtggtgacccacttagtggaggacactattggggccctggagatggtgatactcagcaattcacaggcatgtggctggcactcgaggagggagtctgtcatcaaataggtgggtctcgggaccaggctgggatataaaggtgggactttaggccttggagactctggccacagcaagataggactagatgaggtcaactgctctccagaatgggactcaggcctaggggacagcagagacctaggtatagagaaacagccaggaatgcggagcagtccagtcatgaggactgaagtgtaaagtcaatatgattggcccagtgatgctgctgtgcccaagagcattcagctggaactagagctccctgcatcacttctgctaaggatccaaggccaaggccagggtagggggcacggacggggatcacatgagagaggggaggtacagaggccgtggaatgactgtgcctgccttcctgatcccagcaaggtgggtatttgcaggctgcctgcacggctcagcagtttctggaaactgacttttcagtttatttatgattgttttcttcccctctgaacaaagtgcatttaggttaaaaaccaggcagcacataaataaactaattggaagtgtgtgcactaagattttagtgtcttttaataaattcgaaattttagagtcttcccaaagcagaagtaatataggatcctaggctttacctgctaggaaaacattgagtttaaaaggaagaaaaagggttcttcctggttgagaaagggagatggtggttatatggagaaattaatcaaagaataatgacacttaaatccttgacataatcatgaggttcacttgccatctaaagaaaacacacactcacaatgctcacacccactcatacataataaaggctttgacgggatgagtgggacctgcttgtatgcactattttctgcaaagaaaatatgtttatggacaataaacaaatgtctttgatttcaaccatattatgaataaaattatcagcagagtgctaagagcagatggcatttcatcatttaatagagactagatatcctgcttaaagctgcagtttgtctcttattagttacaaatgtcacagcccatgactcttagaaggaagtttacgacccacaattagatatcctagaatgtttaattctgcttgcctttgaatttcttttcaaaagcagccctctttccctcactgttcactgccacctagtgaatttatctgggaaagaaaccatagctgggaagaagatgcttttttaaaagacaacagctttcaccagtgacttgccttgtcaaatgataatggagcaggaggatggaggcttttgccgaaaaggccgtggcaaggacaatgaaattcgacccatcagagcagaacacattaacaaagcccctgcccgggggaagcttctggaaggagcagctcaggtgagcaacttctgacagctctgggcttctgatctgacagtctggttcaaaagaaccaaggactgttccctttgattccccttcggttgaacccaaatgccagacgacatggcgcgttgcccatcctgggcagatgttaagggcttggtatagagaaagggtgcgtggaatgatgaggcctgtgcaggagccccagtcaacatggaaggcatcaaaaccgtgttaacgagaccccctgggggacgatcacagaactgaagcaagtggtaattagaatggaaatgtaatgatgtgccgctatcctgctatcctgcttcccaaccctggtgtgggccagtctcctctcactgtgaatgcaaaggctgtagtctcctttcaaacgcagagcagcttctacccagggtcacccatgctgttcctccaacacccaaacagaaaactgcaagagagaggtgggcatggtactgattcagtgagccctgcatggctccatgtggccctgctggaaaaatcctgtctgcttcagaaaccaccttgcctctctctattgggcatgcagttggcaagagtgatctttggtgactctgttctgtccaggttctttgcaagagctggagaagtagattgctcaggttagaggtgtaattaatacctctgcagccccccagaaagatgcactgaagatttgcagtggctactgccattggcccatgtgtgtgtatgcatgccaagtgtgcatgtgtggacatatgtgcatgtatgtatatctatgcctgtgtatgaatgtgtatgcttgtgtgtgcccatgtgtatgtatgtgggtgtgtgtcaaccaagagtgtgggggggaaccaagagatccatacatccatatgcatggatgtatatctgtgtgtgtgtacacatgtgcatgtgtgtgtatgaacatgaaggaactgaagattttgagtctcttattgatgtgaattgactctgaagggtgagttttaacgctgtgatagttaaggggaaaccaagacaaagaaaccaatgattttaataactaaatgaggccgaaataaaactctaagatttatttttttcactcaggagaccactggccattcagctcatgacacttctccccaccagctcttcagagtaaatgtttctctccccaggaacgagttcaagttttaaaagattctgcatgggactgcctgggtgcttcctgctagccatcactttcatgctcagaatagatgtgccccattgcaaaaatggcactgtcacttggcactgggccactcactgatttgatgccatttttattgtaatttacagttgtcgattgaattggaaggcttgaactatccgtggggacataagctattaatataacaatgcataaagagccgaagcacctcgccgggatactgcagtttgaattattttacatacgcacttctaaacgcactctcaaccttagcactttgcagcctgtgggccagtgttgctcactgcatccatttctccaaaatcatcattcctctccagcacgctggatcgaatccacgttcaataggaagcaatgaaacaaagaccacatgtgctggttttagcccatatatgatgtggcatataaataagcatagctaacatgctttccaaaacacgacccacttctccagagtttaatcatgctgaggcctcttccagagggtgggagtccctttccagggcaagtccacaccaatagaaatggccagagcactcactgtccacgaatcaataaaaccagaagatgaacaggaagacataaggagcgcaagtggaaaactggaatgctacagtaatgctctgaatttggatcatatgtgcccagttgtgagaggctgtaaaaataaccctcgccatcctgttcttggggaaaaaaaggcaccaagccttctgctgtgatcaggttgttcccctccaaaattcatatgttgaaatctaattcccaacacgtgggtattaagaagtgagactttcggggctgattagatcatgaaagtggaatcttcacgaatgggattagtgtccttataaaacaggctggagggaacctgtttgtcccttctgtcatgtgagggcacatagaagggacaatctgtgagaaacgggccctcaccagacaccagatctgctgttgccttgatcttgaacttcccagcctccaaaactgtgagcgatcaatttctgttgcttataaactacccaatccaagatattttgttatagcagcctgaactgactaagccacctgctgaattgacttctttccctggcaacagttatggagagagacttctgatctcaaaatcccactcgatgtagggagctcagatgtgagttcctaacagaaatctaggcaactttggggcaaataattacttcttaacccaactctgcaaataagtaagtttttcaatattagataattcaccccaaagttacaaaacataaatcacctaaagagggaaaggttgaagcagctaattttgcaggggactcactttgcttggccatgaaaataagtgggcagatctgaactctgctctgcaggagttgatgactcaggagagacacctgagcatgagctacagaagcagtgaaatgggaacattacaacaatgcattctttcccacctacattatgtttagctgcattacatcttattcattcactaaagaacaaaaaaagcaggccgggtgcggtggctcatgcctgtaatcccagcactttgggaggccaaggcaggcagatcacctgaggtcaggagttcaagaccagcctagccaacatggtgaaaccccatccccgctaaaaatacaaaaattagacgggggtggtggtgggcacctgcaaccccagctactcaggaggatgaagcaggagaatcgcttgaacccgggaagcagagattggagattgcagtgatccaagatggcaccattgccctccagcctgcacgacacagtgagactccatctcaaaaaaaaaaaaaaaaaaaaaaaaaagaaaagaaaagaaaaggtgtcatttgtggaagacatcctggcatatatgctatggattctctatctatagtaaattttagaaatagaatttttgaaaaattttaattgcttaaatgagtcacagtgaagttttaaaaaattcattctgattgcagacttttgttctctggctaacaggaaggattaaggaagtaagaaataataattattgtgatgataataaagtagctcatatttcctgagcactaactacgttctaggcaactgtactaaatgcttttaagtgaatcatcttttaatcttaattttcacaatgttctttaagataatcttacctgtctgccttaccgaggaggaaacggaattgcccaaggttcaacagctaacataggacagaactgagacggaaactttggactgttggattccaaatttagtgctcttaattattatacttatagatatattatgtcttaggtatttagttttatatatactagttagttttagtttatatataaactagttttagttttatatattttagggtgtccagtaaaacactcattctggtctaaatttatagggcagagttagcaaatagatgagagataaaagagaaaaaatcagaaaacttccaagataattatgataagaatagctatgacttcttgaacacgtatatgtcaataataatttataaattatagattatataatttacaatatgcattatataaaatataaattatatataaaaattgtatattacatatattatatacaaattatatatattatatacaaattatatattatataaattatagattatatataaattatatattatataaattatagattatatataaattatttattatataaattatagattatatataaattatatattatataaattatagattatatataatttatatatattatataaaaattatatattatatataaaaattatacatattatatataatttattttccaagtctagaatactctcactggattattgtggcagccttcaaactggtcacccctaattcctgtctctgctctagtaaatccattcctgtacatttccattacagttgtggttctaaaatgcagatcatatcattctctccaatattctcaacgcaacatttctcaacatttccttgactgataaaggaaatacttctgaatatggttctctctttttttctttcttttctttttttttttgaaacagagtctcgctctgtcacccaggctggagtgcactggcacgatcttggctcactgcaagctccgcttcccgggttcacgccattctcctgcctcagcctcccgagtagctgggactgcaggtgcctgccagcatgcccggctaattttttgtatttttgttttagtagagacgtggtttcagcgtgttggccaggatggtctcaatctcctgaccccgtgatccgcccgcctcgacctcccaaagtgctgggattacaggtgtgagccaccgcgcccagcctgaatatggttctcaagaaccccccaatctagtctcttaccctagtgcctccctagcacccatgtggacaactttgttcaatggtcacaaggtctgagaccttcgctcacaccatggacccgacctgtcctgctttcctggcacagtacaacatagcgggcgtgcatatgaactttggagtcaatggaacctggattggaactccagctctgccgcttttcagtggtaggaccttggactacctgtgtagctttcctaagccttctgttcttcatctgaaaacatgcattgttgagagcatccagtgaaatcccaggagcactccacttagcacacaggattcaggaaatggaagctgtttgtgtttgccttggggaattctatgccctttcttagatccggtttttgaggacatccaggtatataggcctccctccacctcggtcaagcctcagactccatcattgtcacactcaggcctgacatttggcctaagcccatacccatggttcagctttccttttactcctagtcctgatataattccaatgacctcttcctaatatgtacagtaaaacgctcaatatagtctcaatttatagggcagagttagaaaagagatgagagacagaagagaaaaaaaaatcagaaaacttccaagataattacgatcagaatagctatgacttctcaaacactatgtggcaaatcctgctttaagtgtgtacgtgcatagccatccctcggggtatggagaggacttattccagaacccctgcctatgtccaaatccaggcatgcccaactcctacaatcagccctgcagaactcctatacgaaagttggccctgtttatatgtaggtttcacaacccgtgaatatgatatttttgatcctcattttggttgataaaaaaaagcatgtgtaagtggacctgtgtagttcaaatccatgttgtgcaagggtcagctgtatttacttaataaattttcaaaagagtggtgtaatttttaatggtcccttttatatctactacttagagagattaaataacttataaaatgatggagcctgataatttctttttaacttttttacttttggagacatggtctccctctgttgtccaggctggcctcaaactcttgggctcaagtgatcttccagtctcagcttaccaagtagctggagcctagtttgacccaaggcaacctggctttagggcctgggttctgagcgagtaccttctccctccgttccctgtctgtctctttcctcagttctctgtccctgccatttatacaaacactggggtacagcacagatctctggttttcacccccacgtgccagacaggcggctcatccactccttgttttgcagtcagctcagcaaacccagttgtggtgcctggctggctctgtcctttatgtcaacttcatttccactgtctcgatttccagtgtctcgattcacctgaacttatgaatttaaaatcacttatcgcatgtggtgaaaggaaacgtctccattttctatcagttttgtatctgaagtagcatccatgctggagcttcaaagaattcattataaatattcgatggcagccagagcttgagactcttggatgcttggaaaaaaacacctagaaaaactcctggtgaaaaatatttccaaattactctatcattataatgattctatcattatctgcaaggataggctgggtttgggtcctgggaaacttagagaggtttttaggaagagctgtttcaaatgacttttccaccctatttccccccgaccccttaaaagtctgaataaatgaaagacgtcaacctttccatatgcagttacagtctaggatctgggatattttattttatatacttgccggccttaggataagctgcacagtgaatcaatatgagaaaagccaatctgttcaagattgttgaagttaagattattgaagattatttcatgctgaaaatagaacatatatatatatatatttctgattgataggattttaggtggatttcatttcccccaccctacttcctatactttttagcttttctagaaaagctatttacagaaaaagtaaatatctaagggaaaatcaatcatttgatgactttagtggaaaaactctgaactagaagttttgagtgttagatacagttttaactctgtgttaactttgtacaagtctttcggcatctcagagcccaagcttttgggtcctcacaacgtgtgggttggatggagctgtgatgtttggacttcaggccccaaactccagggtttccccaagaacctctgacattccctaaccccttagccctgaaccaccccaggtttctaccaaaacggctctgtgttatctattatatgttttaccttttaagattcccccatactatttctatttaaaaacacttgacttataacaaaaaagtttgaaaatttctgggctaggtgtcttctcacctgtgatttcataatcctcttgtcaatattatagcacatgacgactgcaggatctcccagaactttctacagtgatccttcctgcgggcaatgaaactcacagaattggtctgcaataattaactttgcttagccacttcccagacttttttcttaaaataattacttgctgcggggttagtcttacgagtagataaaataggactaggtagtctgctcctcaagagaccctagatactcaccattggctgaaattccacggacattcatttatgctctattccaatttaggtgtgaattagtttcaacacatcttttgagataggaggagagagggaaaaataacagtgggaacctagggatatagcacatcagatgatggggaaaatggtgaagaaaggagaagaaaagaaaattgatgacacgttctacttatgtcataccttatccatatttggacctggtctttatggtcaccatctccatgctggtgagcttctaccttcaaatatgcctggcttctaacacaacacaacacaacacaacacaacacaacacaacacaacacaacacaacacatctctccttctgaataatgcccataaactcttcacagagcaaagcacagaggtatattctcttcctcttcccttcctcttcattttgggatatcctctcaggagcatcttgtctaattttagacatatcccccatcaattattggatgaccatcattactcagttatttatagaacttaatgaaaaaaattaagctgcttttactggatttaagtccaacccgtagactaccatgctttttgggaatagaagatgcacgtttccacccagttaagtaccttttgggaaaacgcaggatgcaaaggagctcagaaaaagctacaagaaaagaacacaagtgaggtggtccatagattggaagattctttcctaaatgacggagcctaaggtttcctcaccagctgtaagtctcctggaataccttcacagcatgcagcttaatcacattcaacagatgcactgggccagacacggtgactcacgcctgtaatcccagtacctcgggaggccaaggcaggcagattacttgatgacagggctttgaaaccagcctggccaccatagtgaaaccccatctctactaaaaatacaaaaactagccgggtgtggtggcgcaggcctatagtcccagctactcaggagcctgaggtaggagaatcacttgaacccgggaggcggacacattgagtaattccctacttatttctcattcacccagctcttcattgcacaggtatgtcagggtgctctggacacagagggccgagaaccaagccgacctcccacaatgcagtggttatctcacaacccaaagtttgaaacgctttggaaatgaagggacttttagtgggaagggatacttcagagaagcttttccttgtaaattctctcaattttatccacagcaaatatctgaacttcaaaagcttactcaaattagatggatttggcttctagtacaactttcttgagtcttgaagatagtgagaaaaaaaaaaaagtcctgcagaaatgaattgcgaagagaagggcttgggagttctcattttggcatgtagtccttaaagagatctgacagctcaattttccaatatgataggcaggaaatatgaaattagctctcagttatatctggcacagtgattacgtgcatgggaggtttcatgtggggcaacctgtcacagccactttctgaagctttattttcctggaattgaaaacccagcctataagaaattgaaagcacttaggagaaagttggagggaggaaaggatttactttttgttctacgtgggtgtcgttcctatctaatctcataacagaagcctctccgtcacataggtgccttggccaacagcaggccctactgctgaagtgaagagatggccagcatccaccccaagatgcttcattctcttctccatgtaagaaaacattcattttaatcagatcagcaatatgcccatctaatctaaaatattgtacaaatgcatcctcactcagatgtgttctgtgactaagctttacctaatggggtcttaatagaaatctcctgaaacaggtagggggtaaccttctctctctttttcctactgcagcctggaatacagatgtgatgcctggatctcaagtagctatttggggctgtgaggtgatccactgaggttggtggaggagcaaaattataccagaggcctgggtctctgttgactacagaacttccaaaacagccctggattaactacctgcagactgtttttgtcgcaaaagagaaataaatatctatcctgtttaagccactatcagtacatctagtaagcattagtttttttattatgtgaagctgaatgtaaaatgaactgatatcattagtgtatttatttcaaatatcaggctctcattagtacataattgctaagataaggcagcacactctaaggggcaccttatttcacttgcccgccctatggccagagtcattattggaataattagttggaaggtcactgagatgtttttcttccctccctccctatcatctatcttttttctatgacaatgagtagaattttttaaactctaaatttcataaagatcacattgaaatgatgaatttaaaatggctgaacccatcctaagctaaaagaattacgtaccgtcagcgattcctactaagctgaagtcaaccaactacagacaaggtatggtaaggtaccaggtcctccttgctgtaaattggagcaaatgctggcttagagaaaggtcttctctcattttccccccatgttttatgtgcttcccacattccacctgccatcgaggtctacatcgccatcaaggtctacactgccattgaggttacgctgccattgaggtctacactgccatcaaggttacactgccatcgacattacagtgccatgggggttacactgccactgaggtctacactgccatcgagtttacactgccatgggggttacaccgccattgaggtctacactgccatcgacgttacaccgccatcaaggtctacactgccatcgaggttacactgccattgaggtctacactgtggtgctcacttccctgctctagatctcttactttgatttacaccagacctcagtctctgcgcatataattgctcaagtctagaaccccaatctacttctctaagcgggtttcctttctttccagatgctctactccccagaaagggaaggtgaggccacacagagcctatctatgccttcctgtccctgaggctctacggtggccccgctcagtggccctggccccatctgtgctgtaaccccagcccgacctgagtagaaaggccagtgagacacaaagccaagagaatttccccagccactctggtctccacgagccagtcctggcactcagaatgctgaggttagagcaagggaaattgccaaccttcggccagtgtgggcccatgaagctggcgatttcgtgtggttcaacttagtcctagagctctcactgtgtgtggttctcccatccagggaaaaccaaaccatctcaggcaagcctaacagagcagctgcctttgaaagattctgagttgagtgtggtatgggggcaggcctgagaagtgtgcccttagataccttcaagggctctgggcagtgtttgagggatccaaatgaactcagttacaccaagctctcctccactgtggcaggacttctggtcacggggtccccacgccgcagggcccttccatcatcccagatccttacgcgtggagtctctctcattctcacaacctcagcttacatgttccacttattcatcactgcatctctggagccaagcctggaccataagagatgggtcatttgaagagctataggtcgtagctcttttcatggtcacttgttttcttcaggcctcctgacacccaataaatttattgtcatttataagcttgaaaacaataagtttaagcaataaaataaagtttgttagatggctgggcatggcgcatcatgcctgtaatcccagcactttgggtggccaagaccagaagatcacttgagcccaggagtttgagactaacctgggcaacatagcaagaccccatctccacaaaaacaaaaataaaaaataaagtttattagatatgcatttccatatcttctctctataaaattattaatggagttactataaataattttaatggactattatataaattaatacattgtcacttataacattgtagtttacatctctaaaagatagagatttaaagaaaatgaccataatgccattcttatacaataatttcttaatattctaaaatggtgcttagactttcctaattgtgtgtgtgtttttgaaaaagttggtttgtttgaagcaggttccagataaggtccataaatagtgattgactggtatgtctcgcttcacttttaatctatagatttccccaatttcttccttttttcttgcaaatctttttgaacacactgggtcatttgcttttacagtttcctgtaatctggattttactaattgaatctctgtggtgttgtttatcatgttcctctgtttcctgtatttcttgtaaatttggcaagactacattatcagtggtggtatctccttccacccagggttatatatgtctggtttgctctctttttgtgatatcatcatctgttgatctctgcctaactccattaattctttagggattgcaaatgttgtcattcttattctatcattcctatatcatttattagttagaatatacccacaacaggaaactcccctttattcaccaattttcaaaattcaccaatttttaccatgcctagcatcatccaaatgtgactgatgaatttatttaaagcatcattattcatttatggagtcaaacaaatttgatatgtttcaattcatccattacagttttatcctaatttgggatcaaattgtctgaccccaggaataagaactattcagtttctcctgaatctgtttgaaacactcttagtagtcatttaatttctttgcttcctggtgtgaccatttatttaagggggttggttctttttagtgggaaatagtatctagatccatcactggtgagtgaggaatactaattactactggattggttgtttctaggactttgcaggatacaaaattgggacatttaaagtattttcttttaagtataaattaagtcatacatttatgctggtatttccatttcaaaatcaggactagagttttacacaatctcatcaatttcctttttctcacatgataaaaatctggatctcaatgtcaccaacaccatttctcacttgctttatccacactactcacatgacagcctcagaaaagcaaaatcaccactaccaacaccaaagtgactggtaatcatttcagatttttttaaaaagatctttctgtcttttgggatgtataatgaaatcgctatgacataaaagttgctttgcagtttggagatttctgaaggaacttaaaatcgagctaccgtttgacccagcaatcccattagtggatatatacccaaaatcattctagcaaaaatacacctacactcgtatgtttatcacagcactatttacaacagcaaagacatggactcaacctaagtgcccagcaatggtgggctggataaagaaaatgtggtacatatacactatggaatactatgcagccatgaaaaagattgaaatcatgttctttgcagcaacatggatacagctggaggccattatcttgagcaaattaacgcaggaacagaaaaccaaatattgcatgttctcacttctaagtgggagccaaacactgggtactcatggacataaagatgggagcaatagatactggagactaccagagaggggagagagggaagggacaagggttgaaaaactacctattgggtactatgctcactatctggctgacaggatcatttataacccaaacctcagtgttacacaatatacctgtgtaacaaacctgcatgtgaacccccaaatctaaaataaaagttgaaattgtaataaaataaaccaaaagttgctttaaatagttcctccctgtgtgtttatgccatcaaccgatgtatatttaggattttttaaaaaatatttaggagttgtttaaagttaactttttaatatttatgcaacatgtttatatcattctaaatctctgagacaagatacagccaaagctcatagcttctatcattatctcattcactttgctgcatcatttttcctgtgggtaccagttaaccattctgtgtttgtgattggtgaactttgctgtattttaaaaatataaataaaagtgtgtatatattcatatcttcccttttctagaaaacagcatatactttctcacctcacttttgcatataataatatatcctgaaaatcactctatggttgtacatagaagagttgctcatttctttttagagttatgcgatattctttcatgcggctggaccacaacttatttactcagacaccaatggatagacttttgggttattccaggttgcttttcttttgctatgataaataatgctgcaaagagtagccttaggaataagtgtttttgtatttttggcaatccatcttaggggcagatttccagaagtggaccaaagagtaaatgcatatgtgattttgctatacatgttgtcaaattccctttcatagaagctgtaccttcttacattcccaccagcaatctctgcaagtgcctcattcttcacggtctctccaataaaattcattgccaacctgtgggctttttttccctctgtagagagaaatggcattttcatgtcgctttaattggcatttctcttactattagcgagaccagcatctttcttaagtttcagctctattttcagataagtgcattttaaaacaactcataagctatgcatcatcacttagccttaatttatgggttgtattttgtgatactgattaagtgcatttgagcagactattcagcagatccttgggggcactgatcaccaaatctgtctgaaggttctagaaatctcttctactttaggacagcacacttgagaagtagtattatgaggactgaggtttaaactctttggcatatctggggtatgtgattggaaatgggtctgaattggaatgttgccttaatgaacatgtgtatacagcttcactatttactcaaatgagaattctgtaccaacacaaaccagatacctcttcatcaagaacttaacccaattagggagtcctgtttagcaaaaagaaggactggggaaatggtttgcttaaaatagccttggagaaagaacacacttaaaggctgggttttcgcataggaaaaataagacagagaattgaagaatcaatgatatgcccctcatatttgctaaagagatgaaatagaatgaattcctgaagggcagggataaaatgaaaaaggactgatagaagaaaattactccatagaaacaaaaacaaactcaatggggaaaagtagaaagaggcaagagcaaaattcctatggactcctacaatctcaaagtctctggctgccatgagaccttcccagatctttgtaggtcatgtaatttttcacacttttctgacttattgataaggtcacccatttttgtactttcttgataacattcaatttaccaccttattgttcatatcctatctcttattactttctatttgtttcacttacatgaaaggctctccaagggttgaagagcccaagagattccaagctcctcaccctctggaagattagacatctacatagtttcttgactgagaaacaaatatggactagggagatactggttgaataaaagcatctcagaaaaaaaaaaaaaaagcctccaaagaagcttctcagaagaagcaatgggtgagatattgtaccctgaaaaacctgagaaggaatcattcatttgttctcttccatagtcagttccttagtagaccataatttccagtttgtttcactgttggatgaaagttacaaagaaagtgaaagttctgcaaagaaggagaagagagtagcaaaagaatgtaaaatgagtgttacacgaaaaaggcaacagatatatagttgtttcttttaaaggacataaaaatagagtgtcccaattgctgtcatcccctgcacttaaatttgaacatattctcctgccgcagaacaaaatacataatccagtgtgtttccctttgtgtctaagctgccagaaaaattggagcaaaattcatcaagaatttgtgtcaacttctcaatgtaatgcctagaagtttacattatttccagttcttaaaaatgctttgaccaggttcggtggctcacgcttgtaatctcagcactttgggaggctgaggtgggcagatcacttgaggtcaggagtttaagactagcctggccaacatggagaaaccctgtctctactaaaactacaaaaattagccgggtgtggtggcgggcgcctgtaatcccagcgactcaggtggttgaggcaggagaatcgcttgaaccgggaggcagaggttgcagtcagccaagatcacgacactgcactccagcctgggccacacagcaagactccgtctccctcccccaaacccaccaaaaaaaaaaaaaagtaaaaaaggttttcaactcgggaggctgaggtgggaggatcacttgagctcaggaggtcaaggctgcagtgagctgagattgcgccactatattccaggctgggcaacaaagcgagatgctgtaaaaaaaaaaaaaaaaaaaaaagctcttttctttatttttaagtgttttatccatgagccatagaaaatactacagatgtggttaaaaaaaaaacaagtatgcatacacaaactgctgtccaatatagaagaaggattttataaaaaggtcatccaaaactttgtctagtttagaagatcaaataaggagaaactggttcatgaaaataatgaaaagaattcactcaaaagaaaaaaaattccttcttgcccatgatcaaatgtggaaacgggggtgctgacacggacatccctgtctttgaaaacagcaaacttgagagattttataaattgtaagtgatctgtaaggctattctcttttataattattcaagatgagaatgcagaaataaacattcgggacaatggaggcattcacccatttattgagacggcaagactggaagatactccaaaaaatggtccatctagtcacctgaaatatattagagcagctttcttgctaacaaaacaaaacaaaacaaaacaaaacaaaacaaaaacctgtaaattccttgttatctgaaaaccactgcagaggcatttttcttctgccaccattgaaatgttttaatctgccaaacatacctcagaattctttcacaagcagttacttttttctttttaatggttatttaaattttttagttctgtgtattttattttattattattatttgttttagagatagcgtctccttctgtcacctaggctggagtgcagtggtgcagtcataggtcactgcagccttgaattcttgggctcaagctatcctgcctcagcctcccaagtatctgggactaaaggcatgctaaaaatttttaagaaatgtgagaaagtacacatatcataaaatttaccttctttatttttaagttcagtagtgtcaattacatttatgttgttgtacaagtaatcgcctaaacattttcatcttgcaaaacagaaattttgtatccgttaaacaattattccctctctaccctagcttagcccctgataactatcattctgctttctgtctctgcgaatttgactcttctaggaattcatgtaagtggaatcctacattatttccttttatgactggtttatttcacttagcataatgtcctccaggtgcacaggcaatattctaccctcgatttatttattctgctttttaaaatcatgagtctgtctatgccatgggtttccctgaggcatggatccactgagaatgatgaaataacatcccaagctgtgatttggctcaaggctttattgttgccattggacagttataaaatgcccagatgtttagctcaggaattacttcaccttacacagtcctctaccctgcagggatagctaagcttgcagcactatggttagggaaagatcaaagtacagaagtcattaagaatgaattttaataaaattaatccatcaattcactgtggattaattcatccacaatgaattcatacatataagaaatgtctatgaaacctacctactatgggcaatgcattacgtcatgtaccaaaaagaataagccatgatcctggcagggagaaatcttattgagagattaggtaaatatatttttgagtagcataagaggtggttacaggattttatgactaactgacaaactaatgacaaaaaattaagtggtgtgtgctgtggagggggaggacatcctgcagggcaggtggaggagggagtaggattcacccacagctcctaatccattgtagatactccatgattatggaaggaaggaaggaaggaaggaagggagggagaggaggggaggggaggggaggggaggaaggcagggaaggaagggagggaaggaagggtgggagggagggagggaaaaagacaaacagaatgatgaaatagctttatggcccagggaatagagtgagcaaatgcttggtgttgagaaaatgcacaattaatttgagaaacggtgagcagactcatttgtcagaaggaagggtagaaacacagaaagatgttggtaagggggccagccatggaatgtggcccagctggggagggcccagagcagtcaagtccatgtttgaatttaattctctaagtaattaggagctgtgtagatcagtgagcagcagtaacatgattaatgtggcattttaggaggattaatctggcaggtgtgcctgatggaggagcacagaggagagggtagaagacgagagagcagtttgcggcggtctcgatgtggttgtgtctattttcttgcaatttatttcaaaagaataaaatagctttcaagagataacaatagctccaccaggacctcacccatcttcacactgggctttgcttataggagggaatgattaaactttcttcctttttttgagatggagtctcactctgtagcccaggctggactgtagtggcgccatcttggctcactgtaacgtctgcctcccaggttcaagtgattctcctgcctcagcctccagagtagctgggattataggtgtctgccaccacatctggctaatttttgtggttttggtacggacggggtttcatcatgttggccaggccggtcttgaactcctgacctcaggtgatccgccttcctcggcctctcaaagtgctgggattacaggcatgagccactgtgcccggccccctgattaaactttttttctttccaaattcaaaaggaaactatgcttccaactcccccttccctcaatgtgtgtaattattacaattacagtgacagacaaagaggttattaaataatggctcggtgtaagtgtgggttaagagtgaaacactcactgagagggcagtcctgagcagcctggaggagaaggagcttggggacctagtacaggttcggactggaatcccctacagagttgtattctgtggacttaggagaaaaccagctcaaagaatcctgcctggtgtgctgattttcatttcatttgtcatcattattattgtattttcaaaaatagatatacatagatacatcgtttaaaagttatacagttgactcttgaacaatgcggttgagctgccagggtccacttacacgtgaattttcttctgcctctgccatttctgagacagcaaaaccaacctctcctcttcctcctcagcccacccaacgtgaagatgagtaggataaaggcctttatgatgatccagacccacttccacctaatgagtagaaaatatattttcttccttgcaattttcttagcaacattttcttttctctagcttactttattgtgaggataaagtatagaatgcatagaacatacaaaatatgtgttaagtggctgtatgtgttattgataaggcttctggtgaagatcaacagtagactattagtagttaaattctgggggactcagaagttatacctagatttctgactgaaaggggtatcaatgcccctaacccctatgttgttcaaggatccactgtacataaaaaagccattttcagaaattatttgttgcttatttcttcaagttatccaaatcgaaggctatttagtaacactctaattggtcaaaggctattgtaaagccctatttggaaatgcatgagtgtgcgcgcgcgtgtgtgcgtgtgtgtgtgtgctgccattgttctcttcttcctcttctttctcctccttctcctccagcaggttcctattattgaaaagcacacctttatctgtacctgaataatctgggagtcacatctccgagcctctgctgctctgcatcccacctcacccccagcccatcctatcgccaaggatgcgagagctactgtgagtcggccagactccagcagggcatagccttggcctgcagtctcagtagggggtgccttcaaaggctcaagcacacgtacttgtgggtatggctgcttttggaaattttgtcttctccctgtggcttctctgaaaggtcactcactgccgactgtgtgcgccagcaaaagttctgggaagatggcttgggctagtttcctgcagacttgggtggattcattcccaattccttttggttattttcctcaggctctcttctttgtgagtaagctctggcctttccaccagccaggtcctacttcggagacacaggtagggcttaaggagcctcatttgagccagctggggtcccagggctcacttccattgatttcaaaaaccccaggaagagccagcggaaagggcatatacccatgctccaaagcttctgtccatcatttggaagatggttcttcaagtcttcacttggaatggatttattcctatttttagccataattctaataagcccatttttccgtttcctcaattctcattcatttaccacctgtaatgtaggagaggaagacccaaaaagagcagaaaggaatgaccactgcaaatttgacaatgagggaggggcgtggaggaagactcaatgcagagatggcggccagagaatcactccctaaaaccccagctatcagatgaaagagagaatggcccaatgcctctttggggtcagctgacatttttttggagaaatttgagaggtaccaaacagggaagaaatctgggtgtctaggcttaagcccctttcagagagtttcagaatcctgcagatccgctggtaggcatctcagcctgcaaaatcccatttaagctactgggattagcacatgctgaggggttcagcactggatccatgccggccctctgcatactgaatgccaaagagcaagttgtgagtggatgtgggagaaggtactgaagtactgtaggaggagaaagaatgggatagaaagagtgggcacacagtgacataagacatgactgcctacctgctacccatacactcactcccccacccaccaagcaagcctcttagaccacctaggatattccagagactgtgctgtgttctaaggagaccaaatgagagcctgtcccctggaagcttgcagtctagagcaggtcaccttcaaaatccaatgtgtgttttatagtaacagcacacctcatttcagagtcactctgcaagtgacaatagacacctgtgctgatggctactgccttgcacgctgcaggtataggcaaatctggctattccttgatcacaactaatgcaaaagtcccaggccatctgtggttggcctcttatcacttatttcatagctctcacaaaatcacaaatatatacgaaaaataataattacttttccctagttagctatactatgactagtcttagagtcttcttcccagagatgaggatattgcttatataattgttctcctctcccttactcatagacattgataaagtttggatatttgtccccttttaatctcatgtggaaatgtgactcccagtgttggagggagggcctggtgggagatgtttggatcatgggaaaggatccttcatgagtggtttggtgctgtccttggggtaatgagtgagttctcgctcttagtttgcacaagaactggtggttaaaaagagcctggtacctccctccccgctctctcttgccatgtgacatccctgccccctctccatcttccaccatgattggaagcttcctgaggtctgcaccagaagcagatgccagtgccatggttcttgtctgcagaaccagaataagcctcctttcttataaattacccagcctcaggtatctcttcatagcaatgcaaatggactaagacagacatcaacttaaaactccactgagctccttggaagcccacacccttaactatcagcattgctggctgtatagcattctctgaaagaagcattgcccataataaacactcaataaatagctttcagtgaatggctgaagaagtagttggcaagcatcattttcaaggcactaggaaaacaggaccaatattcagaaacacatcagatcatgcgtgccttagttgtttttctcctcgggctattgcaccttctgtgcatgcaaatggaagggttggttatgaaaattgcatgccttgcatcattactctgttctattagaaaccagacccgaaagaaacacagggacatgtttcacttcagaaacgtgtgtagcatatgttaggaagccctggaaaccgccacgacagtttattgttcacctcggattcaagcgaagaatgcacactggtgggtggtttttgcatgttcattcctctgttaagatcacattgagcccattggaatgggtggattgaacagaaataatgcagtgttttatttcttgtgtattctaccttggctgaaagcagatacggagagttaccgccaacctttgcttgccttggggtccaccaagttctgatgctacaaatgaaaaaggcttgacagctgagatggccataggggtggaggaagccttacaatcacagggtctgggggctaaaaggagactcagtgggttacagaactcagcttcctcaccacggagagaccccatttatagcagctttaaaaacaagcagtaaacaaatgccatgttataaaaatacttgcccagtcccctggccctccataaataggacagtgaactcaaaccagcacctgacataatttatcttcacctgccataatttttccttgcttccagaagagaggaaatggctattggcctagcaaagctacaccatccaaagaagaggtatctaacttcctgttatgttacatctgtcttggtgctgaaatttacttgtgctttcttggtttgtttttggttaaaagcagggctctgtggccattgggagaatgtccctagcagacctcctgcagcagagctcatcactgattgagggcccagggctatgcattgaaatgcatctctgtgcttgcactgaggccctgcctcctgtgggctgttccatgtcagtgactgagtacagcagagatacctaaggtagctgattcctggaagacactggcatttcccctactaaaatccttgcatgaggaagtttgtcttggtgtcttcttggaggacccagactaacatggactctattccatgaatccagaagaaggcaagagtccatcacaaggcagagcctgaacagagcctagcatgtgacaggcactgaagaaatatttactgaatgaatgagagagcctccaacagctaatgaggtggccctagcaaggaggatggatctttttataaaattgtacaagcaacaacctgttggcctcccatcattgggaccagtgccctctacttctgagctagcaggagccccatttcctagaagttgataggggtttctcatgtcatggagatgcagactctgggtctctgagattctcacttagaatttagcagcctgcttcattgagctcagggttcccaaagcatcagacaatgagaagagaaaggaggccccaaccaaatggcagcattgctaggtgaaggctgaaggtcactagaagcaagataggctggtcacctgtgggagagagaaggtggaaggagggtggaaggagaatggaagtagagtttgaagagctggctacgttcattcattcagtcaatatttcttgtgtacctgtcacgtgctaggtgcctttcaggccgtgccttttgatggacttttgccttcttctgggtgagcagaaaggagtccttgtgagtgtaggtcctccaagaagaactgaattgcagcacaatttcaacatgggcaatatgggcacctatacttgcagagaggtgtttatctgtccctagaaagtaccctcgtgcctcatggggacacatttagggtcacctggaagcctaggaccattgtcttttcctggctacggaagtgtggccctgtttagaggatggggtgaggcctggatgccaaaattacccaagcagtcagcgcagaccctgccacatggtgatattttaaaagactgtgaaattgccaaagaatttaaactccaaacctccatatgagtttgaccaaacacctactaaactctaatctctggagctgaggcccaggaatctgaattttaacaagcaccttggagattctggcctctcaatgttgcctccactgccagagttaaagatgccatgcttggcaaccttaggtgagagagagccgttcttggtagcacactgaaaaggtgagaggtcacagagagtcttgggggacccagactctgtaaatttctgcagaaatttgatggaaggaacttcagtcactggccaaatagaatcagaaaccccaggatcttcttcccctgaatgcccagagtcttgacttacaaacttttgttttctggcacaggcattcagtggtgggactttgggcatcaattcctggctatattcggctgttctcacactgctaataaaggcatacctgaggctgggtaatttatgaagaaaagaggtttaatggactcacagttccacatggctatggaggcctcacaatcatggtggaagatgaaggaagagcaaagtcatgtcttacacagtggccggcaagagagcttgtgcaggggaactcccatttataaaaccatcagatatcatgagacttatttactacaacgagaacagtacgggggaaactgctcccatgattcaattacctccccttggccccacccttgacatgtggggattattacaattcaaggtgagatttgggtagggacccagccaaaccatatcactgactatataaccctgaatccccacaactctctggctctcttggaaattccatgacctcctgagtgacctaccttttaatgaatctccttcctgcacagccagccagatgtatttctccagggatgagctaagaaccccaacggcctgagtaggcctttgttggaggaggtcttagtttccaactgagcatgcagatcaaggaggtggccatgagtggtgccaaggaacacaagagtcacctgaaagcactcagggcaggccaagtgagccctcaatgcagagggtgatagacacagcagagggtgactcatttccgtccctgctggcacctgggctgcagcttctgtgaatgaagaggtgttagaacagcacctatcgggagcatccttaggccagaatgaagaggtgcaaagtgagcggttcatatgctcaaacaagccttaaaactacacctgcagtaacagaacctgttaccagcaggagacggaatggtggggccaaaccccaggtacctgaacgaggagaagggacagagtgaaatgccttgatgtgcagatataacgttccccttcctaagacgttcatctaggaatgaagcctgggctgctgatggtgatgtttgccgtaacacattggcagcatttggaagcagatcagggagcagtagtgaggttatcgcaacaccaagcttcaaatccacctgtcccttttgcatgcagaatgtcaggatctgtgattaatggaggcctgtagcccaacaaatgagaggaggtgtcattgtttgggctgctctctgctctgattaaataattaatcactccctaattatgaaagacaaaactttgcatcctgccccacagaccttccaagggacttatttggggagtaacaatttagaggagatgtgatttccagcttctcagaaagcccatggccaagcaaggctgagggaatatgtggaatgtgcatatccctctgttaggtaatgagttctccagggcagagcaggtgacagctgttccaggactataaaatatgggttaatttgaagcagcttgcaccttgattcttgcagacttacaaaggacactttagggaggaagttcaatgtcatctgctttttttttttttttttttcctgggcaactaggcatgaggatgacaggtaagtgtgtggacagagctatttgcatcttttcttgccaggatgggcctgacaatgggtccacttccttccatctcccaggagataggcaaatcatcaggaattatattcctttatacctccatcatccctgacaccaccattcggcctaccgacatctgtttcccaagccgagttcctccatccctttacgtacactgcttttttttttctgaagtcttgagccttcatatgtccctctgcctagtttatttctttcttaggtctaaactcagttcagtgtcacttccttcaggaagccttccttgagttccctgcctgatgccaataccctctcccatactcccagagcacttatgcaggttgcttccctctagatgccaagcttcttggtattttaagttcctccatacagcagctgttagcaaatgtttgctgaatgaataaatgaacacatggatgtataaatcaatcttattcactactcagtagattattaattcgttgaatgaataaatgaacaatgtgagctaaacgtttccagagaactatggtagagactggtggctgttccccaaaccttcttcctgagcatgcattttccacctttccttgcagttagtggagggtgagggggaaaacctgggatcacttctagttttttggggagcagagccctccctgctgctttgattttacgtgagtgagaaataaacatctatgacatgcagacactgagacccagggggcctgtctgttacagcagctactcttgccttaaccagcacacaacctgctagctgcaaagcctgtctcctggctgatgtcccttcacatggcactgaggtgtgggcatcttggctggctgtcagagagcagctttgctctcctccctgactggaaagcaatgggatttaagagcagttttctgggtgtgatcttaccctgctgtaacctagatcagtatgcctcaccctgtcatgtactttatccctgtaatgtacatatgaatcacctggggactttgctaaaacacagattctggccgggtgtggtggctcacacctgtaatcccagcactttgaaaggttgagttgggtggatcacctgaggtcaggagttcaagactggcctggccaacctggtgaaaccccgtctctagtaaacatacaaaagttagccgggcatggtggcgtgcacctgtagtcccagctacttggaaggcttagacaggagaattgcctgaacctgggaggcggagattgcagttagccaaggtcgcactactgcactccagcctgggcagcagagtgagactctgtctcaaaacagaacaaaaaacaaaaaaaccaaaacaaacaaaaaacacagattctgattcagtgggcccaaaatgggcctggaaattttgcatttctaacaagccaccaggtgatgctaatgttgcttattcacacaccacgctttgaggagtaagagtttaaaagaggggctatcagctacagtcacctgttacctggagtgaatgccactgagaggtgtgaaagggcaaagcaacatccctggagcaggtctcagaatcccagaaggctggtctcaaacaggtcgctccctcctcccctggaacttctgattttactggtcgggcctgaaaacctgcatctctcacaagcctaagagcatgtcgatgctagcattccagggactccttgctgaaaaccattggctttagggttgacagcgtgaacttgggggccattccggctggctttgaacctaggctttcccacctacaactctgaactctggaaactaacaagttacttacactcctcatgcctccattttctcattggttaaatggagaggatgctagtgatggtgttcacatgagaaggttgcagtaaggattatgccaagatatggaaagcctgtgtctggcacagaatggttttctactagcattagctagtgctgttacactattagaaagtgcacctgtagatgttagagagacttaggttctaactttagctcatcccctaacaacgctgtctctgagcaaattacctaacctctctaagctgcattgtctccatttgttaaatggaaatcaaagcctttgctttgtaaaggatgttgtggggattaaacgagaaaatgcatataaagcatcacataacacaaaagtagccattgctaaaatcaattacaacaagactgacttctggcagattgacatatgttcttgccctgccataaaaagccaccaagctcacaaggttttttttatacgtaaaaaacgtttttaattgacaaataattgtacatactcatggggtgtgtattagtctagtctcgcattgctataaagaaatacctgagattgggtaatttataaagaaaagaggtttaattgcttcctgggtctgcaggctgtgcaggaaacataatgctggcatctgcttggcttctggggaggcctcaggaaacttacaatcacggcagaatgtgaagcggggagcaggcatatcacacgggtagagaaggagcaagtggggtggggggtaggggagggctgctacacacttttaaatgattagttctcgcgagacctcacttactatcatgaccaaggtggatggtgctaaaccattcatgagaaaccaccctcatgaacaaatcacctcccaccaggacccacctgcaacattggggattgcaactgaacacaggatttgggtggggacacagatccaaaccatttcagggtttatagcgatgtttcaatacatatactgtatagtgatgagatggggataattaacatatccatcatctcaaacatttatcatttccttgtgttgggaacattcagtatcttccttctagccatttgaaactgtttaatatattgttgctaactatcatcatcctacagtggtatagaacactgatacttatttgatgattatagaagctggggaatgaatataaggaacttcattatactattctatttttgaatatatttggaaatttcaatattaaaaaaccttttaaactatttgcaaaaaaaacaaaaaaacaaaaaacaaaacaaaactaaaaccaccgaggctgcatgacccttgcaagttgctgaggtaggcagtcagctggagcgaaactgttgcaacatttcttgtatattgagaggccgcgagtttgagccactcctgttagttcgaaccagtcctgttcccaagactccctgcaggcacaggcttggccatcattccagctctgccccagcagtattccttcatgccagcatctttgggtttctggatgaagttttcagcaactgcataaaattccatttctcttgccagctgggcaagagatagcttcatgaaaacaaagccagaatacatggggccagaaaactcctagccttcttcctgcataggaaaactggatttctctagaaggctcaagctcctgggtagagctcctgggccacttaattgggcagtcccccatctttgtttctggtagtgaaggggcccaggttggtctcctttctaagtctctatacacaaagcccttcttcagtggaaaagtcttgacatatactagaagtctcattcacctttcagagccttcaagaatcctgatgtgctttgactcctgttcctgggagaggccacagaactgttctggagctgaagttcaagttcaaatatccatcactgttactaagcctttacatagcatgttatttgtttccagcgggctccgtggtcacttaagcttgcttgtatctatctaaatggagtgtttttcaccctcatttaggtaacgtcttgcacctttcatactgagattggccattttatttgcaactcattctgcaacccatttgctcctccaatgtcccttataaggatgcagaggattccgtaaaatgccacagagacctgcgtttagggcaaatatttgatcaaaagtccaccaactcacatgagtaacacttctggcaacctgtgcaatgctggtacaaagtaaatgaaactgtcctgagcaggtgttacaaatgccctccctgagagtctccagggcctctttattcaagcacagcagtgtggtccaaccagatcagagtcaggagacacaagttttaattccagctttctcaaaatctccttttgtgagcttagacataattacagcacctgggtactaaacacctctgttccaggtgccatgatcattgcctgagttgtaattctcgcagcagccctgcaggatacctgctattacccccatttcacagataagcaaactgaagctcagacgaatttaagtgggccggacacggtgcctcatgcctgtaatcctagcactttgggaggccgaagcgggtggatcacctgaggtcaggagttcgagaccagcctggccaatatggtgaaacctcatctctactataaatacaaaaattagccgggcatggtggtgggcacctgtaatctcagctactcagaaggctgaggcaggagaatctcgtgaacccaggaggcggaggttgcagtgagccgagatcatgccactgcattccagcctgggtgacagggcaagactttgtctcaactacaacaacaacaacaacaacaaaacaaaacaaaaataagaatataagtggctcaatctgtaacaagtggtacaatcaagattgcaacccaggggtgactgatcaccaaacgggattgtatccagcactgcattacctttcctggcctcatttttctcacctgtaaaaaggcatgtttagagtgtgtgtaatttttcacctctagctgagcccttccttggtgacccatgataacacccatgagcaactacatatggttacagacagcatttggagaaggacagaaagacagaagatagtgcttcctttgacaacgtcaatttttcagtgcatgaagccctgtgtagtgctgttttctagcttcccctttacaaatgaggtcgacgaaagtaaagttaatgaagcaactcagctatcaccggaatgcagcagaagtaatcaagtccaggactaagggacagttgccatgacatcccaacgcatgcaccatgatcaccgtcgatgactatgctcttctctgattgatggcagcttgcctctctgttcttgtaagcaaatgtgataacaatattaaacaattacaagtagtgtccccagctgcttctccactgcctttgaaatattattttagatctgccaaaataattgcaaacccattaacatggaagggggtgcgtgtatccctgccctcctgagtagtacattcacccaaagacaacaggatgacaagcctccttccaggacattcagagacacagtcaccctgccaagcagactgagacttgcaaaggtccaataccctttttaagaagcttgctggatgacctctttaaacataccagcatgaagaagaggaacaatctgggtgagaggggcgttttgcctgctctaaggttagaatgcaacttgttcaccaaagtgtggttatctgacctccacaatgctggagcccagctaaatcctgcaaatgtgtatctaccactgactatggaaaaaacaataatgtgctgtggggaatccagtctctctctctctcacacacagacacacacacacacacacgtgcacactcatgcgcacgcgcacacatacacggctcctgctatctcggaacttccaggctgataaggagaaagtgcaagcattagtaggtaagtctgctaccaggaggaatgtgattaaaaacaaaacaaaacaaaacagaacaaaacaaaacaaaacaaaaacagggtacaacacagtatgatagaagcaaacaaaaggctgagatgagctctaactccactttatttactaaaccgatgataaaacagtgtatgaaagacttgcctggatgaatctcattttttccagtgttttctatcacagtggttggaacttccatccatccgtccaaccatacaattgtccaaaaggaaaaattagggttttctctaagatcatcttctctcttatcccttatgtcctcacccatcacaaaaccttgcccactttttttttttttttttttgagatggagtctcattctgttgcccaggctggagtgcagtggtgcgatcttggctcagtgcaacctctgcctcaagggttcaagcaattctcttccctcagccttccgaatagctgggactacaggcgtgctccatgacacccagctaatttttgtatttttagtagagacggggtttcatcctgttggccaggattgtcttgatctcttgaccttgtgatccacctgcctcagcctcctaaagttctgggattacaggcgtgagccaccgtgcccggcctgccttgcccacttttacctactcagtttctctccagtccctccgctttctccataggcactagcaataccttggctacacgatgaccaccagcagcagctggggaaaccagcaccctgctaacctccaagcaccttctcccatctgcatagaatacgtcttccctttagttagcttgggtaacctcagattctggaccacccctgggctgatagcaatttctagtgaaatgcctcaaggtagaagtataatctgaatcaccttgcagagaggattgggtggctatctgaacaaaatgtgggtcttataggaaggataaaggagaatacttcttggggagaagaaatcaataggaatgtgcctcagggaaaaaatgtgtaccagaggagaatgaatcgtaatgagtcatttgcaatatggcatgtttattgtggctcgggttccttggccctgcacagagctgtcattcactcacttgacaaatatttgagtggcagactctagggtcacaacagtgagcaagaatgcacagttcctgcccttatggagcttagagtctaatagggagggctgacattaactgcagcatcatgtaataagggaaactgcagcaaacccaggtgtgatccaagagctgggaaaatggactgaccacaggagggaggcaggaaagtctgcccctgggaagtgttacctgaactgaaatcagggaggaaattaggcaaaggctcagcattcaggtggaggtggaagctggcccgtgaggagggtggcctggagaggttggaaaacacccaggtccttggagctcttgctgagctgctgaattagccagtgctggctctcacctgacctctgctcttcttgttttgcaaggtcgtacattttcttttgtgaaaactagtttgagttggggtttgttagtgttctgagtccccgtcctgcgaggtagacaggaggccttgctgtactctggagaagcgaaagatggagaaggtttttagggcctggagaagaggccctttaagggagcattgaataagatggcactacagctagacggcccagattcacttcctggctttctgtcttgtctctgtgcctcagttttcccatctgaaaaatagaataatgatagtgtctgcctgtgcccgtaagacccttcactgtgggaatggctatcttttttgccttttcactcacagctctgttcctgactatatccccactgaaccactcattaacgtttaaaatgggcatgttttctctgcaagattttgctaaaggtatttccctcctcaaaatacctttggtccatctcctcctcttggaatccatccttcagaaatcagttcaaattccatcactctgaagccttcctaaattatccccagcctcttttatggtttgagccattttccccatatttatattttgctttctttctttctttctttctttctttctttctttctttctttctttctttctttctttctttctttctttccttctctctctctctctctctctttctttctttcttccttccttccttccttccttcctttctttccctctttctttctttctttctttctttctttctttctttctttctttctttctttctttcttttcttttcttttcttgagacagggtctcactctgccactcagactggagtgcagtggtgtaatctcagctcactgcaacatccacttccgggcctcaagcaatcttcccacctcagcctgctgagtagctgggattacaggtgcatgctaccaaacctggctaatttttatttattttgtaaagatagggtttcaccattttgcccaggttggtcgcaaactcccgggctcaagtgatctgtgcacctcagccccacaaagtgctgggattagaggcatgagccaccccgcccagcatattttgctttctggttacataaaattataagtacacatggtctccccttccactcaaatgtgaagttattgagggcaagccctattagcatagccatatttcaagagtcctgggcgctcaaatctgatgcaaaatttgccatgcttttcctgtgacgatacaataaattggcttgtttgtgcatggatttacatatcatacctgagcaaatctaagatctaagattttctgcctcccaactcagcgggccgtatgttactgcaggcaagactcctagttttgtaatgagaaaatgcacgtggtaacatcttgtaggttgcaaagcaccacatgcatattaaataccttcatctttaccaccaccattatcatcatcactgtcagacccgacaccactttcagcatggcctcagcactcctttaacctcacttccttccatctgccctacactctcacccctgagttgtgacagtcagacgaagtaaagaacctgaaaaaatgctgggtgcacggatgcatggatgggtgcctggatggaaggcacgctggtcctggagacagactcaactatgtatgatgtgttttgttttctagctgagaaaataagcttcccttgcaagcttatgcaaattcacatagcaacagtgcaggtgtggcccccccaataccctatttcctcttcccttctcaaaatcttctccaaacccatgacttgcctgatgagaatcaacctttccatgaacagtggcttccatctcaatagcctctaatcattctgtctttcccctccactgtgaacgatagtgaagtaccttattaccgtatatctagttagcaattcaaggaaccaaggcacagagacattttttttctttattcattagaaaaacaatgaaacaaaaaaatcgctctgagagcctcaggggttgcaatcactaataatttaaaacaacacaattatgattcatatatatatatatatatatatatatatatatatataaaaaatatgagctgtagaacatacttagaaacattgatttagaaacgagcttaagatcacagatcacagagagggtcaataccagggtagcacccaggacagaagcctgactttagacaatgccctgctaggaaaaaaaacctccaggtggctcatctgctgggtgggaggcccgcccctggaaacagaggtatcaagagaccatcactctgggaacaaaggtcattctaacatgcctgtcagtggagtcttgcatgggtcgccttgggtaattagttctgtgtgctattttgctgggtttatgtattcctattccttcatctttcaggactcctgggaaatatctgaaatataagacaggaactctgacctttgggtggtattaatagctttaattaacactcaacaatgagaagtcagtggttgatatttgaaactggcaaacttccttgcctgcaagctgccagattttccatctgtgggcacctggcacctggctttccatggctggagctggggcgagatgttccattccctcttccctgtggtggccctcttggttgtcttgctatggttccaggcttgttctcactccctgcctcccaggctgtgatctgtcactgtattctggctgccgcagcgcttgcgggcctgctttgctctccagcccaaggttcccagcctcctgagtccctggtgatgttcatggatggagggaacccacagataccttccattcttctctttgctttagccagataccttttgccctccatcaaaccagagactccttcctccatgacactggccacagtaaatattctttttaaattttttattatttttaaaaactaatttgttaattttttgtacagatggtctcactctgttgcccaggctggagtgcagtggtgtgatcatagctcactgtaatcttgatctcctgggctcaagtgatcctcccacctccacctcccaagtagctgggactgcaggtgcatgccacaatgtcaggctaattaaaaattttttatgtagagatgaagtcttgctatgatgcccaggctcctggccataaacaatcctcgcaccccggcctaccaaagtgctgggattacaggcacgagccatcagacccagcccatagtaaacatttttaagtttcttctttaggatttgttggcatgtttggtgtgtaaaaagcagtccccggtgatattggtaagcgcagactgacacatggctggtagtttcttattcaaatttgaaaaacgatgtgatgatcatcgtacctaaaaactgtacataagccgtacaagctaagcataggcattgctccctatctgcgtgcctatatcggtaaatacgagtatatttatttgacatagggaataaggcgtttacatttatctcaaaactccgtagcccctggctcttactaggcccaagctgtttggcttgggattaagcctccacacaatttaaaaattctccaaagtgagattcaaattgtagcccaagtcagagctcaaacttcagtctgagtttaatgcaccatggtggaaacttagtatccttggtttgcatgcctgacaccaggaggagaaagcaaggactattgttctttcagaaaaggttagcagtgtggaattcccaggtaacacctccatgttcttctataattggccctgttacaccgtaagctcccagttgcagcatttgtagtagagaatgtaaccacacaaatccccaaattatacttttgctagagaaaaggaaacaatgaagcacagagttcacaaatctctcctctaacgacaacacatctaaaagtacaaggatgggcaaaaccaccagcaagaagagaggctcaggcgatgcagaagcttcatttgttgagggaggaactctagaatgaacagaagatggcagagtagaagcaaagccaaccttccggctgctttagctccttagcccaactcactgtgccccccccggccgccctgttgtctctaggtgctgagtcactttggttcaatacccagcctcgaagatgaagtccagttacgtgtgactgttctggagactgtcgggaaagacacagattccaaacatgaacaacacagacagcataacttagttaagtgcctgtggctccatgatgtgactgccccaactcccatgacaaatgtcaggcttccatgtgaggcttctgatccacttgtcagttgattaagagatatttgggcatagacaaaaacatattttaaaatcttgactcaggaaacagaggcaaacaagataccacgccacgagatgaataaggtcattttctgtactctgctgactcaagacgtctggcccttcctctccttccgctcccgctagaagctgtcctagctgggagctggactgttgaaatcatgcacctctggccttttcttataatcacacaaggacctcttcatcctgatcaaaacacctgcacctccatcgccctgaccgaagacccctgctttgttcacagttactctttggtctacagtcatgccggcaatttctaatttcttatccctgaccaaaaggcataaaattcaaacataaggccaggtgcagtctgtaatcccagcacttcgggaggccaagacgggcaaattactggaggtcaggagatcaagaccagcctggccaacatggtgaaaccccatctccactaaaaatacaaaaattagctgggcgtggtggcacttgctgctgtagtcccagctacttgggaggctgaggcaggagaatcgcttgagtctgggaggaggaggttgcagtgagccgagatcatgcctcagtactccagcctgggtgacagagctagactacttctcaaaaaacaaaaacaaaccgaaaaccaaaaatcttaaacatccaatcgtgggagctcccagagccacagttttctccccaagttgtctaacaaccagaatgagaagtattgagggaaaaagagggcagagcaaatgtggagaggggaggctgcctggggtctcctgggagcagacagcaagctgtattccccttttaatgtccacgactgaagaggttgttatcaatctggctggcccctctttgttccccacgtgtacctgggaaagtgatgtgactctcatgatggaaaggggaggaggaggagagcagagacagtagatctggagtattccccaccacctcccattcctcctctttgaatcctctcatttgatgttgggagttttatttgcacatggcaggtgagcagcccagggctgtctgggaagttgaggatcaggacacatcatggccactgtggggctcccacgcaggcccagctgccagagggcctgctggtgggaagctctgccctctgggagtcacacacgatgaatggagagaaactattttatcctgccttaagcatggtatgccccagggtgatctactcaatgggagtgtatttcaagcagattcagcaacaatatttcctggtgccattagaattctaaagacaaggcagccatcctggttctctgttttacgaagaggtaatcctattttatcctcatgccatcatcagtaagatcagaataaggataatatcagtgaagtaagagtaagttagttttttaccaaacttcaggaatatttgattcaagatttcatggcagaaggaagtgcatttttgataaaaatgatttcaatttagcacatgatgaggtgaatgaagttgaattagcaggattagatgacattttgctaaagagcacttgagacactgctatttgggtcgtgaggccttcaagaaaataccactttgttaaagcctgaaggctttaaatataaagctggtatcaagtaaataatgaaacagtttgcttttaagcaccaaagcgatgttgagaatgtattaggttggtgaaaaagtaccaaaataattacttttacaccaacctaatagtcattctggtgtctggccatatgttttgaaggcatttgtgggtcccttatgcatgacagcaccctctctagatgcttgggcatctcaacaagaagcaggactacacccacttggccaccatggggagggcttgatggccatggctggtgacagtctgagcctgcaggacctcagagttctagcagctgctgagtctgggctgccaacacactcatcctttgctggctggaggaggaaggaccaagctcccttagagaaccattctgttccctgttctcactcccatgtgctatatcctgtgtggagagggaggagtaatcaaccttcactaccctttttgtctagaatctgcctgtttcttctccacaaagacttggagaaccatatcttatgagtctgtattccctgagtaaaagcccatcatttcgaggacaaggggccaacctctaactccacctctggaatgaaaagttagtctcacctatgatgaattcagatgggaaaatagagtttgctgggggcatgtggtgatggacaggaagatggggaaataaggtgaagttagaagaacttgtttcttggtatctgattggagtctatcttgtgaagcctctgagtctcggccaggctgggttctcctctttgctttaactgctagaaaatatagagccatatctgtgatttaccttttgataatttctacaaggtttctggtaaatagtcttgtggactgactttatcttgggcttcattttaccattttctctttgtctttttttgtttattcccattctgctgtatagcatatgttttgtaacatgtcttgaaatctttttggaatgagaattggaaagaatggatggatggatggatggatggatggatggatggataggtagataaatgggtgaatgggtgaatgggtggatagatgtatggctagatgagtggatgaattgatgaatggatgggtagatggatggatggataaatgggtgaatgggtggatggatggatggatgggggataggtggatgaatggatagatatgtggatggatgggagataagcacatgaatggatagatatgtggatatatggggggatgaattgttggagggatggagggatgggtgaaaagatggagggattggtgaaaaaaatgggtggatggatgggtaggtgggtagatggatggatgggtagatggatggataaatgagggatggatgaatgggtgaatgggtggatggacggatgagttgatagatgggggtacaaatgaatggatggatgggtgggtcaatagatgggtggatggatggatgggtggataagtggatgggtgagtggatggatagaaagtcatagagacaaagataaatgaagttgggaggtgtggagacccaaggagtgattggaaaatcatgaaacaccattgtctggctgttgacaagtgtgacaaaagaaaaacagaagacttaccaaagataaagactcaaccaaggttaaaaacacatgaccacaaaccctgttacagttgacatcagaataaaatgcccttctcaattacataaaagggaaattgaagagatgttgagggactaattttttttgaggactagaggttgcacatgtaacctacaattctatttccataattgtttcatgaagaaatattttaaaagtaagaaaacaagcattctgtccatcagcagtattgaactggaaattctcctttcagattcactttttcaagttttcagagtgttaaagcaaacttaatatggcctgagaaagaactccatacttctatatttgagtccttgtggatgaactgtaacctagcttaatagtcaaacaagattgaaaacctaacttaggagtatgtgcctgtaacaatagctgagtcttgaccaatcccagcagccctacttcaaccactcgttgactgctaagtgtccaaactgtgttcaaataaggcaaacaccatcctgtaaccaatccagctgtttccataccttactgccagtttctgtacatcatttcccttttctgtctataaatcttcttccaccatgtggctgcgttggagtctctgtgaatctgctgtgattctgggggctgcctgattcacaaattattcattgctcaattaaactcctttaaatttaattcagctgaagtttttctgttatcaagaggcataggggttcacagatgaactctcacaaagacatgaggaagattcaggtttgtgcaagcacagaaaaacatatatgactatgaagatatatcacagatgcaaaggggaacaccagatgatactttctatgaaaatatttatcaaaaaccaaattaaactatgatgcctgattccacttatggaatataaagtgctttattttattttgcgggatctacttcccgcaaatagaacattggactgaatacaatggtcatggaaaatatagaaattattcctggtattaggagaaactgtatattctaacaatcgcacaaataaagatgctatattgaaatgcatgttcaacttattctaaacataccgtggttccccctgacactgaatgttgcttgtcaccaaggttggccctgactctctggctgccatgtctagccaggccgtttaaggttttcctatcatcttgttaattaatccctaggaaccagtaggttccaagtgctcataattcgtgttatgcattttacaggaatgagacagtgagagaaactcaggtgccaccactggggtaagtgagaggaaaataaatctcgggaccccataatcaataagccaaagcgaaaagtcaggctgtgaactgcatcagacaaacctgcctcccagtttactcctaaatatgacaactacaaagataaaaaggctacatacctccctcgcaatttgcccacaagaaaattccttgtggaccttgagatgttaaccccaaaacagttctgttgaatttcacccttgaaatgtaaatggtagcttatcttcacagggacagaaagttatccctctgctcacctgagacaaatacatgtctgatggcttcctctgccctattgcttatgtaaaaatgcagatttactgagccagactgaggcataagtgactattcctctaccccccaaccccactcgtctcatatgtaaactgtgtactcagtgcaaggctgatcaaagacccaaaagaatgccatcatttgtctcttatctacctatgacctggaacctacccccacccctgcccatccccacccgcttccagttgtctcgcctttcctggctgaaccaatgtacatcaatgtacatcttatacatattgattaatgtctcttgtcttccttaaatgcataaaagcaagctgtaccccgaccaccttgggcacatgtcatcaggacctcctgaggttgtatcacagctgcgtttttaaccttgacaaaataaacctaaatggactgagacctgtctcaaatacttttgatttcacaggtaattaacgccaaattgtggtatacctcctgtggatacacatttttgtccatgtcatactgccaggtaactttctgatgattcatatcactcacctgctccccatcaattattgtcgtttgctgattattcccattcaacaagagccctgccatgaggcaaagccaacaagagtcctgctttcctgatctctggtgatccagcagacatgagcaaatgttcataaggcctcgcctccacaggagtctcctcacttcagctttgcctcccttccactggaaagggatgcatataatttagacctttattcattaaaaatcatcttcctctgtgggaataactcccccttgcccagtggaaggatgcatcctgactctgaaacaagatttgcagtctacacacaagcacatagagctatttgatctgtgcttttaattctgcctggcaatgtgtgtgttttgaagctaagagtgataaaaatgtgctgcatttgactgaaagaaagctttgagttgatttggtgtcttcctctctttcttcctctcccattgagattcccatcctttgaattttgccttctgacttgaatgctatcagcacatactgatttcaacatcaagtaattgttggctaatatgagtgaagtgattgaagttgagtagagaaggtagagaggcatgatgaaaattcatgctacgtagcccaggaaaacctgttcttggtgaatgtaaacacctcccccaccccagtttccttgagtggatctctctcttgttcataccccgcaaccatctctcttcattagccatcaattgcatatatgtttttcccacctgttaatatgcaatggcactccctgccctcctttgctacgcactaatttaattttaattctagctaaaagcattttttttccttgcctctcctctttccccttctctctttcttttactttcatgagatgagattatgtaagcccccagtgctttttctctgtgaagcattttggagatgagcaacccaacatactttgaacagagctgctctgcaatcaccctgccaataagcaagtgtgtgcctgcccttcacaataagaaggcagttgttagatacaaagaccaccttggcatcccattaggtaagcaaatggggccaaagtgcttagaacatctttacctaaaaggaatggaaaatgggtcattgcattttctactagtgctggacctagaataaatcaagaataaacttgttcattcattcacaaacactgattaatcactttctatgtgcccggcccagtgtcaggtgttggtaacaccaaggtgaccaagacctgcctttgctctcaaggactcacaatatggcaggcaggaggaagcagctgagtcctactgggtccagctgacaaagcctctctacagcctcttcctacaaaaagataatgatctatttctagttatgaagtaaaggtttgatggcaatgatagcaaaataaataaattcaacctgctttactaacttcctaacgcgttgggataatagaccagtagaaaattgggggccaaaggccggacgcggtggctcacacctgtaatctcagcactttgggaggctgatgagggcagatcatgaggtcaagagattgagaccagcctggccaacatggtgaaacaccatctctgctaaaaatacaaaaattagccaggccgtggtggtgcgcgcctgtaatcccagctactcaggaggctgaggcaggagaattgcttgaacccaggaggtggaggttgcagtgagccgagatcgcaccactgcactccagcctgggcgacagacagactccatctaaaaaaaaaagaaaaaaagaaaaaaagaacagaaaattgggggccaagtaattttaacccactgctagcatcggtaatattcaggtagggcaactgctgagataagctgttaaaatacaggaacatttttctactgtttgtagatagccattgtccttgagccctgtgagtgtcctggtccccatagcctggaatgactggctacccctgccccttccctgggacctctggacctccaagtgatccatcatggctaggaatctcaatgatcttgctctaatgcaatgagtagcattctttctgagtggcaagtatctgtgtcctattgtttgttaacattttttgtaatcattcttgtttgtattgttactacataaaaatagcagaagcaggaagaaatgtgcatggggaatgaagccaattatttttttggaatttggcagtcaaatgatggttataacaatggtatgatgtcagagatataatggctatgaaataagaagtatcttatgaatataacttagtttacaatttctgtatttgagtcaactgtgtcattccactttttaaatggtccgtgctaaaggttgctgaagtcataagctaagcaaccttatgtccttatgtccttatctatattgaacatagaagttaataaatcctatcaaaaacatatttctttttttattatttattttttttaatttttttgagacagggtctcactctgtcaccaaggctggaatactgtggctcaaccatggctctctacaaccttgacttcctgggctcaggcaatcctcctacttcagcctcccaagtagctgggaccacaagtgcataccaccacactgggctaatttttttgtgatttgtagagatggggtcttgccatgttgcctgggctagtctggaatgcctgggctcaagcaatcctcccacttcagcctctcagactgttaagattacagacatgagtgacagaacctggccaaatatgtttcctataagacatattgttactcttgggcttccgggacagcagatttggttcaattatctttctagaaacccctctatgttaatctctatgaattttctacatataatttttttctttacctttgtgtatatccacacactactagacaatttagaaacactataactagaagatgggctttcacaaatgcattgtgtattttctttataattcacattaaatcatatacacgtaaattttgaaggctacctaaattcaagtctctaggatagcaggaggaaaatgcattttattgtacatattttattttattttattttgagatggaatctcactctgttacccaggctggagtgcactggcatgatctcggctcactgcaacctctccctcccaggttcaagcgattctcccacctcagcctcctgagtcgctgggactacaggcgcacaccaccacacctggctaatcttcgtattttttagcagagatggggtttcaccatgttgaccaggctggtcttgaactcctgacctcaagtgatccacctgccttggcctcccaaagtggtgggatcacagatgtgagccaccccccttggccggaaaatgcgttttaaacaaggatttcagtacctgccatatgtcaggaaatgtctcgaacgttttgtacacattattgaatactcacttccaacccgttgagatggtgttattttccctcatatcatttgggagggctttgaagatgtgagatgttaaatggtacacgacctttccacttaacctctgaggccgggcatcagccccttctccttgaaactcttcccccatttccttggtatcatgcctggttcttctccactcaatcattcatgtgcattctgaaatgttggtggctccaaagttttctccttagacctattctctttatggatccatcttccctctatatgcttgtaattcaaaatctatgggaatggagaggaatatccttcacatgtaggtatatatatatatctcacacctttgctccactcaacattttcaaatcccccatttgttacagaaaaggtctgaacttttcaggaaactagggagtttgtcaccacctctcccaaataaagcaggggctcagggagactgaagtctggcttgagagcctggattaggcaaagtggcagggaccggccagcaattgtagaaggacagcagagattcagccacagggaagtggcagtccaaccctagggacaccacccagggagctcagctgggaggtggagcacaggcctggtaagaggacagatgcccaggagagggaaggtttcaaggagaagcaggagatggagaatggacaagttcatcagcgtcagaggcagtagcaatctggtgctttatcgggtacctgtagccttggaaatgggtagagaaagggccttcgaagtctccactcagaagacacaaagcaaggcacaaatatctacagggcaccctggatgtgcccacaggatccaagtcgctgaggtattgccaaaatctcacaataggcatttttatcatcaattttacaggtcagaaaatgaggctctaacagcagggcacacaaccccttcaccatctgccggatgctatccatgcactctcacctcctgtgattccttgcccattgtatgattttatataggatgtatgtgacatcatgcaatgtcatgagacatcatgaaacatcatgtgacactctcgccccaggggacacatcctgaaacacactgagcacgtacatcacattgctccaccttctgcccctaaccccttctctacccctgccatacccccttcacctagtgagatcctatttctcctttaagcgacatctcagaggccttttcccctgtccttcgatgatcactccagcctcacccacttctcacttggggtgaaattaactgcatgtttccttgcactgcacctggtggttgcttccactttcttctctccagcacttctcaccatgcggtctttctgatttagagttagaggtgtacgtgtgcacatgtgtgtgtgtgcctgcttgtgtctgtgcatgtgtgtttcacccacaacattacagctgcttgtatctttggctcctctgatgcctggcgtagtgactgaattcaataaaggtcgatagcctaaaaaatctcgtttccctttaggcatccgaaaatgtgtatttgctctaacaggctatgttgccacaaagaaagattcatgagaaaggcagggtttgagtgactggttttgattaggatcaataatatatgacaaaactctaataaagatggagacattataagaaatagaaaaacatttttattttaaaaaaaaagctgctacaaacaaaaaagttttttttttgttgttttgtttttgctagaaagtcccagctttcttaattctctgaatatgcttcttctctgtcatgcaatcgtggttattcaatacatgtgcatcatttctatacatgttctggtgacagtctccaagttgttgagcacaggttttctaagtaaagcgcactgttctgctattaagggaaactgtcaggcaatttaagcagaaaatttgatctagtaaaatgctgacccttccaaagctgtaatctcatggtgactgcttcttaaagtctgactactgtcaaaaattcatcatatgccctaagagatttaagagaaacagaagcactgagctacgcttgcatcctgaattggaaatctggctctaagacatggatttgaaaagttagtgtacaataagcaactcaaagctaacgtttgaatcactattaccatccaggactttgtaacatggaagagaccttgaaaaattatataatccaatgcagtcatttatagatgagggaaactgagtccagatgggtaaagagaagtacttaaagccagatagtatttcaatgggtagaatgaaaacgcaagctttttagaatatctgaacttggatcttcccactacatttggctgcctacatttgttcacatactaaaaatggaatccaattaaaaaatgggcaaaggacttgaatagacatttctccaaagaagaaatatgaatggccaataaatacatggaaagatgctcaacatcactaatcattaggaaaatacaaatcaaaacaacagtgagatgccacctcacctcattaggatggctatgataaaaaaaataacaagtgttggcagggatgtggagaagttggaatccttgtacactgttggtggaatgcaacatggtgcagctgctgtggaaaacagtatggtggtttctcaaaaaaataaagagaattatatgattcagcaattccacttccgggcatgagccaaaagaactgaaagcaaggactcgaagagatagttgtacgtccatcattgcagcattatttgcaataaacaagaattggaagcagtccaagtatccaccaacagatgaacgaataaacaaaacatggtatatacatacaattaaatatcatctagccttaacaaggaaggaaatcctgagacaggctacacatgggtgaaacttggggacatcatgctaagtgaaataagctggtcacaaagggacaaatactatatgattcctcttaaataagtttactgttatagttacattcatagacacagcaagttgaatggtggttggggagatggaattgggaattcttatttaatagggacagagtttcagttttgctaaatggatggatggggtgatagcagcgcaacaatgcgaatgtatttaatgccactgaattatgcacttaagatggttacaatagttttttgttgttgttgttgttgttgtttctgagacaagagtcttgttctgtcgcccagggtggagtgcaatggtgcgatctgagctcattgcaacctccacctcgctggttcaggcaattctcctgcctcagcctccccagtatctgggattacaggtacccaccatcatgcctggctaacttttgtatgtttgtagagatggggtttcgttgaccaggctggtcttgaacttctgacctcaggtgatctgtgtgcctcagcctcccaaagtgctgagattacaggtataagccaccatgcctgaccaatggtaaattttatgttaaatatattttgtcacaattaaaatttttttacattgaaaaatggagcaaaatgttgaatatatgcaacttttccactgagctagtacaaaggggatgggaggttttaagagttagaataaaatgctcaaaccaaggagacgctaacatgtggggcagtgcacatgacgggaaggaatgctgtctacacgctcctgaggatgggtcggtgtcctccagattcctccccacctgtgggttgaccttcaaaactttttccttgaagtttcatttttctttttgacaggaggttgtgttaaaatgcaaatcagtgtcactcttgggagctgcagcagtcacattacctgagcctttaggaaccccttggagaactggttctgaggcaagaaagaggagaggggagtggaggagagaggaggggaccgaaaaaggaatctacgcatccgaagaattcttgcttgtttctctcactcctgtttgctgctgttgtttaaatctacagtgtggtcaggtgaatctttcaagcagtgcaagtaattatctttgctctgcatcgtatgcaggtttcattatacaaactgaaaattggaaaaccctgatgagtttctgcttgaaaccacctcactgacaatagggtgtcttagcagcccttttctacctactgtctgtggcactattctatgtgtgatcattgtctcagcacaatttgtgtcactcagaagggtgatctcatgctggggtgccatctgggagtttgttctggtagagatgggatagtcgtccaggagctggcaagagacacggtgatttcccaagccttgggccaaatagggagtagctttggaagcggaaacacctagatgccttcctatgatgcttggttctggggcaggtgatgaagagcagcagaggagagggtgaaaccgcagagaaggacttggggtcaagaggagttttggaggcagcaaggattggatttaggcaaagacgtggaaagaaactctcagctgagaggtccttagaaaccatctactgctgcttcttcatttgactgatgcctggtggaactgtgggtggttgattagattgtggtgggagcaaaaataaaggaagccaaagtcatttcaaggttttctgggtgacttggagaatggcattaccatgagcttacatagaaacagaatggcagaacaaacacaggcaggtgaggacacatgcggaggcatcaataatacccacaaggaaggtgacagcacacagcagaatcgctaagtaagcaagaaagccccaggaacctcgaattctattcctaactctgctgctgatttactgaatcactttggaagagtcacttaattaacctcccccagatcaaactcatctttctcttctccatatcaagataatgtatacaattaactaatacagatttttaaaacgagttctatttataggtcattaagagactcagtgtctcagaaccacgtctgagcgctgctctttaagagggctgtggacaatgaccagtgaccgcatatgtccagaagatagacccaggctgggggtgaatgggcgataatcacacatctattgttacggtgccaggctctgttttacatacacaaatgatttaaaaatcatgacaaggtgatttcgcagatattattactagtttagtataactagtttagtaatactatctgcaaaaattatattgactgttactggatatagaaaccgaggcacagagaggttaagcaacatgtcctgtgtcacacaactgatggctggcagaattaggatttgaacttgtgctgcctagacccagaagacaggatcttaatttctcactatgctgcctgagagagagagaaactgaccaaaaacactgggggcatgttcaccttctttataagcaaggatgtaaatctctgatccagggttgcaaccatttccatttagagtaacgtgcttattttgttctgaaatgatgataattaggaccagcggatcacaggcacttgaaggcagattccagatgaagcttaaaacattttcctaacaatatcacctagaaatgaaagaatcattgcaaacggcttagtggttaaaagctctgcccttcgctggctgtgtgaccttgaagaaattacttaacatctctgtggctcaatttcctcatctcttaatgaggagagtaaaaggactcttagagtcattgtaaggattaagaaagttgatacatgggaaatacttaaaaggtggctcatagtaagttacaacaaacatctgctcctgtcttcgtcatcatttctctactgcactgaatgtggcagctagattatgtgacaggaatgttacagggaaaaagtgattcctacaagacgtggaaaatagccaggatgtcctttttctcctaacagttgtgtgagttcagaaacattaaaataggatatgatgtgatatagtctgatacaatataattcaacacaacacaacacaacacaacatgacttaatgcactacacagcaaaataatatctagcattttgatcccctctctgttcatcttacaactgttgatccccatcctggctattatcgataaccaacacgtgaagggaaaactgatgcctattagaagagacatctgatgcctatagaatcatgaatctagagatttgccctcccagaactgcctgactttttactttcagaatccttacttatgacactaatgactcaacacggcactaagttccatggaatctagttctcagctcttgctccacctgtgccagactttctccaaggctagctgtcagcttgggggacagggacaaccatgaattaagtacctttgtctcaccaagagcacacagcactcaccaggcacatgagtcaactgatggactgaaaataaatatgcagttctgcacgtaatcagttgaggcaaatgacagagcaataactaaatgtaatgcttaattacagcaaatatcatcatctatttgcttcatttcctcctcacatttgcaattttctatttttgttttaataaatgtagatatgcatgtctttaagttgcttcaactcctttttggatgcaaggtataaattagaaataaacaaacaaatgccagacaggtaggttcattgaaagatggcctggatcttgcagatttggtagcctagggcatattatcttttcgaaaaggaacacattttccttttcttatgccaacctgcagtagaaggaaagctgatgagtcagatcaggtgagagtctaaaggtcagggagggggtcagacagttcagagccaaccctgatggtcattatattcctaagagtgggagagttgcctccagatgctggggccaaatggtatctgcaggccagagatactggtaatcagtggtccctgaccattttggcatcagggactggttttgtggaagatactttttccgtggactggggagaggggaatggtttcaggatgattcaagcacattacctttcttgtgggctttatttgtattattataatatgtaatgaaataattatacaactcgccataatgtagaatcagtgtgagctctgagcttgttttcctgcaactagattgtcttatctgggggtgatgggaaacagtggtggttcataaggcattagattctcataaggaacgtgcgacctagatccctggcatgtgcagttcacaacagggtctgcactcttatgagaatcgaatgccgctgctgatctgacaggaggtggagctcaggtggtaatgttcccttgcccgccactcacctcctgctgtgtggcctgtttcctaacaggccacggactggtactggtccacagcccaggggttagggacccctgctgtagagtgctgttgggtcagtgggccctggtaccacacactgcctagattcaaatcacagatcttccacttactatgtgatcttgggacagtcacttaatgtttctgtgcctctatttccttgtctataaaggagtagattatataaacaattcctacctcaaggtgttctaggataattcaattccagtaatattcttagatctctgtctgggacgataaactcagtaatattggccgttctcattcccttaagaggaaaaccctccattaatgtgtattgtgcaatttgtacaatgtcacgaggtgttggagaaaattcagacccaccaccaagcatttgatgtgcatccaccccctcttactattctggagtccacaagaggtagtctgatgttgaaaggaaataaaagtgttttaattatccccctttagtttccaggttaatgagctctatggagtttatatgtcgtgactgttttaatcttttttatagaaactatcattgcatctttcaacatggttgactaaaacagggccaccatcatctcaaccaggaacttgcctttgcaaacagtgaatgaacagagaagacattctcaaagggattaagaatcaagagaaaaacccttttggttgttgtttaagaaacaatgagaatggccgggtgcgctggctcacgcctgtaatcccagcactttgggaggctgaggtgggtggaccacaaggtcaggagttcgagaccagcctggccaacatggtgaaaccctgtttctactaaaaatacaaaaaattagccaggcatggtggcatgtgcctgtaatcccagctactcaggaggctgagcaggagaatcccttgaacccaggaggtggaggttgcagtaagccgagattgcgccactgcactccagcctaggtgacagagcgagactctgtctcaaaaaaaaaaaaaagaaaagaaacaatgagaataatctcctccaccctgtttccaggaggacttacacacctagaaacatttagctttaagatcttgggcaagaccgtctagtgttaatgtgatttgtaggatattaggggtttacgctaggattttacttcctgcatacatacccagacaaatatggatgctcacacacttgtaattagaaatgagctataatatgcacatcactgaaaacaaacctaatttacacaccagagcacagaaataacaaaatattgataaggatgtttctaggaacccataaacatcatgaatgagccagatccaagttcttaaaactttctgggctgtacctatttacagtccaaatacatactttcatagaccattgtttttatagaaaacccatgctatgtaagtatttccatgaaaaataagttttaagattcatcaggcaaccatatgtctcctttaatatgcctaatatttaaatattagttataatggagacacagaaatacgtagtaagattgatgaaaacgtcttttaaatactccctgctcatcttttatttatgtatttatttttagagacagggtcccaccttgtcacccaggctggagtgcagtggcatgatcatagctcactgtggtcttaaactcctgggctcaagtgatccacctgcctcagcctccaaagtagctggaactagaggtattgccaccatgcctgggtagtttttgtattttttgtagagatggggtcccactctgtcatccaggctggagtacagtggtgccatcatagctcactgcagcctggaactcctgggttcaagtgatcctcctgcctcagcctcccaaagcactggaattacagacatgagccgccacacctggcaactgcttgtcattttaaacacattgttgattcatcagtccatcaacaccatatttcccaccctcaggaaaggtgggagatgggctgtgactatcagagatgtatatgggcagttgagtgagtgtgcttcatgtcccgaggtggcacacctcatcccggccagctctccttcctgtaggtcctgttttagtccattctcacgttgctataaagagctacctgagtttgggtaatttacaaagaaaagaggtttaattgattcacagttccacaggctgtacaggagacatggctggggaggcctcaggaagcttataatcatggtggaaggtgaagggggagcaagcacatcttcacacagtggcaggagagagtgtgaagaaggaaatgctacgtacttttaaacaaccagatctcatgaaaactctctcactctcatgagaacagaaaggggaaatccatccccatgatccaatcacctcccaccaggtccctccctcaacactggggattacaattcagtatgagatttgggtggggacacagaggcaaaccatatcaggtcctagtctacagtattgatcctaaaaggaaggagacaaaagagcttggacagagaagtgcatatttcatatgtggactccattggtaaaacaaatcagagcctgtgaactgctgataagtagtatcggcttcattctcagaggataattagatcgttatttccatttataatgcaaagctgaaatagagataatgttattatttcatctgtaaattgcttaattttttgcatattaattgggctgaactgttctagattacattcctgtccagccaatggatctgcttgtacttcttctaccctctcccagcctcccccaatcctgcctctatctcatcagcagttcctaaagatttcactcagaatggagtattttctttattaattaaagacctagaggctctgccagtgatttattttttcgtttctctgtgcatattcactttcatatttctcccttctctcacccttcagagagcctgctgcactcaatcccaggaggtttcctaggaaacacgcttacagccaggaaccccaaaccacacatttccattttcctcccgctcctctcccaatgagcattagctaatgaaacaaggtgaaaacacatcagcgcttttagaaattactccaccaaggcaggttatcaatttcatattcattcatggaaagatgaaggaatttgcagactctgggctttttctggagaaatctcagtttagcatcatatctaataacctaagcattggatttgtcacacgcctaggaattttacatgtgctcagagtctaagattgaggttattaaaattccttgacttcttgattccaagctccaaaaggaagttgcagtagttcctatttactgatccctcctgagtctggtagggtatctgtccactgcagggacagcaaccccacttctggctatctacccaaaggaaaataaaccattatatcagaaagtcacatgcactcatatgttcatcgcaacagtggttacaatggcaaagtcatgtaagcaacctaagggtccaccaatggctgattcgataaggaaaatgtggtacatgtacaccatgaaatactatgcagacatgaaaaaatgaaatcatgttctttgcagcaacactgatggagctggaggccattatcttaagtgaactaacaggaagcacaaaagcatgttctcacttttaagtgggagctaaataaagggtacatatgaacaaaaagatgaaaatagattctagtgattcctaagggaccaggacaggagaggagagggttaaaaaattacctactaggtgcaatgtctaatatttgagtgatgggtacactgggagtccaatcccccctttacacatgtaatacccatgtgataagcaaggacatgtaccctctaaataaaaaataaaattcatatatatatatgaaaaaacagaaccttctgcgatgagagcagcccttccttcctgcagccctttctgccttcctccctccctcccttccccagggaacatttcttggaaatgctgtagactaagttttggagatgtttaactaatttattttctccctttttctctcctttgtttttaaagggcagcaggcccctgttcccttcacttaagatgagttcccacttcagcccaaaggcagaaactgcttgcaggacactttctaccccaggttctagtttctgagaaccaagctcattcaaaagatgttgccaggcttcctgggggagaagacagagaggggaggggacgtcacacagcatgaagggagggtgatgtaatgggttcgtgtcagtctcaatacactacagtttgctggaaaataaataaatacatagccaaagcaggatatgtttgtgtagtgcttttttttttttttttttttttttttttgagacatagtctcgctctgtcgcccaggctggagtgcagtggcatgatcttggttcactgcaagctccacctcctgggttcatgccattctcctgcctcagcctcccgagtagctgggactacagacacccgccaccacacttggctaacttttttgtatttttagtacagacggggtttcaccttgttagccagaatggtctcgatctcccgacaacgtaatccgcccacctcagcctcccaaagtgctgggattacaggcgtgagccaccgcactggccatgtttgtgtagttctattggaaaagtctaaagacagttactccataagtagaaaattaaaattaaatatctgaccagcatgttggttgcattgaccaagaggacaatggggaaccaataatgtcctcattctgacctccattgtgaagcctgtgcattaagaatagagagaagccgggcgcggtggctcgcttgaggccgggagttcaaaacaagcctgggcaacatagcgagaccctgtctctacaaacaaaatttttaaaattagctgggcatggtggtatgtgtctttagtcccacctactcaggaggctgaggagggaggatcgcttgagcctaggaggttgaggctgctgtgagctatgattgcaccactgcactccagcctaaatgacagagcaacaccttgcctctgagaagaaaaaaaaaatgcagagaagagagactccttcagctgggaagagggggaacccaggcatcctagagcagtagaaatctttaccttagtctctggcagagccccaggaaggaggcaagatcccaggcggctcctgggaatgctggatcctgagcactagtgccccaggcctcggcagagactcgtggactccacacaaggcagggaagctgagagctgccctactgccctactgtggtctttccaatgagctgtcagcagggacaacaatgtattgcagtgcagagggcttttcccattttccatgaaaatgaagagtgacaagatggaaatccctgctcatccagagaagtgagggcttagattcaaacgaattcaatttaatagaataaagacattgacattcttgcacacccaggtttgcagatatattaaggttcacacttgctccacatggatgctaacttttgtgttgccttctgcatgatttttctgatgaagccaggatacagggatggtctacaccaaatgatgcgtgtactccccttctgtactcacagcagacattattaatcaatatttcattcttttctgactacacatgcacagatggagccacaggaacctccacacagggctccaggcaaccgcagcaaccaatcagaactggtataaaattggaataatttgcctttcctgctgtaagatgaggctacaccagtgtgtagagtatggagtcatatacagacggtcactcctagcatgagttatctgagaggagtgaagggtcaggcgaaaaggaaaccgagcttaggaggcttgtctccatgcgcctgctcccctcccgtctccagctctgctctgcatcacaggaagtgcattccctaggttctctggccaatcgcctttggcactgggaagcactggcagaaagtcggagggcagaataagacagaaccttctctttccttctcatagcacggcctcccctcccagacattattaatcaatcaatcgttctttcctaactactcaggcaccgatggagcagtccctgctgtaattctcactcctggcagatggctccgcctctgccctccagtaacctcctttcctggctgtgtcccaacggccatgacggggtcgcggcttcctgctgtcacctcgccatcccctgcttggcctcttagctcttccagcgcctgagggacccattccctgtcttaaaccatctgtgtttgaaatacttgactggaaagtatctggcagtgacgcccgataggttaggcagggaggttctgtctttctctagacttcaaggtctagggtatggattttgaaaacccgcatcggctttgagggagcttcagggtgctgaagaccaaggaagggggcaaatggtagaccagatgaggagccaaagctgaagacgagtgaattacccccttgtaatcaagattagcattgcaaatctgtctgtttccattttttgatatcattgagattttagaaagccttatttaaatgctccagctgggtctcagctatatggagaggtttgatttcactttaaatgtatgatgtatggatccctttcaaaaaacaacctacttctagacccccagtgctggcttaacttatttttatcttaactttagttccttaaatatgtctaaaacaattaaaaatacaatctcctcatgctgaagagttcttacgtaactagaaagtcaaacaaaattttaaattaaatccaaaaatacataaaattaacaacgttcaaatttattgctttaccctgatattgatattttttggctgaaatgaaattgcagtttttagcatgaatatgtttctgactcctcttctgtgggttcttttgagattggcatgtctatattgccccgtgctgggttaggagtcaattctcctattgcttttttcctacccaaccttctgcaaaccttgaacaatacagcgagaggcccttagcttacatttggcagaaccacatcatttgttactaagtaaatctctagtctttctttgttggtctgaaagaaatatggcaggcaaaacaatcctgggccagtactcaactatgaagtggtcatcaggtggtccccaatcctcttatactctttgtgtctttaagattattgtggactgcatgtggtggctcacacttgtcatcccagcactttggggaggccaaagcaagaggactgcaagccaggaatttgagaccagcctgggcaacccagtgagatctcatctctacaaacatattttttaaaaaacgtagtcaggtgtggtggcacatgtttatcgtcccagctactcgggaggctgaggcaggaggatcacttgagcccaggagttggaggctacagtgagctatgatggtgctactgcactctggcctgggagacagagcaagaccctatctctaaataaatacatgaatagattcttgtgttgaaaatataaaatagaaattcttatggaggccctctgagagacagtactggtaagagtcaccttgatcccagcccagcactgggggcaataaataatgagtaatccccagggaagccgggcctcaaaagaaaggaattaaaactccagggcttagcgtctgtcccttcccatgtggcgattctccttcctcaatagccataaaggatgtgggcttgttttcagtcacagagtctagcaggtttccttacattgttatgagttttatgtacagaaaaataaaatcacatctcctctgatcaggttatatggattaatgccgcatacaatgcaatgccactggagagggctctgagatattgggataataaaattgaaagttagaaaatttaaaaaatgaaagtaaatgttaggaaagagtgagagtggttggaggtttggaggaaagccatcaagtaatctctctttactcgcattttcagaacgcaataaaacaagcataataagtgtgccacatgtagatagaaacacattctttcttttttgacatcatccttaattatacatagatacaaatgctacataacacagtgaagatataggtgccatttagagaaatagaacatattttaatggtcaccatctttggagagcaatatagtaaatgttaggacacctgtacctcacagcccagcaatttccctcccaggtgcagacactgggaaactttttctcatgagctcaaggagatgtatatataaatggtcatagcagtattgtttgtaatggttaaaaaaatgggaaatgtccactcacaagacaacggatcatgacttgcggtatattcacacaatgttgtactcaatcaattcattcagtagggaaaatgaatgaactacaacaatacacacccatgatgagtgaattacaacaatacacacccatgatgaatgaattacaacaatacacacccacgatgaattaattacaataatacacacccattttgaatgagttataacaatacacacccatgtcagtgactctcacactaaaactattgagtgaaataaacaaatcgcagatgattcatacacttagatatcatctcttgagagcaccaaaatatacttgcaatattgtttatttttattacaaacatatttgtaatataaataacggtatcagatgataaataccaaattcagggtagcagttacccctgggaggggagagggagggagataatgagggaaggtacatggagacctccactctactagtgatgtttcagttcttaagctacaaagagatctacgtgggtttatacccttcgtatgtttctgaaaacctggactaagtcatgattttagcaaatcagccattttgcataaaactcaactctacttggaaaacactttaatgggaaccttagacgcttccacagactcctggctgttcctggaacatagcttataaacctgagcacacgtcctgctcaatgacctcattgggtttctctatcaaagaggcttcttcatcctttgttagtctatcaagactcttcatgaaaacattagtcagtaaagcaaaatagacttgccagaaatctagatagtttctttaagctgatacacccttgtttaaagcagtcgcttttattgtattgctggttcccttgtttgataaaggaaaagctccttggagcagaggaacatgttttcaactccccaccccacagagcctgggggttcaggtctgaaagctgcagcaaaagtctagcctgaatctaaaactaagttacaaaatgactcttcctgtgctccttaggggaatagcccatacatcagaccaatttactaagaggtcacaggctggttgccctaaggctgtgggacctgaacctacacagtcttcatatctgctccccacctctctttctctgtctctgcaccctagtggaccccatgacctacagctctctggctcctcccatactctttcttcctgaggaatcaggtcatcatcgcctgcatatcatactctgaataccaccaaccacggcacgaatttaggaggtatttggtagagtggaagcggagtgggattggcagccaaatatcccttagtggctgttgagccttcggcaagcaatttcactttttgagtcttcgttttagaatggggatgatcacatttaactgatgcactgatcacggtgactggaactcggcaaatgtcatcattgtccccatcaccccagagtccagccaacacagcccttgctgtgggtgagcttcacttctctggctgagttaagggccacctggtcttagcatcttgcactcacacatctgtaggtgaatcttagtcttctatttgtacagcacacacaggacacaaggcggatttctaacaaatgaaaatttgactctgcatctggccaaatttactacgaatgtaggacaagcctgagaacttaatctttaaggatggtgagtggagatctaggaagagaagaccctaagtcttaagaccctaagtctgagcttcaagtcaggaaaggattcatagaaaaagctgagttaacttctggggacaatagaattttcagcagacaaggaaaagggcagaacccaggcacaaagctcagcatggacagagacataagggccagggaaaccatgaccttctggtgaagcaccagcaatactagagtaaaacttcctgaagaaggagcgatagctcaggctgaaaagacctgcaggggcctgatcataaagagccttgaatgtcatataaaggtggggggtgggggaaatctccttgtataagcaatgggaggagctggagaagaatttggagaagaaaaattgcataattagatttgtgtttcagagtagcagctctaccagtaagaaattgactgactagaggaaatgagtgttggagatgagaaacttggctaggagaagggcaagaattcagtcagaagatagcctctgtggtcaagattagtggctcatgcctataatctcagtgctttgggaggccgaggcaggaagactgcttgaagccaggagcgcaagacaagcttgggcaacacagcaagaccccacctctacaaaaaataattaaaaatttgctgagtatggtggtgtgagtctgtggccccagctactcgagagctgaggcaggaggatcgcttgagcccaggagttagaggctacagagagcaatagtcatgccacagctttctggtctaggtaacagacagagtgagaccccatctcaaaaataaataaaaaaaaagaaagaggagaaggaggaggagaaggggggcaagaaagaggaggaggaggaagagaagtaggaagaggaagaggagtaggaggaagaggaggatgaagaagaggaaaaggaggaggaggtggaagaggatgaggaagaagaggaagaggagcaggaggaagaagagaagaaggaagagaaggaagaagagggaggaggagaaagaggaggaggaggaggaggaggaggaggaggaggaggtagccttctattccagaaaaatacccaccatgtggatgaagaggaaaaaacaaatacatgatatcttgaagaaaggaagtaacaggatatagaaactgactgaatgtgaaaaggaagaaaaggagagtatataaaggcaagttgttggcttgggtgcatggatggaatggactgccacttaacgagacaagggagagagagaggggagcagcccgaggaggattatgatgaggtcccaattatagtacattaaaaatgtctctggaacaatcagggattgctggaaaatataaaaacaaatcagaaaactacttgggcatatagccattaaacttgagggagtaaatgttccctagctcaaggctgtgcaatacaattatgatttgagccacattgctaattttagattttctaatagctacattcaacagcatttctatatgccaataatgaagtcgctgaaaaagaaatcaagaaagaaatctcacttacaattgctgccaaaaaaaataaaatactgaggaagaaatttaacaaaggaggtgaaagacctctacaaagaaaactataaaatgctgatgaaagaaactgaagaagacagaagatacaaacaaatgaacatatcccatgcttatggatcagaagaactaatattattaaaataatcatgatgctactacccaaagcaatctacagattcaattcaatccctatccaaataccaatgacattctttacaaaaacagaaacagaatcctaaagtttatatgaaatcacaaaagaacctgaatagtcaaagcaatgctgacaaaaaacaaaaaagaaaaaacaaaaacaacaacaaaaaaagctagaggtatcacctgatggaacttcaaaatataccaaatgctggctgggcacagtgactccctcctgtaatcctcgcactttggaagaccaaggtaggcggattgcctgagctgaggattttgagaccagcctgggtaatatggtgaaaccctgtctctactaaaatacaaaaaattagccaggcgtggtggtgggcgcctgtaatcccagctacttgggaggctgaggcaggagaactgcttgaacctgggaggcagaggtcacagtgagccgagatcatgccactgcactccagcctgggcaacagagcaagactccgtctccaaaaaaaatatgtaccaaatgctataatgatctaaacatcatgatattggtataaaaacagacacatatatcaatggaatggaatagagaacccagatataaataagtctatatatttacagccaactgatttttgaaaaaggtgccaagaacatacattgaggaacgaacatcctctttaataaatggccctgggaaaactggataccctctctctcaccatattaaaaaaatccatgcaaaagtgagttaaaagcttaaatgtaagacctgaaattataaaattactagaagaaaacaggggaaacaattcaggacattggtctcggcaaaggttttatggctcagacctcaaaagcacaggcaacaacacaaaaatagacaagtggaactacattaagctaaaaagctactgcccagaaaaagaaacactcaacagagtggagagacacctgttgaatgggagaaaatgtttgtaaactattcatctgacaaggaactaatatccagaatgttcaaggaactcaaacaactcaacagcaaataacaataataataatcccattaaaatgtgggcaaaggatctgagtaattatttctcaaaagaagacatacaaatggccaacagatatatgaaaaaatgctcaacatcaccaatcatcagggaaatgccaatcaaaacccattcagtttctcctgaaaacaaatgggaacacaagctctccggaagccagaacattctggatattcgcttcacaagaagctatcattttaccccatttagaatggggttatcaaagagacaaaaaataacaaatgctggcaaggatgtggagaaaagggaattcacacactgttggtaggaacgtagattagtacagccattatggaaaactgcatgaagattttttttttctcttgagacgggagtttcactcttgtcgcccaggctggagtgcagtggcacaatctcggctcactgtaacctctgcctcccgggttcaagtgattctcctgcctcagccccccgagtcgctgggattacaggcacctgccaccacacctggataattttttgtagttttagcagagacagggtttcactgtgttggccaggctggtcttgaactcctgacctgaggtaatccacccgcctcggcctcccaaagtgctgggattacaggcgtgaaccaccatgcccagctggtatgaagattacttaaactagaaatagagctaccatacaatccaacaattccactatcgggtatttatccaaaggaaaggaaatcagtgtatcaaagagatacctgcacccccatgttttttgcaggatgatttacaatagccacgatatgaaatcaacctgagtgtccatcagtggatgaatatataaagaaaatgtgacatatatacacaatgaaatactgtttggccataaaaaagaatgaaatcctgccatttgcagggatatggatggaaacggaggtcattatgaaataagccaggcacagaaagaaaaatatcacatattctcactcatatgtgggaactaaaatagttgatctcgtagagacagagagtagcataatacttaccagaggcttggagaggtgtgttggagaggggacatgaggagaggttggttaatgggtacaaacctacagttggatagaagaaataagttctactgtttgatagcacagtagggtgatgatagccaacaacattatatttttgaaaatacctagatttgaaatgttctcaacacaaagaaatgataaatgttcaaggtgatggaccccctaaaagtcctgatttgatcattacacattgtatgtatcaaaatatcacatgtatgccatgaatatgtacaaatattatgtatcaatatgcaaaggcaaaaaaaggaatagttaaaagtgattctaataatatgtttatattaaattactttaagttatatatattagatattttatataatttatttagacaaataaatctaatatattttcatgtcatcatgtaataaatagaaaaattaaggtattttttatatatacatattttttgtataaaaccttcaaaatctggtgttcattttatgcttatagcacatctcaaggcagactggtcacatttcaagggctcgatagtcacatgcagttagcggccaccacactagacaaggcatctctaactgattcattggccccacccaagaagccataaagctgggatgtgtctacttctggtaaattgtgattgctgtcttaacagcttatttcgacaatgtagttgctcccagtgacattttgtaagtgggattttggcatatcctaggtcctctggtacaagtgtatatgatggcatgaatgcccgaagtgctttgacctctgcagcgaaagctgatggtcacatatgaggaatgaacgagctcagcactctcattgtacaggaggaacacggggtctgattgaaggggatgtgtggggcacagctaaattaacccggttaacttggtcctgtaccccactctcatcccagccaattgaacacgagtcttgagtttctctgttttttttttgttttttttttttttttttgtatatgttttctgccatttgaagtattgcatcagatcttccctttttatttaactggattcctgttgggattttcgttagctggttgctgcaggtaccaggacactaggtcaagctatgcacagcatagagtaaatgttaatctctttcaaatccacccaggatgacgtgcccaagagccttacccaagagcaatgcatgatttactcaacctgtaaaataaattacaagttgctttaaagcctgtgtggtaatatgtaaatcctgctccattccttccacacacaccggcatggccattcgaatctctttcacattaagtttgaaagtaaatgacagctgcacacacaggctaaataggaatctccagccaaaaatctagagagaccaaagaataatagaaagtttgtggatgtaatgtgggggttatttgagttctcaatgctaatttaaacaaaacaaaacaaaaaaaccccgatgaagtaagactttaatctttgttgagtttcatggtatcctacactgtatttttaaaactggtttctctagtgttaaagacattgttttactttgaaattttagaagaaatgtctaaatttcagtttccccatttataaaatatgtccaggttcatgctctttgtgtaaggcatttttatccctttgaagatactaagttattatcattaacgtaattccctttgaatatcaatgtagagttaatttacccaatcgctatcatccacttgtaataaaagcatcacactcagtgaaaagtacgcagctttggaaaaaatcatctgcttctagcttccggagagcttgtgttcccatttgttttcaggagaaactgaatgggtcgctttgtcttgctggtggactctttgttaaactttcccttttgtttgcacatttctgacagaaggaaacgtgtttattgcctggcactcgttacgagcacttaataaatccttgttggatgaataagcaaatgagattccagaacggccaggttacctttcccttcccagcagcttccaagcttctccccctgcctgagacgtagcagacaggtctggcccgaaaaggaacagaattactgcaaataaacggctacatgtttgagacatcagaaatccccagaaatcttcatctcactcctcttgcttcccgagtcgtgttcccttcttcctgctacactcatattccagcgtgaggtcactggcttggggcctctccgaggtctttttctcagtcgaatgagtatctccctctgcaagtgcagtgtggtccaccagccccgaggcgtggctacccagcgccctgtgattccctagatgaggccaatggcccgtgtattttctcattcctcagggccatccagacagctcccacagaggcttcctaatgtctcctgggccaacaggatttttgttggcacgtgatggaaaaggctgcaaaccaaccatggctttgaaagcccagcagcgacatagctggtatatgtggtctgtttctaggtctttcgtctaccttctgaggcatgagttttcatcctgtatttgcccaagcctcatcttcaggcacaaaagccttcactgttgagaaataggccagccgctctggctgggagaatggcaggggcgacctgcgcctggtccctgtccctgtgcctatgcctgagccctgtgccgggtccctgtgctctcctctcatgtagctggcaatgagccccaggtcctgcatcccaggcaacccggaagctggtttgtgcggtgtctacagtaaggctattcaggtatcaagctgtctcaggattcgcatggttaaaaatacatgaacttgtgggttaaacactaaggtagcccatcccgtgattcccggtgcacagtaaggtgaggtgggactcagcctcttctcctccctagtcttcatttctacgttgggaacagggagcacgtggtattgggaagaagatggagccagtgaatggtaggttcaaagccctgatttctccactcaccatttccatagatctgaggaaatcaacctcttggagccatggttttgcatctataaaatgaggttaaaaatatctgctttccaaaattcttataaggatcaggtcaagtttgtccaacctgcaacccacgatggctttgaatgcagcccaacacaaattcttcaactttcttaaaacatgagattatgcatggaccttcatttttttctcttttgctcatcacctattgttgatgttagtgtattttatgtgtggcccaagacaattctccttccagtgtggcccaggaaacccaaaagattggacacccctggattagatatttctaaaaaattatctttatagtagagcttccgcacagcaaaagaaactatcaacagagtaaatagacaacctatagaataggagaaaatatttgcaaactatgcatctgaaaaaggactaatatccagaatccataaaggacttaaatcaataaggaaataaaaacaaaaacaaataacctcattaagaaatgggcagaggacatgaacagacatttttcaaaagaagacaaagccaccaacaagcatatgaaaaaatgctcagcgtcagtgatcatcagagaagcacaaaccaaaaccacagcgatagccatccataccaatcagaatggttacaactaagaagccaaaacataacagatgctggtgaagttgagggaaaaaatggaatgcctatacactgttagtgggaaagtgtattagttcaacccctgtttaaagcagtttggagatttctcaaagaactaaaaatagaactactattcgacccagcaatcccattactgagcatatacccaaaggaaaagaaatcattctaccgaaaagacacatttctctatttatcacagcactattcacaatagcaaaggcatggcatcaccagctgcccatcaacaacgactggataaagaaaatgtggtacatatacaccatagaatactacacagccataaaaagaatgaatcatgtcctttgcagcaacatggatggagctggagcccattatcttaagcaaattaatgcagaaagagaaaaccaaataccacatgttctcgcttataagtgggagataaacattgagtactcatggacataaagatgggtacagtagacactggggactccaaaagaggggaggaagagggtggggcaaggactgaaaatctttctattgggtcctatgtccactatttgattgacaggatcaacagaagcccaaaccttagcatcatgcaatctagcccttgtaacaaacgtatccatgtgccccctgaatctgaagttagaaaaaaaactgtcttcatagtaaatgctcaataaatggcaattactattatagttactaataaaatattatcttaaaaatatatatttgataactaatatataaaacaatattttattaacatactatactgtataatcaatgccaatgttatataaataatatattaacatgtttaataaatatatgaataaatatatactaaaacatgttataatatattaagtttcaatacattatgactattagaacaattctttatatattattatattgtactaatatattactattgttcatgtgtcattacttcaaatattgattaacatggtttcataatgatacaagaaactaacttgttttactgtttctagctagtttactctctctgtggagatacactggaagtaagtgaaaataaagtcaccatttttttcctgtttgcctaaagtcagcacagctttgttttatctggaaaataatcatttgctttttcaacaaaagtaaagtcactgaaacattttggaatctaaagttccaaatggaagtcagggatagcagatgaacccaaaccaaagtcaatgttcacctccagttatggtatcttcactggtagagccccctttacacctgcagctattcaaacagtcagtcaatgctggttattattactcacccaaagaacaggataggaaaagggcaacgaaatggcctgcccattacttgtccccaaatattctgcctgattgccttcactctgtggaatttgcccatattatttcatggagatagttctaccctggttctaaccagttgctttggccttcgtgcccagtttatcaaaccccatgagcccttagagagcctatgggtgctccttgttcatttactcagtcaataaatatgtatgaaggccctatatttctgtaccatgctatgtactaggcttaaaaggatgaacaacatacaatgggataaatacacacttagaagaaataaaccctggtgtctgacacatcaacagggtgatgatagttaacatgaatcgatagtctattccaaaatagccagaagagaataattagaatgttccgagctcaaaaaaagagaagtatttaaggtgatggatatcccagtgacactgatttgactatatgaaagtatgaaattatcatttctccgcagaaaataagtacgtcatatatatgccaataaagttaaataaagacataagaacagggccaggcacagtggctcacacttgtaatcccagcagtttgggagggtgaggtgggcagatcacttgaggtcgggagatcaagaccagcctggccaacatggggaaaccctgtctctactaaaagtgcaaaaattagccgggtgtggtggtgcacacttataatcccagctatgcatgaggctgaggttgaagaattgcttgaactcaggtcaggaggcagaagttgcagtgagctgagatcatgccactgcattccagcctgggtgacagagcaagactccgtctctcaaaaaaaaaaaaaaaaaaaaaaaaaggaaaaggaagaaataagaacacgatatagtggagaggctcacagtccattgcaaaaggcaatggataaatacgtgggggcttagagtgtgagggaggcttggaacaacgtaggcagagcatgtgatggacacctagccccatcctggggcttcagagatttcccagaggatgtggcatccatgctgccacatgaaggtggccttagagtcagcagggtagacagacagggcaggatggaaaaggatatgcccacagagaggagagcgcgctgtaagatttggaaggtgtgaagtacgccaggctcagggagctatagggcatccccgtggatagacagagggtagacgcagtgtttctgcaacacgtggtgggaggatcacctgcatcagagtcctccagccttttggcacaaatgcatggttcttggattcagtgagtcgggatttctggaagagaggaccaagactcttcacttttaaacacaatctcaggtgattggaaggctagctgaagcctgaacttctaatgcagaagagagacgaggcagaatgggtgggtgagggctagctcatgaaaaacctagaagtccagaggagacgcttggactttctcatgagggtcccaggcagtggtgtgctggtaaatgactaacaaccggttctggggtggaagtggttaattcacagcttgctcatttctgggttgtaattactataaagatcacatgagatcatctgtgtccaacctcgtaagagctgaagcatggaagaaagaaaagttgttattctctaattgacaggataccttttggatttgctgaatccacagtctcttcttctaaacaattcacctgtcaaaattatttgtcatgaaagcctttattgtcatgagagttgatttactcttcaaaggaatctgtttcgctctgacctctttgagcacacttgacaggggttttgcactgtgacctcccaggaatcttgcaagcatcacccagaagataggtcatctgctattcccacttgtattcatggcaatgacaatttattccaggcattggtcatgagatttgcacttcttcacatattcattcacatatttgtttacacattcatactagtaatagctaacatttattatgacgtgccaagacctgtcagacatgaatgtattaacttctcaaaatgacctataagtcctattactgcatacatgttatacagaaaaaaactgaggctcaaaaaaggtacaccctagtaagtatcagagctagaatctgaatgcaggtagtctgtctggggataagccatggtgcctctcacatttccttttcattaactaaataaactgtcctgtagccctcaacagtcttcccgtaattcacagatgccttgaaggggggttgttctgaaaaagaataaagttttttcctgtttgcacccaactgaggtcagtagtttaataaatgcatcatagtggctctttgtaagagaatctgatgtgtacatcatactcaaacctatttctggttttattggctttatggaaaaattaaacataaaaatatacaatgtctgcatcagctcctcctgggttctcaggtggaagaatcccttttcaggtaagattattccttgcctatttgaggagtgactccgagatgaagtgactccatcttggatgctaatctgccacttcgacttctgattagccccaattccgtgaatgcctcctggttcctactttatttaccatccctagtgtaagaacatgtcaatcttgatgttatcacacaaattataggctgtgacacgcatagcattcttgcctattctgtaggattgcttttagttgtcccgcccagagcacacacacccttttcctatggtggataagccctgggtctgggggtaacataacattatggagatctccctgtctttctgctgccaaagaccatgcttccatccgtaagttccccagataaatcaccctttaccaaaaaaactggattttgtccttgttctttggtttcttgtctcctcctgtatttgggggtcactttgtgtatgtggccctttcttggaacactatctcagaggccccttcagattagaaactgtctcacactttcttaggaaaacattttgatatcagcaaacatttccttgaatttaatctaaacctgtcattcttcagctccaacaaatctcctcttattcaagtctccattaagataaagtataggctgtcataggcttgggcataatcatgtgtgtgatatttagtgtatttgcaagtaattgtcaagccttccacagtcatcccactcaggctaaccattccttaacccttagtgatttctggttcacagagttctttacatgagaaattccagtgcttgatctgaattcatgtacaagcaaggtggaacacagtggatcattccaggcactattctccatggaatcctggcaaagtttcaagcagatgtcgaataattctaagtgactttaagagtttcacatactctatactaattgccctaaggagccatagagctttgactatacatattttattcttccttttgatcctatattgtgtgtatttcagaattttgacatcttacctctgtatctaacgtgtttccaaaaatatagcatgatcaggaaagacaattcttgaactaactctagctctgtgtggctgactattatgcccaggtacaaaagagcaggactcgccggacatgattcctgggctaatttcaaatgctccttctttaaaagatctgcttccatttccccttaattgcccctttcataaaatgaccagatcctctcagaagatttcctttagacagttactttatgccacaaatcacaaatgttcctcgaaaaaagtatctgaagtacagcgcaggatatgtctttgtaggagaaataagacagggtcagacagagaaaaagacaccaacgctgggaagttaggtgattgtaaactgagagcaggtgttaaaggaaaccatattggagtattcagaaaaactcaaattagcacacgaaatagttaatcaactttttaaaagttacaactatcctttctagggttaatttccatccactctctatttaccgcacaaacatttggtaaaaacatagctataatcttatttggatatttaagaaaagaactccaatcaagccatcttccctcccttccactcccctacctctcttccctggcctcttctccccgtcctctcctctcctcttttcttcccctcccttcctctccaccttcttttgatgccacagtttcttcagattacactccttacagtcatgaaaagtaaagacttggcctgatttcatgtggccttaccaaagtgctccctgcaaattttgcagccaccatgaatcacaagacgctgaatacgaggggagtttttttttttgtttatttgtttgttttttgcgagcctcattcactagaagcagggctcagaagattagatggaattatgaagtttggaggattaaaaatctaactaaaaggacacattaaaaaaattcacggacatgattgattataaaatgatttcctttactctcatagaagaaaccactcaatcaccttctctctctctctttttttcttgcttttttcacccctgcctctgcaaacatcatttgctatggttgaaatcctgagacctgtgtcagggcctgccagaaggccagttagaaatatatccatcagcctagagactcctttagattgcattatatataaaaggaagaataagcagtgtgcccaagtgaatccagccaaaagccaaagctgtgcaatggctgtgtatcactgacaatgcactaactgtgattaggggaggccagctgccaccctgtctgtttctaggtatgtcaagtgtggccgcccacccaggagacagagtatgttcaggtgccctctctgcaactgccttaatttcaatgctcatgaactgtgtttctcaccctgttttgccatttccagttaatctcatgcatatttatgtgccaattatgcaaatcccaagataaaaatgcattaagcacccatgatttagactggttaagtccattacatggtgtaatgaaattattgcatgatgtccaatttacctcaatgcttgctttaaactgtccataagttattgaataaccataacatgccaaaatttagctctaggaggcttcctttgtctgacctatcatcataccaggaaatcagaaacttcaagctaaatcctcaccaaagggagaaaatatttcagaacagacttaaggaggcataatgtgatcaaagtttaagtatggcaaccaccttgtcacggatatgtcttctcttcggataaattaaaaatatcgctgggtaatttcaacaacatttggacagggcaacttaggatttaaaaccaagccttgccaatgggattctcctcttgcccagtcaggtcttgttccctcagtcatgatgatattgtaggtcactgaattcaaatgcagtttgaattttcaatatggaaatatccatttccagcattagaaataaaaagactaaaaaagaattcacagaagcaatttaaacacatacacatacacaaatcccttgaaacctaaaaactgaagggtttgaatgagaatctatttgctatgtagagattttatgtttaaactttggtaggacccgaaccccacagtttccatgtttattagacaatatgatgatcaaggaacaagccatgatgtgagtgatactgataaatataatatgtgagcagcctgactcactgacatccatttctcccccgactatagcatgccattttaatcggctcatggtgtgatttacgcagagcctgggtcctgattatttgcataggaaactcccttcgaagtctacgagagttgtactcgcgtgaggttaggagctcggatccacagatctgttaggcgccagagactgcacaatactgcgatagtttgcaatttgaaaacctggtcaaatgaacagattacgatgccattccccaaagcattcaaacctcatcctgtcaatcaagtgagctaggatgccagtgtcatttgccattttctttgctgtggtaggggatcatgaaacagcaccttggattgaagtgtactgcctgtaagcaacaggattccagctacatgcccagtgagaacaagtgggtcaccaaggggatctcaaagatctgccagcccgcagaagggctggagttagagcctttgtaacaaactctcacttgaggctatccttctaatgaatgactctcagacatgggtgaacataacagagatgggaaattctcgcaaaggatggggtgtcttcctgcacaagacctacttctaacattctctgaaaatatcatggtcaggctcattaaccagcaggaaaaaaaaatgttcaatgacaagagtctatttgtgtccaaatcattacacagggcatcaaagagatgaggtaaatcaaagctttgtcctattgactttaactctgctgtgtgtttagagatctatttgccccttgatttgttttgaaatttctggttaagaaaagtaatatttctagcattattgaaaactttggatctatccatttagagttataggtaaatatagcagatatcaaataacaccttcatcgtctgagcttataatggaaaaccccacgttcaaagcgtctcttgaaagtgaaaaagcaaactccagccaagaagaacaagcgcttagagtcttcaggagaccaaaaccagttccccgtgagcatttctaaatgttacaggaccaagttcaagatgtcaggctagagcagtgctctgaaatcttttctgcaggtctgctatttttccgagaacacactggcctccagaatgcattaacctactttctacagagaggattccctggtcctcctgctctgaagaagaggaggaggaagaggaagaggaaagaggctatttcaagtgggagctgggcacactctttgccttaaacgtgttactcctcctgctaaacagcaatacgatctgagaaattggtacttcctgcaaacgaacagctccgagggctgcacggccccaaagcaagagtgactggaaatcctgctaaaatatggctgtctaatcaaccgagaggcgaactcatttactgaggttcccattgtccacgctgacagatggctcgctcccctctctgctctccccttcccctcagatcgcgctgccgtgcaggcaagcctattctttgagagatccagttgcaatcgccagcctagttctgaaatgagacaaaagctccgtgagcctcctcccatgcacagagccttttctgtccctccaagcagaaggaaaagaaatccagatccactccccttaccttcgtcctcatcggagacaggagcccttccatggtggcagaatcctcatgccagtttctgtctcctgcaagttactctctctgtgtgccgtgcttaagcatcccacatgaaaagagccatgtcgggagccgtggtggctcccctctcccgggtggcgcctctgcaccgccacccggtctaacttgaatccccagcgcctgcaaagcgccgttcctggagaagcctgctcctctcctcgccctggtcccctctctctttctccctctcccgcgctctctctcctccctctctctcctccctctctctttccataatctgcctacagctctctgtgtaccctgctcacttgacaaatgatctctgtcttaggtaacgcatttgaaccaagaacagtgatctgtaacaacccacagggcagctcatccagggcaggaggcgaggggggctgagccggagcatccagccgctttgggctctgtagcttgttctctccagagctgagagcactgttgcgtttgttcgttcattcattcattcattcattcattcattcgttcatcattccttcctctcttaagaagtgggactcccacaggaatggatctagttgacaccattactgagctgcttttctggtctgtgtacagaaagctgaaaaagaaatcccactgcgtggagtacttctaaatacccatgttcagcccactgtgaatttcacacctggatagttaactgggttcttctgcagtttggccagatgtttagaggcacataactgtagcctctttttagagaaagtttcaaaaacagatttatggactctgatcctgaatagttgagtattaaaaaaaaaagtgtgtgtgtgtctgtgtgtgtgtgtgtgtgtgtgtgtgtgtgtgtgtgtgtggacgcgcgcgtacgggcacactgtccaggagtccaaataaatcaggattgactgtttcattcagcattgctggtcacttggaaaaaaatacacaatgaaagaaaaatggcaaagacctaggtcagagcataatgcagttgaaaagatgagatttttctgaacttctttatgcttgaggaattttctctgtgagaataattcaacatctctacttcaactggtgactccttaaatgtggctacacacatctatgccatcaccaaggggccaggaccccttttgcatcatatatgtgacacatgtgcaccatacatgaacctatcaatgtgatttaaggaagatgcccctgtcccttgcccttctttccatctgtgattcttgtactcacaagacatccccaagatagggcgagccactctgtcctccagatggaatcacaggctggtcccaggcccctgcctcttccttcattgatgcttttcacccctaattaacatccttcttctcctcccgttcacacatcagcattccaatagaacttcagtatctacaccaactctatcacctcttgatcacctccttcgtagtctccagtttgcttccttttttttttttttttttttacagggtgtctgtctgttgctcaggctgcagtacagtggtgcaatgatgatggctcactgcagccttgaactactgggttcaagagatcctcctgcctcagcctcctgaatatctgtgactgtaggcatgcaccaccatgcccaactaatttttaatttttttatggagacagggtcttgctatgtttcccaggctggtctcaaactcctggcctcaagagatccttccgcctcagcctctcaaagtgttgggattacagatgtgagccgctgctcagggtccaattttctattcttaactctttctctgcgtcaccttagttgcaggctgcaacctcattctcacttaaccagacatgtacatcctttgaccagagtcttagcatcctgacaaatctgtagacccaacatattgagtgcaactcgctgtccttatataaaagattattgccatttctgggggactctggaccttatttcttgggtattgacttaaacaatacttcttattttgtattgtagtgtttagggatccctaatattttcttctattcatgtagtcattcaacaaatagttgtaaggcacctagtatgtgctggaagctgttcttgttctgatgatacagtggagaatagggtagacaaagtccttgttccaaggccctatatttcatagcaggtttgatacaaaactcaaccaactcatcaagcccttccatctatcattgcattattcataccaacctctccccatgtttttgggtttctctgtgggattgcaaaccttctgatgtgacttccatttccagtttagtgccagtctctttgtgacacttctcctaactgtacacccatgatcaactttctcctaggaaataaaaaaccaaaatgtctccacgagaatctcattccttcacctccatcttttttttttttttttttttttttttgagacggagtctccctctgttggccaggctggagtgcaatggcgcaatctcagctcactgctatctccgcctcccaggttcatgtgattcttctgcctcagcctcccgagtagctgggattataggcacgcaccaccactcccagctaatttttgtatttttagtagagatggcgtttcaccatgttggccaggatggtctcaatctcctgacctcacgatccaccccctcggcctcccaaagtgatgggattacaggcatgagccactgcacccagacttacttccatctttaattctattctctgtcctcttccccagacccttcctctatctccccaaaggtttcatttttcagtgtcagggaaggaaatcactcttgtttactcaaaacagagatgccgttcctcatcctccccggttattggccctgaaccattaaaacgacttgttatcccactcactgttgagacatcgcccatgccatgtgctacatttagcttccatccctttggattcttcaataactagaataagctgcatccattatttgcttttttactttcgacaattctttcctgaagcattctgccctgttcatgacatgtaaaggttcatgaacaggtttgcactgtttgtgccctttctaaactcagaaacccctctcatcagaatttccaatcatgtacccttctttttgtttgtttttgtttttgttttttttgagacaaagtatcgctctgttgcccgggctggagtgcagtggcatgatcttggctcactgcaatctctacctcctggattcaagtgattcccgtgcctcagcctccaccatgcccagctaattttttttgtattttcagtagagatggggtttcgctatgttggcggggctggtcttgaacacctggccacaaattatccaccaaccttggcctcccaaagtgctgggattataggtgtcagccactgtgcctggccccaatcatgtccccttctcaagagttttatccttgatattaaaaaaaatatatctctggtacaattgattacctgccccgctgcctcctggccctctgtactctctctggctctcaatctccctaaaggtttgtttaaagtagatagaacagaggggggactatgccaaggttaaacaaaattcgactgattgcatgtttaaggccggttgttttctgaaaaactccaaccatagattttggaaccagaatagctttcctgagtcaaaggaaaggactttcggaaggaatttggaatattctgtataagtgcaccacttagggagggtagaacttttctggttgtttacacaccagccatttagcccctggagcctggggttgttcaccatatttttataatggtctgagaggtccttgacgaaacctctggaatcaataggacttggaacctatcaattagctcctgagatgatgctgctgttgatggtaaagatgagaatggcaatagctgttgaatgcttacctggtggcaggcactgggctaagtgatttcatgcagtagttcacacaattcccttaccccctgccctacgagggaagtactattcttactgctatactgcagaagcttcagctaagtaattcacccacacagcattcagttcaatgaagccactgctggtgtactatttccaccttgtgttacttcattaaaaataatccccaccaacataagacatacaaagacttaaaagtacattttaaatttctgttctttattagtcaggggttgcaaagtaagcatttgaaagtattttattttagactattaggctattacattgagtacctcgttcacttatgtattcaggaaaccaatattcattgaacatccacttcaagccaggttctgtgttagacacttaaaagcacaaagtcttgtgtttatcaaagataaacatttacaaaatggagcacattagtccatttatcacttatgatttccaagtcctttaaatactgatgactgcaccttttatgtcttgtgtgaagtggttgaattgttgcagggtgaagggggcaggaagagagagagggtggtggggattagaaaatattttaacctgggcaataaatgtccgtgaagaataattgtcagatcattaggcaccctaacacccttgacattgatcaatgttaccaaagtatccagaagcaagaacgatttgcatttttgcctcacagatttctttggattagggcactctctgcttgcaatttaccatctggggttaacccaaacttagaaaaaaaaaagtcaataaatatcaaatatgtagacactggtgaaatattaattaagtttacaccacaagagaaagggagttttctctgaaatctgacttaaggaatttctactttgtggtaggtggacttctcacctatagaggaaaactccccacaccaaggaacctctcttagcaaatgcccttgccctttgagccacccttctttcatattttgatgtcaaaaaagagagggaaataataactttataataaacttctctagactaggagcacttgtaaacgtcacaaaggctgttgggtaggccatggttggaggctcaggttttccatctcttgggcttaaacactgaccctttcttccccacatctttgccatttttgaggttaatttatttaggccccttagagtctctggggatcatagctagccaaacaattaggttttattatctgggattgcactgcctgcttcataaagagttgatgatttattaaggtgagaagattgtgacctaagcaccgtgaaggctttaccctctgtgacctgctcaccactctttactatttagaaacatcttcatcaaattgtaggctttgggatgataatggatagaaaaggtcttcttcctggatcagttccagatatcttgggtaacactgaaggagttatgtaactaacatgacaaatctccttccccctttttctctctgcctcaaccctcctcagccacacatatttgctttcatttataatataaatatccgaacctagcacagagaaaattttcacctgctatgtactaaagtgctcaataaaaattgtgatttaatattaagtgcttaaatttattcatgtctaggtaagagaaaacattctacaagttcttgcgatacaaaaattatatagcgattaacattctttcaaattgtttttacatgtgtttgcctttttaaaaacctcagaatgggccgggcgcggtggctcacgcctgtaatcccagcgttttgggaggccgaggcaggcagatcacttgagttcaggaattcaagatcagcctgatcaatatgacaaaaccccatctcaactaaaaatatacaaattagctgggtatggtggtgcacatctatagtcccagctactcaggaggctgatgcaggagaatcgcttgaatccaggaggcggaggttgcggtgagctgagattgtgccactgcactccagcctgggctacagagagcaagaatccatcaaaaaaacaaagcaaaacaaaaacaaaaccaaaaaacaaacaaacaaaaaacaaacctcacaatgatcccatgagatgtggcaggtattcattttcattttataagattggagaggtgaatagaagagtaatatttattgagcatcagctttgttccagggcttgagctagatactcttcagtgtcatctcacttaattttaacaggtgtattattattcccatttaacatatgatgacctgagattgagagcattaagtatggtagtagatagcatcatttggtcctgattattcatacattttgttatccatgcaatttgctgtgtgactttgccaccctctctttttccccaagtatggatagaaggctagcaaaggcggtacaagcagaattttgaaatgcgcatgggaaagatacacccacgctagtctgctgattccaacgggaggataacagaagacccaacctccattacagacttacgagcaagccagagaatcacaaatgagtgagactagccaagatcagctgagcccagcctacatcagcaaaactctacagtcttctgaaaaaccaatgcctattactgtgtggcaccaggcattgcatttgttatgcagccaatggatacgattcctaatccaagatgagagttcctaaactgtggagcagagctgactagaactccaaacgcaggttttctcactccaaaaatttcaagttcttccaatgctgtcacatttctgtggctcacccatgcgcagtgatgggttgtatgattactattttccagaccccagatcaatgtctaagctccaagacacacattccggcacttctatgttattgaatgtcaagtataggatctactgtattttatttacaattccttaaaattgtggcacactgaggaaaacacggtatgaggttctatgccttgatcagtcatctcgtctttatgatcttttagactctgccccattttctaaagaacagcaattgcctaaagttatcagcaatcggtacagaagttaattggaatctagcccttggagacttttcccttcagcagttcttgcctttccgaaaaagtgtctcacagtgggaaaaataaaactgcttttcttcattatcataaacacttcagctggaaatggttctctacctgccccgatgttttatgaaaacatctaaagagcagagtgacattattttcccgtgtttgaaaagaggtatttccacttttttcttttttttgtttttttccttaaggtttgtggtttaagtacttttgtcaagagggagaagaaaaccgacagctgctgcagccccagatcgctgccccgtgtttgctcagaagacctctgggagcccagataaggagaaagctgagagacaggcatctgggcggaagcaatgcctccttcttcccgtcgtcacagaggggaagcagttggatgttcctgcaaagttagcatgcagggtagcatttttacctcccgcttttgttgggttatttccaagctccaaactaaagaattgtgcgacagaaattatgtagggaaacattttaatttttgacaaataaaaattgcacatatttctggtataaaacactatgttctgatatatgtacgcattgtgaaatgattaccatgaattttttttatttgagatagggtctcactctgttgtccaggctggagtgcaggggcacaatcacagctcactgcaacctcggcttcctaagctcaagcaatcctcctgcctcagcctccccagcagctgggactacagatgtgcaccaacatgcccagctaatttgtgtacttttagttgagatggggttttgccatattgaccaggctggtcttgaattcctgaacttgagtgatctgcccgtctcggcctcccaaagtgcatgctgggattacagacgtgagccacggtacccggactacatcttttcttgatatttctgtcaaaatgttcaggattgtcacgacttggacaaaccactttcaaaagctttgtttatttgtggctttttctttataagaggcaaccccaacactactaccaaactgccgtataattgtttatcaaacctagactggggaggggacaaaaatgatagtgatcaatggagatgggagttgacacagtttctgcttctaagacttctttgaactctcaagctgtgtttttaaaaagagagagagatagggtgcagtagcacatgcctggaatcccagtgctttcggaggctcaggcaatgaaattgcttggggccagtagttcaagaccagcttgggtaacataagaagacactgtctctacaaaaaataaaaaataataataatagccaggcaaggtggcacatgcctatagtttcagctacttggagggctaaggcaggaggagagtttgagcccaggagtttgaggctgcagtgatctctgatcttgccactgcactccagcctggacaacagagcaagagaagtctgacaagacaaaaattttttttttctctaattggcctatccttcatggtaggggtgtgaaagagacccccatcatctaccctaaaagtaactcatgaactccttggtacagggatgttcctaggttccttcaaggtggacacatatgctgagaacctcctttaaggcaggttcgaccgggggctctgccctgaggttaccagtgtgaagagtacaggtgaaggctgttgaaaaatttaagaactccaaggattagaggtaacaatcacagaaaccttctgaattctactgagtgagaactagcaggagggttgaacaattcaagtggaagcaaacgttgggagaagtactcatttcacctgggattgttgattaggctgcttcaagggaaatcctattcttgaaggtggctttgaccatctggaggaggttaggatgttggtgcgtggggctgtcgtaagcaggatggggtggagatgtgtaggaggtgagggaggacttcagacagagagactgacccatgctgaaaaagcatagagctaggcagtaacatatttgaagagaaaaacaagaacactgaagtttacagagtgctgataagtgatctccagattatatggtcttagactcgatttttcttaatttaaaattgaatttacacctcactttatttgaaaagttatgtgtcatgcacgaatgaaataatgtgcagacagagttcactttatatcattagtggtgtcttggaaagttacacattaatttatttagaaatctgcaggaaattcctttatgttataaaagctcattcttctaagttattctaattttacaagttggaatgggccatgcctgcagagtgtttgatggtccctttaacagtactgggattgtctaataatggaattatgtttacaatgtgacctttcaaacaataaatgtgcctcaatgtgcattatcttcatagctctaaggagttgtttcttttttttttttcaaatcactcctgtgtcttaaatttccttggccagcttcaacctgaggcacaaaggaaagtaattgcttgattcaatttctcactgtgtcaaaataatgaaattgatgggcatcttttactcccaaacctggaaatgcactctattttgcaaattgaatcttaaccatggtatctaaatatgttcattaaaagcaaaactactgtcttttaaaaatgttcataaacagagacactcatgcctgaggtcataaagccaagttggcattttgatcaggtgtgaagaatatttctgtctcaattttagtaagacatgatttttctgactcagtacctcagcataacctaagaaaccaaactttgtgaacagtattgactttaaacatcatagtaatcataagaacaaagagaaattatgagatatggaaaatagctccagaaacaaaggcttaatttgaaaactttgctatggtttccaagcatgtttttacctggtcatggtttggagaaaggagttggaccttctaaaagtagatcaccaagcgcttacatcttaacacatttccttttttgtttttcttttcttttcttttttttttttttttttttttttgagagagtctcactctctgttgcccaggctggagcgcggtggtgccatctcggctcactgcaaactctgcctcctgggttcaagcgattctcctgcctcagcctccagagttgctgggattacaggtgcataccaccacaaccggttaattttttttttttttttagtagagatggggtttcaccatgttggccaggctggtctcgaactcctgacccaaagtgctgggatggattacaggcgtgagccactgcaactgaacccattttctatacccagcttgttgagtaatctcagttatttatctagcttctcttagccaactttctattctattatgttaaaaaaaatggagaaattactacttctccaatgttaaaaaaggtattttttgttgttgttccaatttaagggaatttgtttgctcaacaaaggctgaagtgctttatacaaggcaccgtgcccgtctcctgaggagcctctgaacgttcccagaagcacacgtccaggccgggcagagcatggcttctgtttctacctctcagtgaaatcaatccccctaagctttctttcaaagtagcccaaatgtgtggctcatgggctataagtcagatatgaaagaagagaagtttggagaataaaggcgcattttcttatttatttattttttattttttaaggaaatgatagatatccttaccacatcttcgtgcatggcctgcccggatacaactgcgtgggtactgcgatggagcacaaacaaacgcgaccgctaaagtcgtgtagggtgtttccctttcatgtctgaatttgtttagacagttacacaatcagagagcgcggaatgagagaaaacaaaacccaggagaaaggaatgctttgaatctaggtccctgggccttgatactttttctttgttaaatcaacccaaggcccctccatatgctgatcatcttttgccaatgtctgtgtctgaacaggttttcccaggcatatagctcagaaagaacctttcatcctccttttcctgttatgtgtataatgtggtgtagcccaaagccactgtgggttctaatttgcatgtctatttcaagaagcccggaaactatttgcataagactcttgcttcctgagagatcccagcagaaggatgtagagatagagtctttcattttttcatttagttctagatatccatagtgagagatctgtgtgtctaaaccctaaaatctgtagaatgtgcatgaaaaaatctaccaccctaagcgtaaggagagctagtacagatgaggatgtcgtggcagaaattagtacaaaaaacattacaacattttgtaatttttctaacttcaagtattttttggaggtttgttgtagaactatggaaacttgaaacataaagcaagactatttaaaggttcaatctcgtcttgtaagaaagagaaacaggtagagagacagaaaggggatatatacttcatggtcagagagctgcaggggcggttgttagctgtgcagatgagcagaagagaggatagcagcagctcaacagtggcaccttcagtagttctagagagaagggatggcaacagcagtagaccaggctagtaccagccaaagcaacagatacgtacaatccagactagtcctgggcggaatagggtagacagggcagggcccagtggagacagccatggccaggtttcccatagagttagagtgagataaagtggtaacagcaacagggcagagagagactgggcaggaactgcaaagatggcagctggagcagaatgatgtgcatcaggtgagaggaaaagcacaaggccagaggatcaactgtgcagggtccatggtgatggagcacagcagtgggcagaagtgcgggctgggacctacccccgtaaaggagacactggaaaccatcgtccaaagagacaaagacaccaatgactaacagaatttattgagcttacaaaatcgcagataaaaagaaaaagaaaaaaaaaaaaagactggccaaaatgctaaaactccctcctcttatgggataacaaaacaggctacaattggttggaatcaatatgaccaaccagagcctgtacagaaccagcctgtgatgtcacagtctgaactaccaccacacgtttcgtactaacgccccctgaatttgcacatgcgacccatgaggaggcatgaagagataactgctcatgccaagacctttctaggtttcccctttccttccaccgatcacccactaatcccagaatccaccccgtaaacctcttctaataaaactactcccttgaagccagcagagggagacagatctgagctggactcctgtctccctgggaacaataaaagctttgcttttctcacaaacctggtgtcatagtcttggcacactgggcagtgaccctttggctccatgacaaacatgatggtctagggaccctgcttctctcctgttcagtctcaggtgacccaaggactagaccatgcatcctcttccttcttacctatcttcatatcctcatgagagaagggagggttatcagcctctgaggatgcagatgttgcgctcagccccaggatccccaggagactggcaaagaagatcatagctttgactgttcagggtggccttggacacaagttgtacccttaaggaatacccttctctgaccagtatggtggttcatgcctataatcacagcactttgggaggccagggagggaagactgcttgagcccaggagttttgagaccagcctgggcaacatactgagacctcgtctctgcaaaaaaaaaaaaacataattagtcaggtgtggcggtgcacattcctagctactaatcaggttaaggcaagaagattgcctgagcccaggagtttggggaagcagtgagttgtgatcatgcctttgtactctcgtttgggtgacagagcaaggctctgtctcaaaggaaagaaggaaagaaggaaggaaggaaagaaggaagggagggagggagggagggagggcgacactcttccttataacaagaaacagcttgcattctataaaagcaatgatgtgatttcttaaaggcattatgagcctaactccatgatatcagatcataggatattacagtcaaattgtgtatcaactagtccatcatttcacagataagtaaattgagtcccagagagttcggttactttcctaagattacagaagtcctcaaccttgctaatctgatgttctttctttttcaacatactgttggctatatatgtcctttgtaaataaaggaacagagccattatcgtggaatgactgacttagagaacgctccatggacatttgcttcgacctatatcccatgcctttctccatttacccccaaattgacatagaaaaagatcagccagatacagtggctgggagggcaacatagtgagaccccgtccctacgaaaaatcaaaaaataagctgagcaccagtggcatgcgcctgtggtcccagcaacttgggaggctggggtgggaggatcgcctgagcctgggaggttaaggcagcaatgagcagaatgctgtcacagagaaggaactcaataaatacttggtaaaatatttattttgggggttagaagtagacttgggaaatttggttttctttgattccatatttcactagggggaaataaagatgtaaaacagagacataaaacatgccattagctttatgggccttgggacagtggggttcccagttttcccgggagatgacgatggaatgcattcaggcagctcccacaatacaattttcccatctctagtgtcctattgggaaggtatctccacctccttgtagcctctccatgctgaatacacttaaaactctaacctcctttcccccaaaggagctccttccttagactctccaggtgctgtccttgatgctaatctttcttctggtcagccttttgtttttcatgtaaaaatgacttatttcattacttactggaccttttccacaaaatgcctggaatcaaataaaaaatgactggattctcaagtcaacctttctggacgcctgcctctccccctgtgccaaggacccatgacctgcttgctgcctgggctctttgtgtggtttggttgcttttctcagacttgaatgcttcccactgaaatcctacaattgggcacatagcactccctattgaaaatgtataatagcttctcattatacaagctcttcactttggcttttagaatcatgtgccgtctcctttcctatttgcctcccgcctgccaaactcattatccaatcattccctcttcaatcagtcccacctttctacctttaggtccttttccagaatccaaactttaatcaaagagataaagcaggccaagacccaatgtccattacttaataagccctcaatagacattagctttcttcaaagtcctcatcaactcctttccttggctgcgcacagtagctcagactttgagaggctgaggtggaaggctcacttaagcccaggagtttgagacaaacctgggcaacatagtgagaccccgtccctacgaaaaatcaaaaaattagctgagcaccagtggcatgcgcctgtggtcccagtaacttgggaggctggggtgggaggatcgcctgagcctgggaggttaaggcagcaatgagcggtgattgcagcactgacctccagtctgggcaacggagcgaggttttgtctcaaaaacaaaaccaaacaaaatcccgcccaaaacaactcctttctgggaagctttccctgagcaacccagctcacctctgtttgtcttcactgcctgtttgacatttagcttaagttaccttgtgctgttatcttttaaccctgatctgtattttaaccctcaagcacaaggtctcatggctgtgtatttccacctctgtgtatggtgtcctatagacagtgagagcttaacatctcgcgtcagtgatgatgctgcagcattgctacgatgtcacccttagctccaaacatgcctacatcattggcaaacctttgaaatcccaatagcaaaatgccagaaatgcaagaatttgaggtggaaaaaggggtaagaggaggaagagaatgggcccggcgcggttgctcacgcctgtaatcccagcactttgggaggcagaggtgggtggatcacctgaggtcaggagttcaagaccagcctgaccaatatgatgaaacctggtctctactaaaaatacaaaaaatagtcaggtgtggtggcgggcacctgtaatcccagctactcgggaggctgagacaggagaattgctagaacctgggaggcggaggttgcagtgagctgagattgcaccattgcactccagcctgggcaacaagagtgaaactccatttcaaaaaagaaaaaagaggaggaagataatgaatatttacagactgccttctctgtaccaagtaacattctttgttcttgtataaatatcctctcctataaagaaaaaaataaacaaaaagagggaattgattcagtcagggtaacagatgttagtgtcatcacttaggactagagcccataaacttctgactgccactgaaaaacagccaatgtcaaggtgagtttagacagatcttaactcagcctgatgctcattaatgagaacaatggcaaaagtgttgggaatttgagtcggcctcagtaggaaaatccttataaatttaatgagagctcaggagagatttctatctatcttaattatgcttgcaaacttcatagggcgctctctgactctaggctaaaacatgaagcaccttgatacctctaatacataagcctaaggcagtaaatcaggttctccccacacgtacaccactttccaaaatatatttgacaaaacttgtctaaatgtctcatagacactaccctttgactaagaaaacggttttggttatcactcccattttacagacagaaaaactgtggaacagattctgatgcaacagtatgccctcgccctagcagacgagtttgttgctcatcctgaagtgaaaacagtagtttcttcacagcaaatgaccacccctctcatgttggtagttctaccattttcaagacaactgtattaccagaaaaaagggctcactgctggatgtgctggaagccgatactatgacaccgggttttctgtttgtttgttttttgttcattttttagagtcagggtcttgctctgttgcccaggctggagtgcagtggtgccatcatagctcactgcagcctcagtctccaaggctctagcgatcctgcctcccgagtagctgagaccacctctgcctcccaagtatttgagaccacaggcacatgctatcacacctggctaataaattttttgtagagctggagttttcttgtgttgcccagtctggcctcaaattcctggcctccagcaatccttccaccttggtcccccaaagtgctgggattaccggcgtgagccccggcatctgtcaacactggatttttgagaaaagaaaagctttatattgcaagtctactcacaaggagacaggagtcaagttcaaatctgtctatctgtgctggctccaaggcagtattttttaatggaaaagtttcagggggtggatttggggataagcaggtgactgatggaaggaagcaggaagtctggaaagtccttgggcatgcgcagttatctattcgtgatgcctcctggggctttgtgtgcaaatttggaggaagttagtgtgaaacatgggtgggaattcaggctgtgaggtcagcaagctggttccgtgcagaccccagtcagccatattggttccaaccaactttagccagttcttttatctcacaggtggagagagttttagtgtcgcagtgagaggtttcttgtcttatatgttaacctgcacactcaagaatttttgttagttactggttgtactcttgggggcatagtctcagtttcagcttttcagcaagtttttgcttttcttatgtgtgttatcctctaagcccaagaagttagccattggcttctttaactctttggggcatggtttcagttgggaatcccaaacagaaagggtcttctgctttgagagaattttatctaaatggacacacaactcataaaacaacagtcgttgagagaaagcagaggctaatggggtcaaaggtgaacagccagtagaagtgccagctcctaagagaaaggatatcaagggacagccatagtttacaagacccaggaccaatcccaataaaagtcctgtctcatgacccctggtctctctgtcactaattgagaaatacaatcgaccgctcccctctgtttatgcagtgcatccagcatcatgtgactacacaagagaacaaaaagtagtatcggctgttgctatggagacttaagaaccatgtgaattgctatggcatcataaaagcgatattccaatcatcagtctttaactatagggccgttgaaatctatctcatatttttagaatgtgtgacatttaacacattgatgaatatttccagcctcagaatatattccctgctttcatatttagataggagttttcagctcaactggctgttttttttttttctctctctctctctctctcctggcaaatgcttcatctcctcatgagtgattacaactctttctatactttcctagatgtttcttcattcttgcttcctgttttttctttattctataattaaaattattttctcactcactgtctccacttccaccagaccactttttcacatccccggttgacatttcaaccaggctttaacctccactggtcttaactgaccacactttaagccagagttgctaataatcaacaattctgagccccagccaaaggtgcacagctacctccttggtggtttttatccctgaaagtcaccatccccttatcatccaagggaattccaattcactgacttttctaggctttatatgaaatcattcttttggatggagaataacatatctaattctccacttttttctttgtaagaattgctaactgggttttgtgtagctgtatacacagaccattttgaatatcagtgtgtatccacacacacctgttttgcttatcttatttggaagatgttgaaagagattgattaacttgtttagagtaacagctcttataacctaattagcttagaagcaaaaatgggaaagtgtaaatatcaggaaatatacattcacataacaaaactctgctaaaagaaacctgttacagtggtgcactgttgtgagataaattcctccacattccttttattcttgcagcatcagcctctccaaatcttcatgtgtattaagaaccttctttttttaacctctttccttaagagagcttcaggatctcttggacttatgtattttcatctcctccttaaacctctccaaagaagagccttcttgttccctccacagtattatacaataagctcaagtacatcagtgaacatggtattaccaaggtgtgattttattctgtgagtttccaggaatgaacatctcccctctaggttactgaattctaaaacgtaatgaattccttcaaagagtttttaagcatttttgcatcaactttttcttccaggggtcacaaaggatgatttatttattcactgttgcatttctaatcacaccaatagggtgcagttgtcactgctgtgtacatagcaatatgaactaaatatatttgcacagacagtaatgccacaaaaagaaataaagagtaacagcgtgtatttgctgactccaacatcaaggactgcactgttatccttgtcaatatctaggtcaagttaaatactgttttcagaaattctaccctgggccatccatggctaattttattttttgtttgaatgggatttctggtaatcatgatcttgggaagaacacagtcttactcctgatgatttctaaatacattagactgtctgtaaaccaatgaacagtactttaccttgctttctccctgataggttgcctcttaattaatcaatccatcaactgagactaatgcaccaagtgatgtgcctcacatcaggaactgtgcaatggaagcattagtgagcctttgctgatatttttacttaacactttcgggtccagagaccttgtcttattaatcacaaaccaaacttccagaaaacggaaatgtcacatttcattgctttttaattcttggtgttttaccacatacatacatacacccacccacccacccacacacacacacacacagagtgtgcaatggaaacttgtagagtgaatgtaaaaacagagggatgaattcagaacaagaccccatatggtttttgaagaacatacaatttagttgggcaaagaggagaccagaaatattcataagcaatgaaagatggcctggaaaccaagcaaaaagttgcagtagggaccagcagtgctggtctacaaattaaaaaaaaaaaaactacaaataatatataatattatataacaaatacatatgcctagagatactgctttgatgttctatgtcaactccaggctcctctcgctaagacactggcacacttcttagtttgatgaggttgatggaaatgcgttgctcctttcctagacttcttggtccctaaaaggttctgtggtgaacactgatccatcccaacccatgtcccctgcttctctgaatttttcctgattcaaagttgatacatacaaactatggaaattccctttcttttttaattccatgaagatcagactttaagacacagaatttccatgcattaaatttacataactagctatacatgttggcaaaagcacaaacctgcaaatgaagaccccagggggtttcctctgtgattttaattctcatttttatacttatcttcattttgcaaattccctacaatcagcttctataaccacaaaagtaaaagcaaataacaaagccctctagcgatgtgagaacattcacttattccttccttgactcatccatctctgcgttccttcattcactcgtcagccctactacttctcacagcactatgctggcattgtggggaaagggtattaaaaaacacggaggaggccgggtgcagtggttcaggcctgtaatcccagcactttgagaggccgaggcgggcggatcacgaagtcaggagatcgagaccatcctggctaacacggtgaaaccccgtctctactaaaaaatacaaaaaattagccgggcgtggtggcaggcacctatagtcccagctactcgggaggctgaggcaggagaatggcgggaacccgggaggcggagcttgcagtgagccgagatcgcaccactgcactctcgcctgggcgacacagcgagactctgtctcaacaacaacaacaacaacaaaaaaccaaggagcattcctacttcctgcttcaggaaatgttcatttctgagatgtcaagaggataaactttctggaatctcttattttatggttctctctcttttatctccttaaagcacgtaaaatcttcttttggttctaagaaatattattctatttatagtattattaatctatattattatcatattatatcacattcatttatgtaaaatcattattaatctgttaataacattatattattctcttccaaatgccctttgaaaaatagcttagctgatttttcagatactgttagcttgaaatcatgaactatatccaggtcttaagagaagtgcccctatttcatttcagattggtcaaagtattaaatcatcatctctgtttccttacatttttctttcattccttaaaagtgaaatagcaattcttattctcagggtaggctcacacagaacaataagaattggtagtagtagtagatgctatttctttctcccaaacatcaaaaataatccaccagattcccttggcattcccttttatgtaggctagatgtcctaattcttatttttgcttgagtggaaacaggctcagcatgtttaaggatattacctgttataatccagtaagttagaaatggggcaagaaccagaaaccgaagctccagaatctgttttaggaattcggtggaatttaaaaagaataaaaccatacctaggagggaatcacatctgcctgagatagtatatctttctgacaaaagtaaattgtctcccctgtgttttctttcattaaaaaaaaaaaaaatcagttgccatcagaaaatagcagagggaactcgggctgcagttagagactgaaaactacctgtacaaattatttccctaaggttcccatacttattccattctctcctcggataacaaataaacttgctcagttttgaacatcaagtctgactcttcgtgcagtgagctctccaggcgtcccccgttgcagggggaatcaagctggggctaatcagtttcttacatgattcccagcaggaaggtggtaatattcatgacttcagagaccaaaatgaaaccagctccttttctgagggcagagcccaggataaaattaatagtagcaactccttggatccagtgtactgtggcatcctgcgtgcaaacagctcaggaaaggttatagagaaggtgcctgttgtatgtcctgtcacagttcttcacttacattgaacacatacaaactacgaatctaagcctggtagttccttacgacttcacgacactctgaaaagttttgttcagtatgtttacagagcagctattatgtctctgcatgagattttgagaaagatcagtggaggcaggacatgaacaaaggcttttccagataaggcaagtcaattaaaatggacagagactgcaaaaacaaattctgattcccatgctaaaacccttccagcttgaccataaacacacaggtgtgcacataaacatatatactcacatgcacacacatacacacacacacacacacacacacatccttgcaccagcagtcatggaaatatggcaggaatcccattactagaaggctgagagctgaggctgggtaagaccagctattctgctcaactcaaccttgagctactcaaacttgacccaccctccaaggactgatcccagagtctctgccaggctgaccttcacccatggacctagtagcccaagctgcaagagttccagacaggctgtaaaacattaaaatgttcctgttatccaacagctttagggcacctgaagggcataagttattcaaatcaaaggctaatgttcaatttaaatgaaaacctgaaggctttgattttacacaagaaaaacaaatactttttatatttttataatttctaagcaaaaataatgcccaaaccaaaacaatactttctacataattcctagatatggataaacactgacatctatgtggttgtctaaaaatctattacaacagagtctaaagtgtactttacattgtttggtgttggattagaaatgccattcttaatgtaaattgctagcccatagaaatcattcaataaatgttaactattattgggattaccagtgttaactgtgattgcttgaatccaaatataaagcgctagacaattcattcccatctttatgtccagtcgtagttctctaaatggtttgggctaaacttcttaccctggggaggaatgacagagaagggaggtcaaggccaggcaggggaaggcaggcaaccctgtctagggtccatgcaatgtcaatagtctgaggccagtctccatgaattggaaaccaacgaattgggtgaatcctagaattgctatcactgttctcaaaacccctgccagcctgaagacccagaaacatcccgatggatatttaagccagctcagaaagctgccaccagggggcgcgacaataaggctgggacaagcagctcaacccagaaactccctggtctggtacctcagttgttcaattcattaacctcacaataagggaaccccacattttatacaattttatacaggcaaatcgggaccccatttattgtgttatgacgaggggaaccacgtgataacttttaagggcaaaaggagacaatatgaataataatattggcgtataacacataaaacaaaattgttcaggacaagcaggatatacgatcactctagtttttttattttttatattttactttttgagatggagtctagctcgtggtgcaatctcagctcactgcagcctcctcccgtgttcaagcaattctcctgcctcagcctcccgagtagctgggattacaggcgtccgccatcaggcccagctaatttttgtatttttagcagagatggggtttcatcacattgaccaggctggacttgaactcctgactccaagtgatccgcccacctctgcctcccaaagtgctgggattacaggcgtgagccaccgtgcctggccaggatcactctagttatgacaaatccactgtactattaaattattatttcattcaattgtcttgcatgttctacatgcaagcatacatgtaaactttggcactcaaattgccaacttcgcactaatgcctagacgtttgtccataattattaaatcctagaaagtgagcacatcatctatgcaacccttgaaaaacaaatcccacagtaatttccacgagacagaatattctacttattcatcactgaccatcactgaccatgtgtcataccagcactaactgcttgcctggagtttccgctctggctctttggtgagctgggagtccgcaggacagacctggccaatgtggtgctttccagtgctcatcctccatccagcaaagcacatcctagtaggaaacatgcctgcagtttcctggcctgcccagaccttcaaactactctcccagagcgtattagctgagatggtggcacgaatcaaaggaatcaataccagtggggagtagctgctcgggctcatagatcatttacttgggattgtcagatataactaaggaacagatctcctcaaggactgcgttccttgtgtcagcacagagtcttggagcgagagtgatggggatgttcccgcccacatgacctcattgggacatcgggctggagagacctgggatgttgaggcaactgccatgcaattgctactaggcagcggcacatggttcttggccaggcggaatagaaacaaggtttactgaaggggcctaggcaatttcatggaggaggaagcaaaggcagaggaagtgtccagggggccaggaggctgcatcccagggaaagtgagggctttgaggagcaagccaatttcacaggagacttgactgattccctggatccttgagttttgcagtttgtttcctctcatttcctccttgctctcttttctgactttgccctcattgtcctcttatcacagatatgttttgttgaacaaatcagtatttcagtattactttgggatctcattgacatcacatgtactgattaccttgaatttgtctcttcctccatccacggtgcgttatcttatagctttcctacaaaactccagctctccatctagagagaactggccgagttaaattccaactccgcattttatgagctgcgagaccgctctaagtctcagttttctcatctataaaatatgaagataacaatagcatctgccttacagagctattgtgaggtttaaatgagacactacattcaaagtactcagtagagggcttgtcattcatctttaaatgcttagtacatgataattattattatttatggttacatttaagctccttgtttctatcttacctttccgtgttttctcttaaaattaattatcctttcttatccagtccatttcttcctttcttatccaaaaagcaaagtaatttaattttactggttttatagtgttactggttggttttaaaatttttatgttgtttccatttttaaaagttttaatctcatttgctttctggctatcattttaatgcttatttgtaacttattctttatcattttgcattaattctactgcttgatttttaagtgtcttattttatttatttatttatttatttatttatttatttatttatttattatgttttgagacagagtcttactctgtcacccaggctggagtgcagtggcgtgatctcaactcactgcaatctccacctcccgggctcaatctcaactcactgcaatctccacctcccgggctcaatctcaactcactgcaatctccacctcccgggctcaagcaattctcctgtctcagcctcccaagtagctgggattataggcacccaccaccacgtctggctaatttttgtatttttagtagagacagggttttgccatgttggccaggctggtctcaaactcccgacctcaggtgatccacctgccttggcctcccaaacagctggaagtacaggtgtgtgccaccgtgcctgttattttagacatttaccttttattccttttaatttctaaatttaaatttatctcatcatatttagttttaatcttaatctttcattcttttttatattgatgtgaataaaagacattaattttgacataatatgtactttattatttcctctacctttaagaaagacatgaataattttaaaaattttactaaaattttaaaaattatgtttttgttggcaaataatcatatattatatatttatggggcacatgtgatattttggtatatgtttacattgtggaatgattacatcaagcttaacacatccatcaccttgcttatttattaatttgttttgtttttttttttttggagacagggtcttgctgttgcccaggctggagtgcagtgcagtggtgcaatcacagctcactacagccatgagctcctgggctcaagtgatcctcctgcctcagcttcccgcagtgttgggattacacgcatgagccactgtgccaggccttatatttttgtgttgaaaatatttaaaatctactctgacacaacttttactgatggggatggactcagggttggaagattagcacctgatagtttaatataatttcttatttttttgagacagactctcactctgtcacacccaggctggagtgcagtggtgcaatctcagctcactgcaacctccgcctcctaggttcaagtgattctcccacctctgtctccagagtagctgggaccacaggcacccccaccttgcaaggctaatttttgtatttttagtagagatggggtttcaccatgttggccaggctgatctcgaactcctgacctcaggtgatatcattttgtaaaggaaagagagctacagacagggatgtggagaagagacactaagggagagaagttcaatggggatttattttgcagggaaaggaatcataaaacgctgagcactgtgcagggtgagcagcctcctcagcctcctcagccttctctctggaaccttccatacagtctgcgtggttcactgtcccagtggcaagctatggctcttccttttcaaatcagcccttccaggcgcttttttccggtgcttgggctgagcttacagggaagcgtggctccagtgtctcttctaggttctgccggtagggggcgtgggagggagactgcaaggctggagggctcatttattcctgtttacctcctgttcagtccccatgaagccattctggctggtcctacctgtcaggagcgtttcattccagcaatgccagctgcaggaacagctgaatccagctagcaatttttccagtgctggcagagccagcttcatcctacttccttggacaccagccctagctgccagagccctttcctcagagctcagtgttcaggcccacagacccctcctctcaggtcagagataccagcaccggacagcagccctgaccccagaggtctgagttgcagctcacggggatcttcctccaagcttctccgttttgataattccagctctcctcttgctcgccagtccttggagtagctgcttcctgcaacagcggcctctttgattccctgctgcccttctctttgcctttcaagttacccagttagcaatgatttatatcaaattctcccggttagaataactggcgtcggttccatctcctgactggatcctgactgacatacttaggaatgcctgagaagtggattctcttctgggggcattgcaaagagaactactaagtattgctgcaggaataacttggggggaaataatacagactcgcttttcacaaaaacacagctgtgtctgagttgtactaatattgccttccctctcccattcgcttttctgccttataatttatttttcataatgtccagcaaataaaagtgtggtctgagaggagagaaccccctctctaaactgagaaagctgttactcttggcttcagctgttgccaaacccaaccttcaaaatgcctctctgagaagccagggagacctgtggttgatgcttctctggagctgtggtcctatctggacacgtagcaaatgactttattgtgggggctgcttcctggcagatcacacaaaccattccataaaggaagaccttcgtgtctttaaaattcacgtggaggctgggtgcggtggctcatgcctgtaatcccagcactttgggaggctgaggcggctggatcataaggtcaggagtttgagaccagcctggccaacatggtgaaacgccgtctctactgaaaaacaaacaaacaaacaaattagctgggcatggtggtgtgtgcctgtaatcccagctactcgggaggctgaggcaagagaattgcttgaacccgggagggggaggttgcagtgagctgagatcgtgccattgtactccaacctgggccacagagcaagaatccgtctcaagaaaaaaaaaaaaattcacgtggagagccattggattctggtaaactaagtcagtggtgtgctgcaagacagtggcaggcaggagtgcagagccaggcagaagccttcctgtctgtgccccagcctgactttgtgatgacacagaaggtggtggtatcccctcagatgggaaaagacacagaaaagcctctttggagggtctgaataggaatagtggtcctcatctcaaacacctggttagtttttagttatttatttatttacttatttatttatttttgagatggagtctcgctctgttgcccaggctggggtgcagtggcgctatctcggctcactgcaacctgcgcctcctgggttcaagcgattctcctgcctcaacctcccaagtacggggattacaggtgagcagcaccacccccggctaatttttgtatttttagtagagacggggtttcaccatattggccaggctggtctcgaactcctgacctcaagtgatctgcctgcctcaacctcccaaagtgctgggattacaggcatgagccaccgcgactggctacacctggttagttttgactttagggtcactatacatcacataactggatgttctctctttgcagtggctgctgaacattttatttttttgaaacaagatctctctctgtcacccaggctggagttcagcggtgcaatcatggctcaatgtaaccttgacctcccaggctcaagtgatcctcccacttcagcctccacaatagctgggactacaaggcaggcaccaccaagcctggctaattttgtatttttcgtagagacagggtttttccatgttgcctagggtggtctccaactcctgggttcaaatggtccacctaccttggcctcccaaagtgctgagattacaggtgtgagccaccgtgcctggccacaagctgaatattttagactcaagtttatgtctgacacctccagggccgtgtagaaatccagtggtatactacacattcactggcctgcctcctctcctgtccttttgcctgtttcttcacttttttaatttagatttttattgcagcatatatagattttttaaataaataatcagtctttgaatgtttgacatgatctagaggaaactgactacaacgtcgtttccccattttccatctcaacatttggtagagatgggctctcctagagtgagccaaatttacatcgctgttttgcagtggttaatgtagaatgtttttgcaatatcacactcatgacagggcacatccaatgaacatttgactgaagataacactagattccagaaagtatctagacactagaaagcaggcggtgataatggtagttaattaacaataacaatgtcaagtgtctggcttttgcccttctctaataaacctaaagaacagacattaactcggctaaatttgcccttactttcttacagccttcattatttaatttttgaatcagtaagcgcttcccacgggggtcaccttgtttgtcatcttgtcatctggctgtgtcccatcatcattagaaatacttgcaatttcccctttctcccatgtctgcatctattgggaggggaattatgctaatgggaatgctctatcctgacttgctatccgattagaacttcccttgacttttaaaacgctcctcctcgaaaagcattcatttgaattgtgcctaaagttattccagctgtcctgaggtattatctcagccaatcgttcttcctctggagcaagatctatttgtctatcgtagtttgacccacagttcccaacagattgtcagtaacaagagcccaggaacatctctgaagggctttcattgaaatcacagaagttctttagttcttcacttcattagtaggcattagaaaagctagtcaactttcttatttaatcaggtgcctgttgctttgaaaaattaccgaaaggaagaaaggagagactcacttagaggtatcactataggctgggtgtggtggctcatgcctgtaatcctgacactttgggaggccgaggtgggaggattgcttgagcccaagagttcaagaccagcctgggtcttgaacatggcaaaaccctgtctttataaaaaaatacaaaaattagccagacatgatggtgcatgcctataatcccagctacttgggaagctgaggtaggagaatcactgagcccagggaggttgaggctgcaccgaactgtgatcagccattgtactccagcccgaatgacagtgagacgcagtcaaaaaaaaaaaattactatatcatccataactaattattaattaggataactaggttttacctaagagtgaaaactcatagcaaactaaattatcacacgtcacggtgaattgccatagtcacggttcattccttttctcgcaactacaaaatgaatagatccagacccacttcagcaaggaatatgaaaggtaaacagcacatggggcccttagctgccttttgcaggaccctctctttttcttcctaaagtagcaattcacttatttctctaggtgggcacatcacggaaactgtcatacttaatcggagcctggagagagagattcaagcatctccctcacatctgcatagcaggaaggagcagagagaaatcgagaagattaagcagagagctttcatacccgagataacccagctgtgtgcaaaatcaagcctattgaacgcgaaagcactgcaccaccaaaataactgctttaaccaggaaggagaagaaccgatgccccaacagagcccggagagccacacagacacaagttgcatttcaaagtcgctgctgttgtctccaccccacgtgtctctgccttaacccttccttaccaaagttctgcctgatcatcttttttttcttttctttctttttttttttttttgctatacttctttgagacagtgtaaaccaaaatcttacctaaaagcaagatttgggcttttgacaacgttagccataggaaaaaaaattctatttttttgtaatctcaggcgactaagttaaaagttaattccaataaaacaacatttaacacttaactacttagggtactagccacatttcaactactccatagccacatgtagctgggtggctactgaattggccaacacagatgcagaacatgtccatcatcatagaaagttctctcggccatgggaggattacagaactcagcttcaagtatgcacatttaagtgtattcctaggagttttctgatgctgataggatgcctaaccagcttccttactgatcttctgatattactgtgaaagtggactaagaaaccaggattccctggggtgactcaggttatgtagaaattatgggccgggtgcggtggcttatgcctgtaatctcagcactttgggaggccgaggtgggtggatcacttgaggccaggagttcaagaccagcctgatcaacttggtgacaccctgtctctacaaaaaatacaaaaattagctgggtgtggtggcaggcacctgtagtcccagctactcaggaggctgaggtgggagaatcacttgaagctgcgaggtggagactgcagagaggtgagaatgcaccactgcactccagcctgggcgacagagcgagactctgtctcaaaaaaaaaaaaaaaaaaaaaaagggaattatgtttactcttgcaggcctccaggcctctgcttgatttgggatgtaaaaggagacttacctgcctactctttaaagtagcctctcaaggtccccttctcgtcgtggtatgagcctcatttcttgagactcttatttctttccaggatttatggcatattctggagggagcggattcagacagaaaagctggctctctgctagttttcccatgggccagcccccttgtcagtgaccagtctgcctcactgtgtgatggacagtgtgtcctgccactggtaatggaaacccagcaattgattggtcgttaggttattttcaaagctcaatattcagaataatctaagagacgccacataaccacaaggacacacaaggctctcataaccctctcaacacaaggcgcacttttcttctttccatcccagcaacaaactgacaacccagtcagcacttaagttgggggaaaaactaattaaaagaagaatctaccacctataggttaaaacaaaaaaacgcaattgcagctgtcttctccatgccagaggcctgtggtttgaatttcaatatcttcatctactttctgtcctgtggttccttttattctttatttcttgtcactatctcttatttgtagacacaaatgttccatattaaaacctaatctttaaaaagagaaagactgggctcagtggctcacgcctgtaatcccaacactttgggaggccgaggcaggaggatcacttgaggtcaggagttcatgaccagcctgggcaacacggcgaaaccccatttttactaaaaaataaatacaaaaaaaaattagccgggcgtggtggcatgctcctgtaatcccagctactcggaaggctgaggctcgagaatcacttgaacttgggagtcagaggttgcagtgagctgagatcgcgccactacactccagcagcctggatgacagagtgagacgctatctcaaaaaaaaaaaagagagacagagaaacaaaatatttttttaattgcataaaatcctaaaggtgagatccacaggctcatgccccactgattggaatgcaaaatgctacaatatctctggaagtaatttcatccagaccaatcagtgaccttaaaataatttgtaatcttggacctaatacctctactattagggagctggcctacgaagacttctgcccaaggatggtcatcacagtattatttataattctcccaagctgaagagaagacctgaaatgttccaaagagggaaatggttagataagcaacatatttataaacaacattccagagtgttctggaatgtcatacaaactttccaggtcatgttttagaagaacaattaatactacaaaagatgctcatattattatgttaagtgtctatatcagtggtccccaatctttttggcaccagggactggtttcatgaaagacaatttttccacggatgggggtggggtgatggtttcgggatgattcaagcgcattacatttattgtgcacttaatttctgttattattacattgtaatatataattaaataattctacaactcactatcaggcagaatcagtgggagaatcatggactggaaccagtccatggcccaggggctggggaccccctggtctatagtacaatataaccctgtgtataaaatgtgactttaacacaggccccagtctttttgtctgtaaaatgtattaattacattgtccttccccttttaaggttttctgcaagagttaaagaaaatacacctcatcaattgcttagcagaatgctcaacactagcaggacagctataaatgtcagctaatcatcctaggtaaccacacacacacacacacacacacacacacacacggagggaaggagaaggaagattaggaagcaacacacaatgtattagtaggcagtggggttactagtgttttttatatacttttttatttccctctttatactgtttacattttcagtgttatacaataagcatacattacttctgtaatcagaagaagtcagtataaacctcaccttaatataatgaaacaaaattgttggctgggcgcagtaactcacacctgtaatcctagcactttgggaggctgaggccaggggatcgcttgaacttaggagttcaagaccagggcaacacagtgagacttcatctctacagaaaatgcaaaacttagtcaggcatggtggtgtgcgcctgttctcccggctacttgagaggctgaggtgaaggatggcctgagcccagtagatggaggttgtagtgagctatgatcacactactggcctccagcctgagcaacagagccagacccagcctcaaaagaaacaaacgaaaccaagcagaaaacaaaaaccaaagttattgcttaaatcctacatgctgccttgaagctattgtaggccagagttctggatgtaactgctgagggataaagtgtgttgttcagggtgccaatggccctgggctcccccaggtctctggggagggctgtcctctctgtcacagaaaatgtcattagcacactcacccactcccgccttactcatatgctctcatgttatctaccgcgtggatgctgcagggggtgacatcctagttagtcccaagagccagactgcccaaagctcactctagcgagccctgccttggggaaggaggaggggactctgcgaacctcctacctgggctgaaggaaggccactcactcccccacccctcccaacctcagctgtctgtgctcctggtaggccactcaccccctgcctacaggcttggaatgtcaaggccatgatgacctctggcctcccctgaacccagagctttccctttacaaggaaggggagactgagacctggagcagggctaagaaaggcacagtttgggactctggcctcttctcatgcacctgtatctgtcccatgcctggttcccattcccggatccttggaagatccatattgatgaaacagtaaagggtgatgggcactgaaaggccgctaagttgctccctgaactttttcccctcccaaactctcctgtggtcttcagtatttaacaggaacctcttgacactctggaggggtgagcttctcataggaggcccgtggtagggaggctgtgggagaggtcaggcactgtataccttcccaccatctgtgaatggttccatttccaaggccacagtaaatgcagggttgaaggattcctcccggaatccttccttttctcttcctcactttccttgccttgtggcctcatcactccaatatctctgctgccgtcttcacatggcatcctcctctgtgtgtctctcctgacacttttcttctcctgacacttgataattttgtcaagttatttgacaaaataattggatttctgggtgcctctatccacgctggcattttaacactcctgtggcagattgcataggctccctccaaagatgtctacctggttcttgtgaaagtgctgatatttggaaaaagaaatctgtacatgtagttaaatccagcacctcaagatgtgatcatcttggattagggtgggccataaatccaatgacaagagtcctcataaggaaagtggtgggcatggtggctcacgcctgtaatcccagcactttgaggtcaggagatcaagaccatcctggctaacatggtgaaaccccgtctctactaaaaatacaaaaaattagccgggcatggtggtgggcacctatagtcccaattactcgggaggctgaggcaggagaatggtgtgaacccaggaggcggagcttgcagtgagctgagattgtgccattgcactccagcctgggcgacagagcgagactgtctcaaaaaaaaaaaaaaaaaaatagctggacatggtggtgcatgcctgcagtcccagctaatcccaggagactgaggtgagaggaccacttgaacccaggaggtcgtggctgcagtgagctgtgatcatgccactgccctccaacctgggtgacagagtgagaccctgtcccaaaagaaaaggctcaggagagacacacagaggaggaagccatgtgaagatggaagcagagattggagtgatgaggccacaaggcaaggagagtgacaaagagagaaggaaggattccaggaggagccaaccctgcaggcatctcaatttcatacttctggacttcagaaaagtgagagaagaaatttctgttgtttgaagccaccaagcttgtgatactttgtgccagcctgctatagcctgaatgattatatctccccaaaattattccattgaaatcctaactcccaaagtgatggtattaggagataaggcctttgggaagtgattagtcctcttgtaaaatgggcccaagggaggtcttttgcccatttcaccatgtgaggatggagtgacaaggtaccatctatgaaccagaaagtgagacccaggcaccaaatctgctggcgccttggtcttggacttcccagccccagaactgggagacattcctgttgtttataagctacttagtttatggtgttttgttacagcagcccaaacagactaacatgcaacaaactaatataacccctgaattccagaggtcctggaatgaggtccctgaacacataccctgcaataccctgccttcttatatttgctcaaactcaaccacacagcatggaccttcagtatcatttactgagcacctaatatgtgccagccaggagtaggtgctaaagaccacagatggacaagtcagggtcctggcccctaaggagtcagtcgtaagcatctccaatagccgcactgtatcatgtgggccttgactgtggatttccgtctttgtttgttgtttgtttctttgtttgtttttgagatggagtcttgctctgtcacccaggctggagtgcagtgacacagtcttggctcactgcaacctctgtctccagggttcatgtgattcttctgcctcagcctaccaagtagctgggactacaggtgcatgccaccatgtcctgctaactttttgtatttttagtagagatggtgtttcaccgtcttgaccaggctggtctcgaaatcctgaccttctgatctgcctgccttggcttcccaaagtgctgggattacaggtgtgagccaccgtgctcagccagatattcaatttttaggaagttttatcttatgggggaaagaaaatgaaatttttagtttagaagaactaggttcctatccccccatctcacttccctggtataacagtactagtcaaataaattaatgtataatgtttgagaatataaacaacattattagctaatttttttgagagcttacactgtattagctctattctaagcatgtcaatcacttaatcctctcaaaaaccctatgtggcaggtactgtcataatccccaatgaacaggtaggagaaaaccaaagcttggaaaagtgaggctgcttgctcagtgttcctgattcagtgagaggcagattctgggtttgaagtcacgtgggtctggtttgagggcctaagctttgaattactgtgttccaaaatagctccttaaggcacgcatcactattgcatggaccagaagacagaggttcaggtatttctacagaactgctataggaatcaaaccgtatcatgcgtgctatctgtcaagagccagttcctatttctcttaaatcccatcctcctttctcctgccatgataagatctttagggtcaaagattgtattctacttatcttgggtcctcctccagcttagcctgctatccccatcagagcaaatgataattgtgtgtctaccacaggccaggctggatcgtgatgtatttcaacgttccaaagtcctcgaagcgtttgaggctggcaactaacagttaagtaagaatcacaagaatgattcaaattagtgtgaaaactgtcatgcattatagcacattataaacccatttcctaatggaagttgcagaggggctgccatgagagagatttaagtttgaagggcttaaaagcctgattatctctcagtgatgcctcagcactggggaagtggctgcctggtgtttctctctgtgatggagacctgtgtggtgtaatgaagcagcacagagctctgagatgatgcctggggtacagacagacatcccctgtgatccttccaacagtaagtctttgttggggctgcagaaaaagtgtcccagggtagctccaaattgcatctcttctcccagggagaggaggtgagctgtgcccttctacccagcaccacacccctcaccttccctatgggatccccactaacaaggggccaccaccgatatccagtggcactgaggactgcaggagcagcatgggaggagatgctttgggagaatatgaaggacaagaggttgcacatcactagcctttgcctgcttagaccttttgtttctagggaaaggtggaacagctcccattatcctttcagcttcatctaaatgacctccaccccacccccaccttgtcagaggacaaaggcgtggatcagatgtttgctgtgagctcctagcatccagggatctcatttcccccttaatggaaaagcagatctactcccccgataccgaataaaactccttagtctctgtgatgtccgctgccagctcagctctcccactctagatgctggataccatgaaaaaaacgatatacacacagtagatccttaatgtgcatgaagatgtcttgaaaccagagtaggagaccaggaggatgactgatacttgttgtgggcaataagtgagttgtttttagggaagggatttcaaaatttggaaactgtaagtaccttaatgcctttggaatgaactgcttagcacctatggtggctgagcaggagatgctgggatggtttacttatgaatgcatttttcatgatggtccaggtatatgtttgctgtatcttttttctctgaccttaattctgctgccatgaagaagaaagtggagtagatttccctcaagggtgtgaagccctcggagaagtcacttacggcaaaccacatgctgggttcagaaatgtaggataggtcagatgcagtggctcacgcctgtaatcccagcactttgggaggctgaggcaggaggatctcttgaggccaggagtttgaaaccagctgtggcaacgtagtgagatcccatctttacaaaaaatttgaaaattaaccaggtgtcaccacacctggtatgtgcttggagtcccagctccttaggaggctgaggcaggaggatcacttgagcctgggaattgcaggctgcagtgagctatgattgtgccaccacactccagcctgagtgacagagaaagaccctgtctctaaataaataaataaataaacaaataaataaatacagggtacatcagaaccttcatggttgaaatgatgaatatttattccacatgtactatggaccaggtactctggtaattgctctaaaagcatgatcttgtttaattttctcaacagccatgtgaggtaggtgctgctattatctttgagctcagagagggtaagtagcttgtctgaggccacacagacagtcatcagtaaagccggtattcaagctctggtccaggttttaacaccaccaaagattctcaaagtgaccagtcctgatgggactagatcatccctcaggttgccctgggctaggatggtctgcacaaacaaaaccatcccacagaataggagagccagagggaggtaaagcatggcagcaagccagcccatcatgttctctgtctgtataaatcccaccctcaattggagagtctccccactaggggtggtgatatggtttggctgtgtccccacccaaatctcatcttgaattgtagctcccataatccccaagtgttgcgggagggacctgatgggaagtaattgaatcatgggggtggtttaccccataaagttctcatggtagtgaataagtctcctgagatctgatggttttataaggggaaacccctttcacttgggtttcgttctctcttatctgcccccatgtaagacatgcctttcaacttctgccatgctgttctcgtgatagtaaataagtctcacgagatctgatggttttgtaaagggcagttcccctgcacaagctctcttggctgccgccatgtaagatgtgcgtttgctcttccttcgccttctgccatgactgtgaggcctccccagccatgtggaactgtgagtccgttaaacctctttttcttttttaatgacctagtctcaggcttttcttcatagcagtctggaaatggactcatacaggtggtcctcagagtccttggaaatgacacctcctagagaagtacagagcccagcctgcagaactctacctggaggccctgaacacagatcttcaaaccccaacccacatcccatgtctgggcagtcatgctgcatgaagtcccaggctgggagttggctgacattggatctagctttgactgtgtcacatacaagctgaacgaccttagacaagtaactcaacctctctgaacctcagttttctctctggaaaataaaagagtgagtttaaagttctggctagctctaatgtcctataacctgtctcatttgaacccaaaatatttataccttagtacttaatatacattatcttgtacagcatttttatttccatagatctctatttctaccatatttttctaaaaattatgtttttcttaggtaaaacctctagatcctcaattaatgcttaatgagttttgaatgtttatagtcctattttctatagataatcttgtgtttgatatatttcccatgtgcctagaagtctaccatcatggcatctcatgggtagaacaaaaattgtagcattctgtgaaatatagaaaggaaggaagccaactgtgatttttaaaaacctgctttgtattgtgcctacatataaacaaagaactatctacataatagcctccatactaacgtacactttaacatcataatctataggaatgaattgcaccaataaatctaacaggcttgggccaaaaagaaacattgttccagtttttttgcaacttattattgaggctgaattagagcaagcatgatgaattggatcacttaatgagattaaagataaaacatatacagttttaaaacaccaacagttggactattgacatggcatgagagtagccagttaagttgggaaaaggtagataccatcaactagagaagccattgtctacaaaaagcaattgtcttaacgaaaaagccgtggaaaataaatatattccagtggctccaaagttattttaaattccatgtgtacagttcagcgaaaaacaagccaggccctaaaataattaaagccatcaatatgaaccacttgagtttgaaaggatccaatatttctcactcataaaaaatgaaataacgtgtgcaatttggttctttgccatctgctacttgaattgcaaggtattgttaaaaagttaattgaacacccaaatataattattaggactatagaatgcctaatctttgccaaatcattcaagaatggcttccttttttactgtaattttaaacttcataaactaaaataacgaaagtaattttatactttgcaggctctccttcttagagcaaaagaacattaaggaagtggggggaaaagcaaatttaataaaattgtgtgtaatgacacaattccccaccgaatacggtggcaaggtgttcagctgtttctcccactcattctgaaagcttttcttagaggttctatttgaggatcttgggggaagcctagagagaatagtgccggcatatgagcgaaggtctacattaactaatcagtcagttaactcaccaagtttaacccaagaacgaggaaagcctaccgtgaaattaactatttcacactttttaagaactttgtcatgggagtctcagttgctactgtccttacttcgtagctgcccctgcatgtcgaaggggaaataatctttactctcctgctcaggttctttgattttcttcctggaaggaataaaaaaaaaaccacgttgttttcctcttgaaaatcctgtgagctgagattgcaatctccatgggggaaagaagttccactacacgttctgtagcggcacctaaggccatgttgtgctgcttttggacgggaactctatgtctgggtgtttgaaaccccaccagctttgtacaaactgtgattattccaaaattccgtcccggggtctgagatttagtgaataaatgtgactcaccccatcctcactattcctaattaaactgacttccaacctactcaaactcagttccattttctctcctctgtttctaagcaccccgacattttaggactccttggtttctttgcatcttcaaggtaaattaacaggaatcacgtttgcacttccaataggtacaggaactgtatttgctcaaaagtggaagagaaggctgggcgcaatgactcatgcctgtaatctcaattctttgggagtctgaggagggtgcatcacttgagctcaggagttcaagaccagcctgaccaacatggtgaaaccccatctctaaaaataaagaaaattttaaaaatgttctaaaaagtagaagagatttgattttgtctgattttgtctgaaatatccttggtcactggaagaggctatgttttcaaaagaggatgcaaattgccagtcttgtcgcagccacccgttcgccagcaagtccttctccttgattttcagattcccaagacaggaaccaaatcgttaaactctttgtctccagaacctctctttgtttttctccttttccctgcttcccatgctccctctagttttctgatgtatatttcataagtgtctatcatatgcctgaaacatggctgtgtaggcaaggagggtctccaccaggataatgatccttcatttctactctcttcttttgcattctgtatctagacgcttcccaattccataataattcagtttgtttaacttagtccgaaatgcagttgaggattttcctaaatattatacacactgatcccaaggacaagggaacatgctgggaagtcctcctgacagccggtcaccgaacaggggggcatggcctccatgggactgactcaagatcaccttcacttctctgtcactatacttgattcagttatccttttagtttaaacattttactatacagaatgtttccaaataaatatgcaccttgacccagagagaattttaaaaggtgtcaaataaaattgtcccaaacatcaatccctagggagcccatgatttctactttggaccactgaaatggtttggccatgtccccacccaaatctcatcttgaattgtagctcccataattcccacatgttgtgggagggacccagtgggagatcactgaatcatgggggcggtttcccccataatgttttcatggtggtgaataagtcacaggagatgtgatgggagatgtgatggtttgataaggggaaacccctttcgtctgggttccactctctcttgtctgctgccatgaaagatgtacctttcaccttctgccatgattgtcaggcctccccagcgatgtggaactgtgagtccactaaacctctttttctttataaattgcccagtcctggttatgtctctatcagcagcatgaaaacagaagaattcaaccacccaccagggtcatgaggtggtggcctagtcaaagggcatcagggctgaaatccagctggctctctgcaacctaggcgctggctcccagacaggtctctgtccacttatagagaaggccaccttttgaaaattctcacgcaggtgctgtgtaggctggcagggtctccaccaagatagtgatcatttatttttactctctctctctttttttttttgctttgagacagagtctcactctgtcatccaggatggagtgcagtggcactatctcagctcactgccaccttcacctcctgggttcaagtgatcctcctgcctcagcctcctaagtagctgggattacaggcgttcaccaccacacctggctagtttttgtatttttagtagagatgggtttcatcatgttggccaggctggtctcaaactcctgacttcaactgatccacccgcctgggcctcccaaagtgctgggattataggcatgagccatggtgcccagcttatttctactctgctttttttgcaatctatatccagacacttcccaattctatcatgattctgtttgtttaaattggtatgaaatgcaattgaagattttcctgaagattatacacaatgatccccttcttacccatatgcccattcacaccagcagagaaggtaactgaggaatttgactaacttcttctttcatccagtgggcatagttgtttaaatgttcattctctgccacagattagaactcaaaacagctgaggtatcatcctttggattaacccactagctttcagtcatagttacataaaaatcatcataatcccttacatttgtataagattttatggtttatgaagttctttgtatttacaatctcatgtcatctcatgtgattcgcttacattgcgggaagtcacagggctggattaaggtgtgtcttagtggctgggcacggtgtctcacgcctgtaatcccggtactttgggaggcccaggtgcggggattgcctgaggtcaggagttcaagaccaggtccctcccacatgtgggaattatgggagctacaagatgagatttgggtggggacacagagctaaaccatatcattctgtctctggcccctcccaaatgagcctggccaacatggtgaaactctatctctactaaaaatacaaaaattagccgggtgtggtggtgggcacctgtaatcccagctatttgggaggctgaggcaggaggatcacttgaacccaggagccagaggttgcagtgagccgagattgcaccactgcactccagcctgggcaacaagagtgagacttcatctcaaaaaaaaaaaaaaaaaaaaaaaaaaaaaaaaaaaaaaaagatgtgttttagctatacacttggtaatcatagtaagaaggggataagaggaggggctaggaacataggaagtaagaggaaggcaagggagagggatacctgtgagaaagccagatacacaaggctcaattagtttgacaaagagagatggaaacacaacaacaaagacatctcaaaagccagtgtttccagtttgttttgcactgtccaagcactagggtaggttccctttgtgaccacaggcatcttgagtctcaggatccctgtcttaaggggcaaccattcttctgtgttggaggacacccattctgtcccctctgcccgatgcttttaataaggacctaggtatcctggaacctatgtcaggactgacaagtgaaattaggtaatccacaacctcccacaaatattctctgagcacctactttgtgccagcgcattctgatgccatcagaaatttgcaaagtaatataactcttcctattcacaaatgagggacccgtgcttggagatggtcaggcagctctctgaggtcatggtacaaggtggaagctgacctcaaattccatcatgtctgatgctgcaaacctttgctttttctactgagtcacagtgctcggtgtgatcctgactgttcccaagaactgttttgtttttcaagacatgagagtacacagagacagctaagccccatgtaacaccttcagagaagggactggggaacttcagaagtgcccagggcaagctgggaggctgcctgtgtgcatcctcagtccagactcatttagggaacatagtctgccggcggggaggagaaatgatgtttttggtcaagacttgaattttttcagatgtttaatcacaagcgatgctagtcctgcctgaaaccctgaactacttgctattgagagtgatgaaagtacatttccccctaattcaagataagagagaagggtggagatttctagaatgtatgtttccctatctattgcgaatggtgtctagagcctatctgtgaagtgacgaagcagttttcatgccagggtgtctactgtccatgacgaccatgtggtcctgacaatcccgggtctgggttgtcctctgctgtcatcccagaacttacgttctagtgattagcatccatttgcccttgcccttctaaatgacgaaactgttcagcactgatgaactgcaacatatcatcgtactcaaaggggctcccacacaccaagtcagtggtcagtgtgagtcacctccaccaagtcaagcctcaaagtgccttgtttatatggccccacttcgggaaacagctctggctttatttggtggcaatatgactaatttgtcatgctcattcaaagataaaattggccgtcaacataaactcctttaagcactttgtggtaaaagcaggtgagtttgacttttagggaggtgatgttccccattagtcaatcccctccatgccccaaagggggtgccaggatgaccccatctctatcccccgccttgaggccaataattgaattttttgtatgtgggttctcctacatgaaattcttcacattgccatactgtctgaaatcccaccgattagaggaaattcacttatcttgaaagctttctgattctgcagtaaatgactcttaaattcgctgacctcagtgcagcagtgggagtgtcagagaccagagtcattcaatagaggaccagcagaggaggggtgcctccatggaggcttggcagccctggcatacaagaggcaaccagaggagttggctgagttgcgtgtgtgtgtgtgtgtgtgtgtgtgtgtttgtgtgtgtgtgtgtgtgtgtgtgtgtttactgggggctcccagagctcagaggcaggtggtatcagggaccaggaactctactgtattgattggactgaagagcagaaccctaccatattggctggattgaggagcaggaacctgactatttaggctggactgaggggcaggaaccctaccataatagtctggattgaggagcaggaaccctgctgtattggctggattgaggagcagagagattgaggaaagacttcctgaataaacatggagaacatgcagcgaatggtggcaagacttgggaagaggagaatcaaggtgcaaactcaggttcctccttgatggggcaaagcagaagcaagatgatctgatgctgcagggggctgccctactgccctgaggccccttaacttttcttacctggatcagcacagttgtgagagcttagctggaggctggctgtccataggtcagggataactgctccatctgtggagggtagagaggctttggggaagggagccaaggggagagcattggtggagatgtggcctaatttcatagcctggagaatcaagaaaattcagctcaggagttataccaaatacaggctcttttatcctagtgtgttagggccaaccctgaatggcgtgatctggagaggggaattgcaacattttgtctttttcaaaaccaaattggtttgctttagccctaacatcattacttttaaccttagggagaagtctgactatatctgtacttcttaatctcttgctctgttgcccaggctggagtacagtggtgtgatcatggctaactccagcctccaactcctgggctcaagtgatcctcccgcctctgcctcccaagtagctggaactacaggtacacagtaccacgccgggtaattttttttttttagagatggggtctcactatgttgcccaggctgatctcaagctcctggacttaagcagtcctcctgcctcaccctcccaaagtgctggggttacagatgtgagtcacaatgcgccgccagtgattttgtttctgaacctgtctgtgttattggagggtctgcagttgaagattgggtagtgaggccccagtttgtttttctagataacaggcttaaaaatgattgctgcttctcaggaaggtaggtaattacttcttgtaggttttgcggtctctgtctttttaaagggagaaaatgattgttcatttgcccactaccacgtacatgccatatgtgtccaatgtctcaattttagttcatcagcgaagtatgaaattattttaaaatggcatatctttcgatattcaaatgagactcaatctggcatggaaaaatacaggatgttaattattctttgtgcatataaatcagctgtgaaatcacttgaaactcctgtatgtttgggttctttgtcgacagggccgaataattatcaacaaacctcagtgagccttgcttagcaaaaggtctcattattcaacgtgagtgtagctttgaacgtggaagtagaggtgctctctagcgtgcgaaatgcgtagccaagcttggcccctgctgagcgtacctggagaaggtaagtgatgtctatccagttgcccaatcatcagaatcatctttggagagcagaagatgtgagaaacttgacttgattagagtgagagagagagagaaatagagaaaccaggccatctgtaacagcagatattctaaatcaagagtaggaacagatacttagaaattagaagctacttcttacaaatgatattcaaatgtgattcccatcatatatgaccccgtcccactcaaattgtgtttctctccatccctctccctccccactgcagaatcaggccatggtattgagtagaagaggactggagtgaaatctccttggaaaaaaaaacattgtttattgttgatttcaagtggcactgtggctttggtgattgcaacaggctctgtaggccaggtgcggtgcctcatgcctgtaatcccagcactttaggaggttcacctgaaggcaggcagatcacctgagctcaggagttccagaccagcctagccaacatggtgaaaccctatctttactaaaaatacaaaaattagcctggcatagtggctcatgcctataatcccagctactctggagactgaggcatgaaaattgcttgaacctgggagtcagagttgcagtgcgctgagattgcaccactgcactccagcctgggcaacagagtgagttgagattctgtctcaaaaacaacaacaacaataacaacaacaacaaaacaccagtgacagccactggcctagtgattctcacctcccctgagatgcagacttctagggtccacatctccggatggagcaggcacaactgctaggcaaagtcatcatggtgcctctccccagaaccaccttttctccattgggaccaggaatgcctgttccctcactgtgtgagcaaggagaaaattcttcctttcttcccccatatctggagtggaggtcaaatccaggcttatctcttggaagagctgctctctagaaggcaacagactacactgccgttggctcccctgcattttctttggagttcttggctcaaaaagagccaaataggggctgggtatggtgactcatacctgtaatcccagcacttttggaggtcaaggcaggaggatcacttgagccaagagtttgagaccagcctggacaacatagggaaaccctgtctctacaaaatatcaaaaaattagccaggcatggaggcacacaactgcagtcccagctgctcgggaggctgaggtgagaggatcatttctggctgggaggttgaggctgcagtgagctatgattgcactactgcaatccagcctgggtgacagagcaagaccatgtctcaaaatgaaaaaaaaaaaaaaaaaagagagagagagagagagaaagagagaataaagccaaatgcaacatatggctaaaagaagatattctagcaaccccacatctccctgtcgttggactcccctctgcaacccatgggcacctgtgggatagatactccatttctctaccctcattaactctttcctgctaagcaacaaactgaaaagattttcggggacccttctctaatatggatcatctgcatcgggagtttgccctgcattccctcaaatcacttcctttgaaaagggacatacattgtccattgctctgctcaggcgaggagtcctgtggctctcacaaacaggacggggctgctttgccccatctgatggaaagaactagctcctctttcaaatccgtgcctcttctctgccaaaagaaaaaaaaagtgtgcagaaagccagctccataaaaatagcccggtttctgaggaatgtctcaaagaatcaaggtcctcatttctaaaagtgttgcagacacctgcagctctgcctctgtgctccaagatgtctctgctttctctgccatccttgttcttctgcagcactttgtagctttcctagaacacttgccacagtgacctgcatatgtgtccacctccccatcaaaggagggccctgtgagagcatagctgtggtttagttgactttgtctttcttccctcatttccactcctactcatactgggcagaaagactttggtcccagccaattaaaaggccagttaatctatttaccagggaagcattttggacagtcaaaattgtttgcactttgattaaattttgattttttttttctgtgaagagtttcaaagtattagcatctggcaagtcagcctacgtggataaaatttcaactgttcagggccccacctagattccagtcccaaagcagcaaaagataagagaaggaagcttaaaagagtctctcatttatctccttggagcgtatgaattttgatgacagactatgttaagaggagagaattgactaatttcatttcactggcctgaagctatggggagacaggcctcaagttttgtcaactttttttgtaagtctaacttgcaactgatgtagagcaggtccagaggaagccgttattgacctacttaataaggtagaaagaaaatatccaagagggctcaaagaaatacaatggcaaatcttcaataaatgtgctctgccccctctcatcatgatgtacaacatctgaactctaaaaatccctaaaaatgcaagtgtcccccatagtaacagagtcacctgactgcaaataagcttgacattcttattagaattagcaggaacagtgaaagaataaatatacaccaggtggcggtaagttaataatattttacaaattaacataaaacattgctgaaaaacatttagcctaaaatcgtcactactaaaatcatcattttgaacatattaaatttataaaatgtaaatgagaagtatggtgaaacctcatccccaaccctcaatcccaaccccgtagccaagaatgtggaaatgaaggaagaaaagctttcaaatcaacacctaatggattaaagcagagagacaccaaactgcttcaaagaaggcaagaggtcctagggtagcaagaaaagtcttcaatctgatcgaagagattaatattcccaagggaaaccgtgccttcatttgcatgaagtgggtcatctatggaaacacagtgaaaataacaaaaggaaattcttttagatgagatttggcccggcttccatgcactgtccagggcagagggcagccagctgacagctgatgggacagagggatgtacagtctgcttggcaatcccctcccgattgtgaggaacacatcaggctattgcagcctgatctcattacaaattcacaccattaacccccttgttctgattgcatgtgcaccaaacaaccttctgatgatttgcttccctctgtagctcttctgtaagtgatagaagaagctggttagacagacatgtgtatctgttctacctgccagttcgatttctcctgatacatgaataaactggcgtttgggttctagatattgttgctcagaagttttgtatgagtcagaatctcccagtgtgttctagggccatctcaaaggggtcatttcttggccaaagctgacctctgggtggccagatattctactgataaggagctggtcttgctagttcctacaagtaaatattctaaagcaatgtgtaacagagcctttttcatctatttgagatttgaagtaagtgtccaacatcaaagttacagtaacgttctctctcaggtcacctccctgcatgttttttttaaattttaaaaaattttactttaagttcttgatacatatgcaggtttattatgtaggtgcacatgtgccatggtggtttgctgcacctgtcaactcatcatctaggttttaagccccgcatgttttccctgggtgtgagttatgtgcagaggactcctcagtaactccatgcccagctctgtctcccaagcctggaccattcaacagctcactgtacctctctccttggagatcacgcagacacccaaagttgacatgttaaaaattgtgttatcatcgtatacatcagtgtgtttcagctattttgtgcctgttccagagaccaggttgcttaaactatagaaatgtacagtctcacagttctggaagcaagaaatgcaaaagcaaggttttggtagggttggttccttccgggcgccatactggaaggatcccttataggcctctcttctgggctggtagatggccatcttctccctgtgtctttacatcttcccatggtccatgtctgtgtccaaacttgcccgtgttctaagggcatggcgggttaggactccaacatataaatgtgaggagaacacagttcaacccaaagcaccatccttcattcgtcacctcatcaaatccatggaactgcctgcaaggctccacctcacgagggtctctcggtcactatcactgccctctgttggcgttcatcattccttcttgcctgtctcctggtccgctttactgccctcctgctccccgctgccttccaagaccccaatcgactcttcacacctagactgggaggtctttctttaaaacacctgacattgcccttaaagtacttcaacggagcccaatgaccctcctataaagtcaaaattccttgtcacagttcctcaggcctgccacgatctagtgcccacacacccagcctcatggctgaccactccccacgagggctgcacatgcccgcaagatggatctacttccaattccctgaaggtgccaagctttcctcttgcacccaggcacttgggcatgctcttccctcagcctggagcactctggttcaggttcatctctttagtcgtcttctttcttctttccccttcctcctcctccttctcttcttcttctttttttttttttttttttttttttttaggcagagtctcactctgtcacccaggctggagtgcagtggcacaatctcggctcactgcaatccccacctcctgggttcaagcgattctcctgcctcagcatcctgagtagctgagattacagacatgtaccactaaccccggctaatttttgtatttttagtagagatgaggtttcgccatgttggctgggctggtcttgaacccctgacctcaagtgatccacccacctcggcctcccaaagtgctgggattacagatgtgagccagggtgcccagccctctctttagtgttctagcctccccattcctatgctctcagcttgagcgtcacttacaccaagcctgcatgaggtgtcctctttttgttttctcataatctcctttcttttactcataaaatactgaaatacccaatttctgcatccacattcttcactagactggaagctctaggatgcatgagatgctattggtcacacagtcgcatctctagaccccagaacaggttcctggctcatagtaggtgttgaccagcattgctaagaatttgttgaaaatgataactttgtgactattttgctttctaacaaagttttctggccagaattttttttttcttttaacggagtcttgctctgtcaccaggctggagtgcagtggtgcgatcttggctcactgcaacttccgcctccctggttcaagcaattctcctgccccagcctcccaaggagctgcgactacaggtgcgtgccactatgctcagctaattttgatatttttagtagagacagggtttcaccatgttggccaggatggtctcgatctcttgacctcatgacccacctgtttcagcctcctaaagtgctgggattacaggtgtgagccaccgcacccagcatagaagttttaatcaaatcattttagattcaaatgttgatagttggaagacttctgtcattattcttgttgcaaaactcacacccaggaattcaaatccaatttatatcctcacagagcatatacaatgacgatatattcacaaaaatacagtgaccatatgtccccacttgattgggaccatccagcttaagtttattgtttgagcttaattattaataatgttcccattgactctcctaagggctctggcttgggtgattaattacctactcataagccaatttacaaatgtttaattttgtaggtgaaaatagtgttttgctaaccctgttttatttgaagaaagcaaaaagttattgtccaaaatgcagaatgaagtttatttgagaaaatcttgtttagttagaaacaagagggtgatatagccagggtttgtaagaggcagacttttaacctgcagcaaaagtgaaacaacgaatttgagtcaacttgcaaccaacccaacaggagattcacgcatctggagtaattgagttaaagcagattaggttctggattaatacacatcactaatttctatttgtttgctttttttttttagtaattgaaaaatacatgcaattaatttctgacatgaagaaaaattacaattaatccctcactgttcaaaagcagaattctaggagttaggtcagttgtctagaacttctggatcagatgatccaaggttgctttgttatttagtttaaagcactgagtattcccacaatagctgtttaagcacggtgtgacagtagcattaaaatatgccccacggtctaacacgagccctgctggaatgacctgttcatgtggacttttcttatctttgctccccttcagcagtgctaatgttggagaaatgttttttcttgttttttttttgtttgttttttgtttttttttaagatgctaaaaccaggccttttgaatggtgggaggggaagagaccctgaactcatttccaggataagacaactttctcatttgactagttcaatttttttaaaaacctacttaagaaaatatattctaatagaggtaataaaataaagcattgaccacataagcattgacctaggatttaaacacattatttaaaaccaagttggttgcatgggtggatatgtgggttgcacatatcctatcatttaaacttgtgctactcaaaatattacatttctttaagtagccccacttttgaaactaaaagcagctatggaaatacgtcaaccagagaaacttatgtactcttacaaaataaattatgtactcttatgatttgagcaattgtagctcactgcagcctcgacctcccatgctcaggagatcctcccactgcagcctcccgagtagctgggactacaggtgtgcaccacaatgcttggctaatttttaaaaaaagatgtagagacagagtctcagtaagttgcccaggctggtcttgaactcgcgggcacaagccgtcctcccacctcagcctctcaaaatgttgggattacaggtgcgagctactgaacccgacaacccacacacacatttttattttaaaaagcaagccatttaacatcaacacatcctatataaaatataaaactaaaattctgactccctagagctatcacattgtaacaaagctgaacactcatacaatctagctatcctgtcctctctacatggggtcattctgccccaaatcaaaacatgaattgtcctatgaactataaaagttgagttcatgccctttgagaattggtggaaaatccaatttgcttctctccatctctgtctatagaggaaggctgatctaattgtgagagaggttttcagagctcaactgcacagggagcttcttataaatagttactacccatctttctaatgacagccatgtatacacatttctgaataaaacacaagcaacggtgcacacctctcctttacagtccatagaagttcaccacagttgctcatttcccaaatcagaaatgtggggccctctcccccctagcatcttgggacaaaaacaccaaatttaggtaccattttgccagttgttgttgtcactgaagaatggttaagaacgtggaatctggttcctgtagacctgggtttgaggttcaactccattaagtacaaatgcgtgtcctgtgcaaatttctttagctattctagggttcactttgcctgtttttgaaataggaataaaaatagtctctaaatcacaaaatgattgtgaggattatgaagaccatgcgcataaagatcttggcccctggtagatgctcagcccatattagttatcattattgtcatttgttttggctgtggctgtacgattgctactcacaggagctatcattggtactcttaattcctgacgagaatttttaaaattttttattgtgatttttttctttccaacttttactgtaggttcaggagatacttttgcaggtttcttacacggggaatttgcatgttgtttgggtttggagtacagactattttgtcacccaggtaatgaacacagtatccgataggtagcttttccgttgtcaccctccttccaccttccaccttcaagcaggcgctggtgtctgttgttcccttccttgtgaccatgcttgttcaatgtttgacttccctttataagtgagaacatgtggtatttgatttttctgtttctgttttagttcacttaggataatggcctccagctgcatccatgttgctgcaaagaacgtgattttgttcttttttatggctacatagtattccatggtgtatatgtaccatgtttctttatccagatgggcactaaggttgatttcatgtctttgctattgtgaagggtgcttcaatgaacatatgagtgcctgtgtctttagggtagaatgatttatattcctttggatgtatatccagtaataggattgctgggtcaaatggtagttctgttttaagttctttgagaaatcgccaaactcctttccattgttgctgaactaatttacattcccaccaacagtgcatgagtgttccctttttgctgcagcctcaccatcatctgttgttttttgactttttcataatagctattctgactggtatgagatgatatctcattgtggttttttttttttttgagacggagtcttgctctgtcacccaggctggagtgcagtggcatgacctcggctcactgaaagctccacctcccgggttcacacccttctcctgtctcagcttcctgagtagctgggactacaggcactcaccaccacgcccggctaatttttgttgtgtgtttttagtagagacgaggtttcaccgtgttagccaggatggtctcgatctcctgaccttttgatccgcccatcttggcctcccaaagtgctgggattacaggcgtgagccactgtgcccggcctctcattgtggttttgacttgcatttctctattagtgatgttgagcattttttcttatgtgtgttggccacgagcatgtcttcttttaagaagtgtttgtttatgttttttgctcatttttaagggggtgggttgtgtcttgcttgttgatttctttacatttcttatagatgctcgatattagacctttgtcagatgcatagtttgcaaatattttctccccattctttaggttgtctgtttactctgttgatagtttctttttctgtgcagaagctcttcagtttaatcaggtcccacttgtcaattttgttttcatggtaattgcttttagagtctttgtcatgaaatctttgccagggctgatgtcctgaatggtacttcctgggttttcttctatgatttttttagctttaggttttacttttaagtctttaatctatcttgagttgatttttgtatatggagaaaggaaggggtccagtttcaatcttctgcatatggctagccagttatcccagcacccattattgaatagggaatccttttcccattttttgttatcgttggctttgtcaaagattggatggttgtacatttgcagctttttttcttggttctgtatcctgttccattggtctgtttgtttgtttttgtcccagtaccctgctgttttggtaactgtagcccttcagtatagtttgaagttgggtaatgtgatgcctctagctttgtgccttttgcttataattgcttttgctatttgggctcctttttggttccatatgaattttagaatagttttttctaattctgtgaagaatgtcatttatagtttgataaaaatagctgctgaatctagaaattgctttgggtagtatggacaggtattgattcttcctatccatgagtatggaatgtttttccatttgtttgtgtcatctctgatttcttcagcagtgttgtgtaattctcattgtagagatctttcagcctccctggttagctgtattgctagattttttattcttttattgcaattgtgaatgggattgtgttcttgacttggctctgagcttggatgttattggtgtatagaaatgctactaatttgtgtacccagattttgaatcctgaaactttgctgaagttggttatcagatctaaaagcctttgggcagagactttagggttttctaggtagagaatcaaatcacctgcaaagagagatagtttggcttcctctcttcctatttggtcttttatttcgtagtcttgcctgattactctggctaggtcttccaataattttagttctacagatagagttgtagagtaggaaaaaaaaatacagactttttgagacaggtatttcaacccagtgtgacacatagtagttgcatgtctctctggcattttcttaatcctctgagactcagtttccttatctgtaagatgggaataatgtcaacaggattattgtgaatgcatatgaaagtacctgacacagtgtaagcagtcattaaatggttactcttaatatgatataattagttattctacctccattggagagcaaaaatacatatcctcagaagcatctgattccacgaaattatcctcacacaaaactcagtcatctggctaggagcagtggctcacacctgttatcccaacactttgggaggccgaggagggcagatcacctgaggtcaggagttcaagaccagcctggccaacatggtgaaaccccatctgtactaaaaatatacaaaaaaattagccaggcatggtggtgcacacctataatcccagctactcaggagtctgaggcaggagaatcacttgaactcaggaggtggagtttgcagtgagccgagattgtgccactgcattccagcctcagggacagagtgagactccatctcaaaacaaacaaacacctcaatcatcctgagtgcttttgtggccctagttagtataggatgtaagacctttggaaatgcacaagaatcagaacagactggaaaataataaaaacaggcacgctgaaaaagactcactgcttttgcttccttacaaaagaatgcgctcagcacagttgggaggctgggagaaggagcggcagctgcaatgaggctgcacagccatgcacttgattggctttcgcaatttcaagagctaaagtcagaatcagaatctgcttcagattttaattcagcatgtaaaaggctagagagatgtttctgaaagtgagtctgcaataataaatcaatgggacacagggaaaatattctaaataggcaacattttgccattgctgaaaatttaaatatctcttcctttctactgtgccaagataaagggctaagaaagaaatcccaagctaatggcagagaagactaatgtattgcctcccaagactaagcacagaacacacgatctcaccctgctcagccacagacaggcagataaatgaaaatgcatctttttttgtctgaactcttgacatagcatctgtgaagataagcatctctaatattgattccctattcagtaggacttcagggaagaagaagaaaaaaaaaaacccatcagtggctgaaccaaccactgcaaccctatgtttctgggttgggttgtttgagtccctggtgaaatgtctgtaagttctgaggccacccatcacactgaccaaaacatcagagaccaactctgtttttatcgttgtgcattcagtaaagttcttatcagcaactttctcttctccattggtcccctggatctcagagggatcccggggttgatgtgaaattaggcacgagggaattcttcttaggtagcagccagcccacgttactctgggctgccagatacaagtcggtggctctatttggggacgccatagcagggctggaattcggcattctgaagacacatttaatgccaaagccagtcttctgtgactatggtctatggatttgttatgtgggtcccaatgagaagggccctggctttgttctacaaacagaacctgataaccacagcgtaagctcgatgctaaaaaccaattctcccgtattaggatggctgacactttcagccagaactgctggagaagtgtctctatggtgggcattcagatcttcccctttcatcatcagaggcacagcctcatggtcccacctctactaacagcccctgtggctctacgttagatcagttgctactgagtctcatgcaggatccacgaattacagggaatttttagcatcacactaaaatggctccaagctctgactttcaagtatttatctttagcaactgtacttttgtagtgctcgttccttttttcttatttgttgctatataggtacgtgcagaggtggaaggggtagttcccttcaagtctcgtaattagttcacctgtagttgtttgggctggcacagtggggtattttctgggtctgtgttatgtcaaaggcagggctttataggtaacctaagctgtcttttttttttgacacggagtcttgctctgtcgcccaggctggagtgcagtggcgcgatctcggctcactgcaagctccgcctcccgggttcacgccattctccggcctcagcctcccgagcagctgagtccctggtgcccgccaccatgcccagctaattttttctatttttagtagagacggggtttcaccatgttagccagtatggtctcgatctcctgacctcgcgatccacccacctcggtctcccaaagtgctgggattacaggcgtgagccaccgcgcccggccgccaccaccattttttcatacacactcccctctgcactgctaggaagcgctctgttttatggttgttcctggtttacactataatacatcttccagagcaatgttaacacctatccatttgttacttcaatggggtgtttgttactgaacacttgttatgcctgttaacacgggtataacagaatccaccactgccacgggttcagtgggtgggcttcccaccagtgactctccagcggcttaagacagctgcgccgttgcagccgtcacaaaaatcagcataggattccagagtgcagcagaatatcttctgtccttgagaatatttgctggtgttgccatctggccaggaaagaacataattaggcttgacctgccatgattttctaagtgctgtatagaattaagcacagaccacaattcccgtgccaaaccatattcacccatgattcttccaagaatcaggcagcaaatccaaactttgatatttaaagatgcagcaacctaggccaaaagagagagtgtctaagtttcactaaatcctggagcaagaatttggcaggtcctggaagaaggtgaaacagagagggcttcctctagcttcatgcacgatcatctgccagggcatctctttgagcctttctttcctattcttgacgattttctaaaagggatgctcttcgcgcacttgccttcaacttgatggcaaaagacatcagagtaaaacccttttccttagtcccatttcattctcagccttgcccctgtttataggtctttaggaggacttgggtcctgggcagaccatcccatcagtagaatgcacgcatgaagcgtggatgaagagctcttggttgtaatccaagaaggaaatgcaggctgatccaaggaaagaggtgtgattggaaggatttgaagaactcattgaactgggagtgagactagagaactacaggcagaagatgagcaggagccgaggtctaggtggcaggagagacagctgaggtcccacagtcacagccaggacactgctgctggccccataccactggatgcttgctgctgctgctggagcctgggtcagctctgcggatcaccacctgccctgccagggtgcgctgcctctgtggatgctgaggaccagacaagggcttccaatcagctgggtctaggtcaatgagtcggtgccccactgcctgagggcaagagagggaacatttggccctgctcgggtgtcatactgccttatctactggatgggtgagtgcccaaatcagcaagcggttcagaggatggtcagccaacagattaacaaacaaataatccaacaacgcgcaaacatccagaacagatgctatttaagaatgaggacagctaacgtttcaaggaggatccaccctgctcctgagtgaccctggttctgtgtgtttgggtctgggtctgctcatctataaagtatagctaatgaaacctatattttaagagtttatgtgagaattagagatactgtagataaattaccctgagaaggaactccaacaggtcagcaaaaaaaaaaaaaaaaaaaaaaaaaaatcggtttttaaaacatttttataattttttgatagagatggggtcttgctatgctgcccttgctggtcttgaactcctggccttaagcagaggtgaattcttggccatatgtagggtgcccacagctgcacagaagtcagataggatgaggagatagaacctggagtgacgagcactgtcacggtaagccaagactctagaatatgggatatggggttaggagatgtgtgctaggtgctgtttcttatactttttcagcggatgcatttaatcagggagaagtcacacatatggggcatcaatttctctttttttgttgttgttttgagatggtgtcacactctgtcgcccaggctggagtgcaatggcaggatctcagctcactgtaacctctgcctcccaggttcaagtgattctcctgcctcagtctcctgagtagctgggattacaggcccacaccacaatgtccagctaatttttgtatttttagtagaaatggggtttcaccatgttggccaggctggtctcgaactcctgacctcaactgatccacccaccttggactccaaaagtgctcggattacagacgtgagccactgcacctggctgcatcaatttctctgctgttgagagagagacagacagagacagagagaattccagctctgtttatgctacacagctgttgctaggaccaaataagataatatgaggagctaccaactggtaggcaaatgctcttcattatgttgaccacttaaggtcccttctgagaatccattatttattctgggtctacggaacactgactatgatgagggtgctaaggctgctggcgagggtcctcctcggccagcttctcctagcagcagggcacgcacagccctgttttctcatctgctttcagcagcatttgcctcctactccacttgggtcactcaagggtcccaaaatagacctgtgcattcatgggacccctcccacctgcctctctgctcagtgtctctgttgggacaggcagcaagtgcttaaatcccagccactgctccccgctggagtccacctgagaactttcccagcaatttgacagaacaacaaggcaccagttacacttctctatcatctattgccaagctacaatgggccaggcactgtactaagcaccttatatgtggggtatcatctcattctcataataattctgcaaggtggatagaattatgtttccaagtttctaggagaagtagagacttatttagattaaatagcttgtctaaaatgttccggcactacatgagtccaggtaatgagtccaggcctgagtcttaaccactgtgtggcgttcggccaagaaattcgatagtcaccaacttcatttcttccttaggaaaataattccataccgtggcccatcatttctccaaaggatcttttaacatatctttttccgttcccccttcctttttgagcaagaagcattttttattttattatttatttatttatattttactttaagttctgggatacatgtgcagaacgtgcaggtttgttacataggtatacatgtgccttcatggtttgctgcacccatcaacctgtcgtctaggttttaagccccaagtgcattaggtactcatcctaatgctctccctccccttatgctccttccccctacaggccccggtgtgtgatgttcccctccctgtgtccatgtgttctcactgttcaactctcatttatgagtaataatatgtggtgtttggttttctgttcctgtgttagtttgctgagaatgacggcttccaacttcatccatgtccctgcaaaggacatgaactcattcttttttatggctgcatagtattccatggtgtatatgtgccacattttctttatctagtctatcattgatgggtattttggttggttccaagtctctgctactgtaaataggaggtgcttttttactgattcctttcgactcttatttcctcatgacctgtaaaaatatgtgtcaatattgagaacacagaaagttaggcttgacatttcaccctgaagctgctgtcattttaattatctggcacattcatagaaaaacatcccagagatgcctgactttacttttcatctgtggagatactgttggattgtttaagcattaaaatctcagaaacagaaatgctacttaggttgtataaccctacgtggcttaatagactcatggatctccttaatttgctctaattaaaagtgccttttaaattgataaaaacaaaaagttttgttgagaattgttcttttaaaactggcaaaagctggccggacgcggtggctcactcctgtaatcccagcactttgggaggccgaggcgggcggatcaggaggtcaggagatcaagaccatcctggctaacatggtgaaaccccgtctctactaaaaatagaaaaaattagctgggcgtggtggtgggcacctgtagtcccagctactagggaggctgaggcaggagactaggttgaacccgggaggcggagcttgcagtgagccgagattgcgccactgcactccagcctgggcgacatagcgagactccgtctcaagaaaaaacaaacaaacaaacaaacaaaaaaaaactggcaaaagccaggtggggtaggcaggtttctactgatctaaaatgtaactactgaaactacctgaattccagcctgactgttgagattgcacagactggccaagtggaacagagaataggagaaagagagaaaagaaaagatgctttctgagtgagtgtttgctcagctgaaagcatggtgtgatttttggaaatattcattcacgctaggattacttttagccaatccattcaaagaatagtggtgtttttgctggaattgatgtaacacctttggaaaagtaagtaacagggtcctttgcacctcagaaagtgcattacatcatgagatacttggtgaactgtaaatcaaatcatgtattgatttacaggatgctccgaatgcatgctcacctgggccgcctattgataatagagtctactatgttgatggttgctagagtcaccatcccaatactgatggagtaatgacatcttcattattctcgcccatgctctcttcccttcccctccgaaacttctcctaatgaggcaggatggttacgtagtaaatctaaccctgtcacacaaccgaaacgccctgttggaagtttcagacagaaatcacacaggctgctgcatgacggccatttatgatttctcagactttcctccagtgctttcttttcccggtgtgtgcgtgacatttctatcatgtggcattctcagcacatgtgtcaggcttcaccctaaacaagcctgctggtgtatgatgataaatagtgccacgatctgcagcgattcccacccctccacatcctggcaaaggtctcctagcaactgttgttatgggcaacactagcatgtttagttcaattcagtggctacgggccatttctggtctcctgatggaggttcaagtctatgccctggagattcggatcccctcacaaatccacatgcccattataacttcccttgtacctgcataacgtttaaccattattattaaatttgtccgttcagcaagattgaaactgccattcggaagctattgcaccttccacacaggcagtgaaaaaggactaacatctgaatttcgctacaaggtaacattcggcttcattctctttcctgtttaatattcacaaccttaactttaaaatggtttccaaactatggtgtgtggtataaaaacaaaaagtaagaacagaaggaaaaaagtccattattaagcccctgctgggatccctttctctttaatgcacttcaaaaaaaaaaaaaaaaattccgggcaattttgtattcagatgcatcagcagaaccaggctgcaaatgtctgcattggtggattacatcaccccctactgattgatccttttaatggctcagcattttgcaaatgaagaagcagttacctctgttctgttggctattaattccatctacatagggttctgctggtttaatgagcattgaatatcttccatcaaaatgcagtgctttcaagggatgtaataaaatagcctatgttaaaactggcctataaaagtagcttataataaaatagcccagctaatgtaaaatttaattccttcactatatttatgaaataggcaatcagtcctcattcagagaaaatggaatgtacaccaagcaaaatcagctttgacctgatctctttaaactcaatagtaactcagttggaaccatctgaacttgttttttgaaaaagcttctagaaccttttttgtgattgtcagcattttcaggacaactttgtattcaggtgagcctgattattcaacactaagatttccatttggcatgaaagaggtgtttaaattatgagtttatttttaattcttggttaaaaagtagtcttctattcttggaaagcagaagtacaatggcttgaaggacaactgtgcactcaggcattgatctttagcgtttatactttattagccaataccgaattccacagtgattctaatccccttctacaaagcattggagagggatttgttttaccctccctaaaaaaaaaaaaaaaaaaaaaaaaaaaaaaaaaaaaaagagccaactgagaattaaacagaggtgttgccaggaacagacattacaaacataaaatgaacagaacagaagggctgtctaggagtttgttgtccatctgccctacaggatgggaagagtggctgaggaccccaaggccacacatgctgggatttctggggtgatttaggaagagtgagaccatcctgaggatctcttctgttttcctaagctgtatcaccaccaagctgctttgcctgtaacactgagctcaggagtaggaggaaactgctgttttctaagacagtgctgatgctctagtggatatcagcctggaggaggacctgttgcctagctccatactcactactcgaggtacttgtacctattgtctcaagctaagtacaccaggcttgagacctcagacatgtaggaaaaaataaccacttcaaaagagaaaagggttagccaattctgagaaaacagagtccacagattggatatttattaccatcagggatcgtatggagcatggggatgagaagaacgtccaaagatgagggctttctttattccccaagtgttcttttccaatatgttgttagatctatctagtacacctaaaagtcagacgctaactcaaatcagaagcattcctcaagctaattttattctcacaaatctctaagggactgcattattatattagattttgcagatatttcttacacgtcgttgctaaggatgttggagacatttggtgatagatagcccgcaggtataagtagtatattaatggtaataaaaaatgacaaaagtccaataaagacatacaaaggataacttttgtgttcacattgttctttgtaaggatttaaacctatgcctctagtgcatgacctctgaacaaaattacaaagtaaaacaaggataaggaggcaataaatgccaaattaagtcacgatagatggaacacaagagggaccctgtccttcgtacaaataatctgaaacgaaacaactaatactccaagacttttcatggggaggtcagacagggagtcagaagtcaaagagattgctggtgagagtgaaaatggtgcattcactgtggaaaggagtatgaaagctccttaaaaaattaaagatacaattacagtatgatcccacaattccacttgtagatatagatcaagaggaattaaaaacaatgtctccaacagatattttgagacaccatgctcatggaagcattatttataaagggttaaaaggtggaagtaaactttgtacccattatagatgaatggataaataaaatatggcatctgtctgtctatctatctgtccatccctccatccattcatccatccatccatacacacacacatgctggaatattattcagccttaaaaaggaaggaaattctgacctatgctacaacacaaataaaccttgagaacattatgctgaatgaaataagccagtgatatagtttggctctgtgtcctcatccaaattgtaatccccataatcctcacgtgtcgagggagagacctggtgggaggtgattggatcatgggggcggtttctcctgtgttgttcttgtgatagtgagttctcatgaggtctgatgattttgtaagtgtttgacagttcctccttcaaatgctctttctcgcctgccaccatgtaagatgtgcctgcttccccttctgccatagtttcctgaggcctccccagtcatgcggaactgtgagtcaatcaaacctctttttttaaataaattacccagtctcaggcagttctttaaagcagtatgaaaataaactaatacaaccagtcataaaaaggcaaatattatgtgagtccatgtatatgaggtgcctagaatacggtggtcaagttcatagagacagaatgtaaaatggtggttgctagggactaggggagggggatggggagtacttatttaacggatacagagtttcaatttcagaagacagaaaaaaaagaaaaacttctggagatggtggttgcacaactatgaatgtacattcacactgctattaaactgaacacttaaaaatggttcaaatgacactttgttatgtatatattaccacaattaaaaaaaaaaaaaggagtagtcagccccaggactgcaatctaattacattcaaataggcattaagaagaaatgggccctcagttgtatatctaaaataaaagtgatcatcagtatcttcttctcaacctgtggtcaaaggccttcttctttatcaatgaatgtacacaactccaccttgaaagctcagagaataacaattgactttgggatattaatggctaattttccccaaaggtgagggagcaagaagacatatgaccaaatcaattagcccccttaattagtatgaattaagtcttgcttgaaagaaagcaaatggaacagaacacaatcactttaagaaaaggcaggaggagttgtaataattgctaccattccctaaacacctcagatgctaccctgtgctaggggatcatcctcactgctgttcaccagccttgccagacttccacccccttccaggcgccagaatgccttccctctggcccccttgtggttaggtggaacccagtgactagcgtctaactaatgagctgtaagcagaagcaacaagtgtcagttccaaactgaagcatctcattgctggtgcaagatcccagcaatctatgcggattacattgcctgagatgggggctcttgtatccacatgaggagtcatggtaggcatttgacatttaaatatgacatttatattataatttgatgtgatatttaaaggtagttataaaccactaagatgggggataatttgttaccatgttttagcctagcctacttttactacaaaacgaaatgaaaaaccaacctaaacactgaactgggcacattacctatataatctaaagtcctacaatgaacctgcaaggaaatattacatatccattttccagatgaagcaactgaatctaaaacatcacacccaggaaggcagcacttagaatcaaatacaaattcgtctgactccaaaacctgtgctctttccgcagtaatactgagttctctttaatgttcaggcttactttgaccattaagatgcaccatgagtcatttcctgccacctctaaatggctataatgctctttctcctcaagcaataaaagatgatttctctgcctcactttactagcctctaattaggcacgatctttctggaagtacagtctcctttggtcagcaaagaccttctgagctcttacatcccttgaatatggaatcttgcacaaaagcctcaggctcttagttttcaagctgtgaaatgggagtactaatgactcatcacaagcttgctcatggacattgcacaaccacacttacgcttgggtccccaggagcaagtgaagccatggacctttcttaggctgcttgggctgggatcagtggcagtggaggacatgggtcacaggtcagcatgggaggagagcataggcaccggccttaggtctccgggttcgttggtgaggtatcagctctgaggtatgggcaggttatttgtcctttctatagtttcctcttgtgcaaaatgcggatgaccaagggattgctttgtgaaggaagttagttcaaacaaataaaacactgagggagtaaggtagagaggaatgtctagagtatttgcagcattcaaagagaggaaaatgctttccagaagctgctcaagtcctgttgtgggctgaattgtatctcccttaccccccaaactcatctgttgaagttctaatccccgctacctcagaacgtgaatgtatttggagacagggtcattaaagaggtaattaagttaaaggaggtaattagggtggccctaattcaatatggctgatgtctctgtaagacgaggaaatttggacagacattgcaagaccatgtgaagacccagggagaagacagcatctactagccaaggagagaggtctcagaaggaatggaccctgctaacaccttaatctcggactgctggtctccagaactgtaataagtttttgttgtttaaccctcccagtctgtggtgctttattacggcagcccaagcaaactcatacaagctccttccagtgcggggagccagaccaactctgaaaaccctcgttggatgctgaggctgggccacttagccggctgtgcctgaaagaggacacagcagcacagcagccacacagaacctccctccgtcatctgcctttgccatcatcattccaaaaactgaggcaaaggagactcaagggctgtctgccctgctactgcgaggggctcctcagatgctcccattcccaaagactgatgtggtcccagattcagcaggaacctgctagagaaactccatgtcaatgcttggtttcttgttgaatcaacccagatttctcaggtccaattaaagaattaggtcttcaatttaggagggttacagagagatgggggcaaaatcaatttatcaagaagaacctttatatcacaactaagcacaaaacctaatgtcactagcctcaggaaagtactttatgagcacctacacagatccaagaagtggtagtacagaaataagaaaacacacatacacacacacacacacacacacacaagtgcacgcatacacactttcatgcactcatacacaatcacacatatatacaggcacacacaaacacacatacatatgcacacacatacacatgcatgcactcatatgcaatcacatgtggacgtatatgcacacacatgcatgtatttacacaatcacatatgtacacacatgcatgctcatacatatacacacatatgtgcgcacacacacgcacatacagccttaatgccactgatacaatagtgaactataagtaattaagttactttgactaaacaccaggtctgccaggaaaaagtgtttaacgccatccccaaaggacgttgtggcgccaaaagcaagaaagggaggttaggtcccgcctcggtggaaatacaaaagagagaaaacgcggagatagtgagagactaaacacaggagaagaaagattgtgcttcaggtggaaggggagggagtgtgagacaggaagggaaggggtgcccagggacccaggcaaggaaggggtaatcacccggtagtgtagctgcgttgtgtgaacatgggcacggttagagggagtgggcttccctgaggggtatatcaagctctagaatattttttcttcacaggaggtttttaaagatgacctagatagttcacttccctttctgtacaggtgggactcgcaagctcttctagcgcgtgcaccaatctgggttggagcatcacataaaccacctctcagctcaaacttgccgatccccgctggccacacagggagactagtgacccaaagaccagtgggagactgtgatggccatgcccagagtcaccccgcttccatcctggtggaagtcagtttgccatctacacaactagagatagacattcagttacagcccagatggtcctcactgttaaagcactgtgcctgaggaactagattcaaacctctggccctggaatatagacatttacacggtgcccagaacaatggcaaattgaaaatgcagctcatagcacctgtcaaaagaaataagatcacattaaaattcttgccatttcctttttctgctaaactaggtaggttaacatacagataggcctctctctctctctcactctcactttctctctctctttctcgctctttctgtctctctcttcactccacagtcagttttctggagtgtggcccaaagatccatatgtcaaaacctggcagaggaagctgataccaaaaccacatttattcttttcctttaaaaatggcttgggaaattagcccctacatttagggaagtccgagtgaagaagagggaagagaggggaaggccttacggggcacaggacccgctctgattgttggaagtctcagccttggcccaaagcccagcctctgtcctctgcttaaattgagtgtgagggaacaggattatcttggttgtaatttttaaaatgcttccaagcattgtataaaagtcagagagctctgttggaccttcacacgaaacagcattttcgtaagttaaaaaaaaaattggaaacaaacgactctacatggccaaacctcatcctaagccaaatgacaaaataagtagtttgccttctgttccctctgttctcaaaccttcctgctgtccctacccctggcacctcagcgggtgcttctctgttgcttccctcagctgcccaattccccacgtaacatgagctagcattaattgagcacctgctgtatggtaggcagaggcataagtgccttgtaaacatcacatttttattctctcacaactttatgagttagaaaactaatctgcccaaatataaggagacccatcttctccaatgagaagttctcccatcaacactttaaaaaaatccgattgactatatgaactcaaagatataaataaaacaaatatgacttaaaaaatttaattccgttgcacatgcatatttaaaaccacatactatctaaataatacattaatgtagaaatagtgcctttttccagtcttacatattacagaattttattcatcaatgtgttcgttatctctagagccaattttagagtcattcaattcattttttacaggacatatcaccttcatttccctctgaattgtttgagatgtggcacactgtcactggaaattttttcccaagctgtaaatgaatacacattaatatcacattaggacagatgttttatttattcatgctattggtgtatatcaaggagttctacaatataactatttaccttattgctttttaaaggaatcttcacagggtttgtttacaatggcctccaatgcttgcattcatgaggtcatattccaaggaataattgctaaatgggttcaattcatttgcctcctttctgttcactgattctgtcagaaaacctcagtaagcactccaaacaagcactgatggaagtcctttcaggccagtgttttttccttaaacaattccatgtttgtcaagttaaactaagtgagacagcatcccaaggtttgaaacaattggtaaggattcttttatttggaaatgccttcttttctaaggtagaattttggtaaaatcacttgcacctacgttttgacatacgtgatgactttaagtcccttttacagatgacaaaactgaggttcagatattaaaataaccggccggatgcagtggctcatgcctgtaatcccagcactttgggaggctgaggcggctggatcacctgaggtcaggagttcgagaccagcctggccagcatcgtgaaatgtcatctctactaaaaaataggaaaattagccaggtgtggtggtgggcacctataatctcagctactcaggaggctgaggcaggagaatcatttgaacccgggaggcagagtttgcagtgagctgagatcctgccactgcactccagcctgagcgacagagcaagaatctgtcttaaaaaaaaaaaaagaaagaaacaaatagatattgaaataactttcctaaaatcaaagaactagtgtttgtgtgaaatgaagctggggccagaggccaggactgtcttactctagggcccacatgctgaagccccagtctgcactgcccatgccaccccagtgtccatctcctcatgtccaattctgcagccgcttccctttccagaacttcagtcagtgctgctctcagcatccataacaatgtctatttcttctaccgacccagaaatttcacttacaggaatgtcactgaaagaaatcctcatagatatgcaaaacaatttagcacaaggatattcatgatagcattattcttaagggaaaaaacttggaaacaaagtaaacgttcccgataagggatgcatcaactaaggtgtaggtacaggatggaagacaaagcagtcattcacgaaatcctaagtggaaaaaacgagaggttgcgtaaaataattctagttttactttttaataaaagtatatatgtgtcaaaaaataggaaagaaacacaacaacatattaatgtagttactcttcaggtgatggaactaaataagattattttcttgtttttactttatttatttatttatttatttgagacagagttttgttctcgttgcccaggctggtgtgatctcggctcactgcaacctccacctcccgggttcaagtgaattctcctgcctcagcctcccaagtagctgcgattacaggtgcgtgctaccacgcctggctaagtgttgtatttttagtagagatggggtttcactatgttggccaggttggtcttgaactcctgacctcaggtgctctgcctgcctcggcctcccaaagtgctgggattacaggtgtaagccactgtgcctggcctgtttttacttttctattcctcctcctcataaaaactgtgcccatttcaaaggaataacttcaacaatgagaatttgggagcaaagaaagaggaagcatagaatagcaggagaaatacctggtgaaaatggcgtcttgttttataagctgttgcctcctctactttttacaaaggtgttgccctataaaaggattttccaattaaggggaaaagattaaggctgtaatcctgggatgttatcaagtctataatctgtttggtctctctattacaactgcccaggtataaaagcctgtcttgtagaaccaacaaagtgtgtaaacctctcagccatatgtcagaccctctgtggggccaaaaatcaagcaagctcttctagagaattagctagttctcttttaacccagtccttggcttcagggctgtgctggtgggaaacaacagatttagcaaaaacgacacatttcctacccccagggagtccagcatgggttgctgatgaagacatgggcacagtgagcagagagggaatgggcagtctcagggggaggcccaggagtcacagccaggcacttgctggtctctgggagtgatgtccagcacctacagggctaatagtaccagaatgaaaaacataatacgaggccaatttgtattcattgccaggaagaagcaaagctgcctcttagaaagttagcattccatgccccagttgcatagtttctagctgtattcaaaacctggcctctttcaagagatcacagtgcccaaagggaacagccaaaaatatgctcccagccagtacctaaactgtgtagtaggcagcctcaagacagcccccaatgaccccacctcttggtagttactcccagtttaacccctctctttcaaagtgggataaacttatggatttgtttctaactattcaatagactattaattagaaacaaatcaatacagcagaagtcaaggagtgtcacttctgggatttgattataaaaagattttagtttctgtctggggtgtgctctctttccttctttcttgctttactaacccaggggaggccagctgctatgtcatgaggcacctctatgggaggtccacatagtgctgaacgtaggcctaccaacaatgacaagaatgatcttggaagcaaatatcccccagttgagccttcagatgaaactgcagccccagtcaaatgcgtcactacaaccttcaggaatgatcttgaagcagaagtgttttgctaagctgcacccaatttcccatccacagaaactgagatactaaatgactgttatctcaagccactaagttttgggacaatatgtgaggcataaacagataactaatacagactccaaataaacactttgaaagaggagttccaggtgatattaaggagttttaaaataagaagtctctttgagtggctcagggtttacgtgggccctggagccagattcctgggagttcataccccagctccaacactgatcaggatgaacccagaggcaaattacttaacctccctgtcccttcattttttgatgggaaaatgggaataatattgctaggtttatgggaggaagatcaaacgagcatgtgtgcacacatgtgcacacacacacacacacaatttaaaacagagcctggcagagagtaaatgctgtatatatgcttattatgatgattattaaagcatgagaatagaaaagaagacattagtatcatactatgtatttttaagctttaaaattttattgcatatattttatttgaacaaactatatttatagaaaagtttcaagaatagaaaaacgaatgtccaatgcccttatcctagattcctcaaatgttaacattttattatgtttgtttcagccttctctttctcctttcctctcctagtttattttcaggttgatttaaagtaaaatgtatccataaatactccagtgtgtctttccaaagagtgagaaatttccttacctaactacaggaaattatcaaaatgaacatatgaacgttgaagcgatattatcatctaatctacatatcttgagatttttgccaattggacaaaaggacattattaagaatgttctttacaggaaaagaaaatccaaaaatcatgggctacatttagatttcatgtctctttagtaacagttcttgactctttttggggtactttatgatattgatatttctgaagagcataggccaagcattttggagaatatgcctcaatttggggttgtccagtgtttcctcagaattagattcaggttatggcccttgggcaggagtacactctggaaatgatggtgagttctcaggtcactcatatcaggtggcccatgctgttgattcatgccatttctggcaatgttaactttgatcattggttaaggtggtatatgccacatatctctaccataatattagtttttatcctttctaacaagaagtgccttaaggggatatactttgagaccatgtaaatattattttattcctcaaactttgatccactatgttagaaccaattattactatgatggttagcaaatggtatttttctaattccatcattcattctatatttatctgttagtattctactaactataaggaaaagctttcccttcttctccattcattcattcatttattctttcttcattcatttatatcagtgtagactcatggactcccaccttattagataagttataaccttttattatacataatttacattaaacccaaatataaatctgaatagctttaagtcaaatagattcttttgacatttattgaccaagaaaagatatatttatgtctaaaagacacaggtatattttcttttattagagcagagattttgcttatgttaaaaactgttgtttgtttttgtccatgctctggtcaaggttagcaccgctgaagaccgagaaactgtgtttgtatcattattaatcatccctgcagaatctgacagtgagaaactccaagataaatagtgaattcctctcctatgaatttaagaaacctggttttatccccatattttgccagcagcttagcaaagaattcccacgtgactaacttttcatataggtttttttgtgcaagtgtaattgctatagcaagtggactgatttcacagggtggaatatgggaaaccaacttttttttgaaaaccactttctttatatgaattctatctaattctttatcactgtcctggacagatcgttatagctttagtaattctttctggtatcagaagaacttcattacaaagcacccaaaaatcctgcttaatagaaataaatgcttcaattgctcattcacttaaaactctccccttacccagctctggataaagattcttcactggagtgtggcagtgacaggcagagggaatagagaacatggtccatttgctcttccttcaccttgttcttcttttccttctccctcctcttattgttttgctcttggtttctctaggaccaaggacggggtgaagtgttgagtggggaagctcgctgagacagcaagaatcttgcttggcaggtaatgttgtaatttggtttatgaatcctctgtgggtcagttgtgcaaatgccagctttctctctctctcacaggtcccaggagagacctttcgacacctccagcttgcagttcccctctgcagacgatacactttctcactaacctctcatgactctccctacgctagtttcctctgttggcttctgtgatgctcactggctcaagggaaaatgctatgtctttgcccttaaactctggaggtacaggccacccctccccacctcagccctccattgaactccaatcagcatttcacccctagacattcttccaagtaaaaatccatggaacatgatggcaccttcctcctacttcaactccaggaaccaaggtcaatttcttccagaaactcatcactatacacccttaggtgggcctataggatttctccggttctgtatgcatctattgaggatgatatgtcaggttctctttctggaaagtaaccatactctctacgagtaattctttttaaatgtcgtttgctttgtctgaggtggaagaaggacatccttcagaagggagaacacaggacaccctgacaactctctccaaggaaatcttggctcttcctcaccagcacaatctctcctcttatgtattgggcttgaagtgggagccagctaatgctggaagatccagtttggatcacatgttttcctgtggatacgcctagcacctttctttacaatgtggggttcttgccaacttcttaacctcaaatatttttaaaagcctagtatttgcaaaagaaatgccttgcaagttgtattacttctcatctatcataaaaataacagatgagaagtaatacaattttcaaagcatttcttttgcaaatattaggcttttaatgtgcacatgtaccctaaaacttaaagtataataataataaaatcgaaaaaaaataatagcctaggttttaaggggaagagtagataaggtagtaatgcaggaagagcttgtacaaatgttcaagaaaaattcctctttccataaagtcttctgagacttgagggagaattccagtcaatcaatcccagtccctaaagtcttaacttaatttgcctccagactgctcaacttcctattaagaatggcatctggcttgtaacccatcaagcaaactctaccagctttccactgaaatgcctgtggagtaggagaaaaggttaagaatgtgcaaccgtctcaaaatcagcagtggctatctgttggttgctaaaatctggaagaatttccattacctgcaaaaatgatagaaaatgccagcaaatgaactaaaccatctgctaaaaggtgaaagaaaaatcattcctccctctcctattgtcttctttctctgcttataaatctggaccaagctgaaagccagacaacttcctctgttgcctcgttgctgccttctaacatagccacagtgctacccatatcagctgtcttccacatgtggacagagtaattctcaggaaaacatacgaggcatgaactaggatagaaactggtaacaggacattatattaaaatatggtatcaaaagggaagacctgtagatggggacacaagaagagccctggttgcaccgcatacttggaattgtacattttaatgcaccacgatgttcagagtttcagagaccaatgcagcaagggcaggagacaatcagatgagcacaattgcccttgccagatgctgagaattaagctatggcggaagacataaacctgccctcgaactgcagctgtgaaaaagagattagtccagccaccagaaaacaagtcattgaaaagactagaagaaaaaaattgagtttaaattttggttgccaggctgggcggtggctcatgtctgtaatcccagcacactgcgaggccgaggcaggtggatcacttgaggtcaagagttcaagaccagcctgaccaacatggtgaaatccagtctttgctaaaagtacaaaaattagccgggtgtggtggcctgcacctttaatctcagctactcaggaggctgaggcacaagaatcacttgaaccgagaatgcagaggttgcagtgaatcaaaatcacgccactgcactccaccctgggtgacaaagcaagcctccatctcaaaaaaaaaaaaaaaaaatttgttgccaaaaggaaataaaacaattttttaaactacagaattaataagcaattttagtaactgactagaaaaaggacaaatgtaccaaaaacatttatgttcctatctaccagcaaaaactgatttttaaaatataataggaaaatatttataatagacggcaataattgaaaaatatctaagaatgcattgctaagaagaaatatgtaatagaaacccagatgatgaaaactataaagctttaatgaaagatataaaagacttacaaaaaagaagttctatacaaatttctctatggcatgactgtaattcaaaaagtgacagttctcccccaaatcatgcattggtaaaatgctattccactagaaattacaatggactggactctaataatttcaaaataattattttaaaacccatcttgaagaataagcagagaaaaaatgaaaagtgatggaaaatttttctaaatttttcatggcaattataatgttataaagaatataagagtgtagtgttgctacaaatctcaaaagagtaatagaataaaatggtcattgaattggccctaacatacatgcttataaaaccttattatattgtaaaggaaataacacaaaaaagtgcatgagagaaattattccacaaacggaatttttgttaaagtatatgtgggctgggtgcagtggatcatgcctataatcccaacactttgtgtggccaaggtataaggattgcttgaggccagaagtttgagaccagcctgggccacacagcgagactctgtctcttcaaaaaattttttaaaataaaaataaaaaataaatgtatatgtaataacatatacatacttacatgaagtttaaacatgcatgcatgtatagagcaatttaagaaaataaaataaatactaggcagtaggagaagaaagggatattgtttatttggggaaaaaaatttatagtgtaaccagataccatactccaaaatttactctagatttttgaaagttaattaactggctgggtgtagtggctcacacctgtaatcccggcactttgggaggccaaggatgggatggatcacttgagataaggagttcgagaccagcctggccaacctggtgaaaccccacctctactaaaaatacaaaaattagctgggcgtggtggccagtgcccataatcccagctaaccaggaggctgaggcacaacaatcacttgaacccaagaggtggaggttgcagtgagccgagatcgtgccaccacactccagcctgggtgacagagcaagaccctgtctcaaataaaaagaaagttaacaaactggaacaaagcagaggttaatatataaactgatctcagtatgaacaaggaccttaaaaaaataaaagcaatgaaccaaatcacagagtataagctatgtatatggtcagtggatttttagcaaaggtgtgcaagtaatttttgtattgagttgaatggtatcccctcgaaaatgcatgtgtacctggtgccttacaatgtgatcttatttaaaaactggatatttgcaggtgtaattagttaagatgaggtcatattggatttagtgtgggccctaatccaatgactggtgtccttacaagaaaacagagacacggaaacatacacagaggaaaggctgtcatgtgaagatggaagcagaaattggagtgatgtgcctgcaagccaaagcactgcttaggagtgccacccgccaccagaagctagaagagaaaagaaagcatccaaacctagagtcttcagagagcttggccttgccaacttgatttcagacttccagcttccagaactgtaagaaaacaactgtctgctgtgtaaagccacccagtttgtggtcatctgctaaaacagcctttgaaaactaatacaaggtgcaatggagaaaggaaatcttttttatatatgctgctaatattggatagccagacacaaaggtaaaacttgactattatcttacactatatataaaaattaactcaaaacgtgtcatattctggaacacttttagaatacaatgaagataaaaatcttagtgaccttgggtttggaaaagatttctaaaataggacacaagagcacagacactaaaaaaagaaatacattttacttcaaaaaatatagaacttatactcttcaaaaaagaagagtattatattacataatattatttattatattacataataaaaggcaagtcacagactgggagaaaatatttataaaatgtatatttgataaaggggttttaactaaaaaaaaaaagaactctcaaaattatataataagacaaacaacccaaacaaaaaaatgaacagatgattttaacagacatttcatcaaagcagatacaaggatggcaaataagcacatgaaaaaatcctcagcaccacgcattattaggaaaaagcaaattaaattcacaatgaaatactaccacacatctatccgaattgttaaagttgaacaaactgatcatacctagcgttggtgattatgtggagaaactggaacgctcatgcaccacaggtgaaaatgtaaaatggtacagtaacattggaaaacagttgggtagatgacccaatcattttatacctaggtatttacttaaaaatgaaagctcatgttcacacaaagacttgagcagaaacgttcatagttgttttatttgtgatagccaaaaatcagaaaacaactcaaatttccaccaatggttgaacagataaacaaaaccatgcaaggaaatactacttagccataaaaataaatattgacacatgtgacaatatggatgaatttcaaaataattatgctgaatgaaagaagtcagcaaaaaagagtacatgttgcatgaatctattcataaaaatattaagtagtggaaactactgtataaaatcagaaatcagatcagcagttactggggatggtgaggggtgtgagggagggattacaaagggggcaaaaggaaatttcttggaacaagggatatgttcacttttattattatagtgatggtctaatacatatgccaaaactcttcaaaaactgtatactttaaaaatgttcagtttactatacattaattatgccttgacaaacctgtaaacagtaacagaatcataaaaaggtaaatggcaaacaataagaagtacttgtaataagaatgacatgtaaatggtaatttacctaatgtaaaaagtggcctcacaaattcataagaatacaaaaccatctcaaaaaagttaaaagtgtaaacacaccattcactattgaagaatatacaaatctttaataattatattactgaaataaatattatttaaaccaatgattttcctgtcagttctcatttataaaaatggcattttttcaattttaataataaatgctgatgatgcagtgagatcagtattcatactcctgcaaatgtaatatgattcaaaaagctactcagggaagccatctgccaatatcattaaaatcttcatacctctaggtattgaaatctggggctattttaacttttttctttataatttcttctatttactttttaaacatcaaccacaaattttttagtcagagaaaatattctttaaaaagaaaatgtttgacttcacttcattttgcaaatttacatgcacaaagagttggttgcaccttccaggtctccttctctattgactgctatttttccatgcagggtaagggacacggctcattgtcatcatggaatcctctttgccatggctgttaggatggacaccatgacaaccacattgcccacagctacatggctccagctgtttctctcacttatgcctctacctcttcctaacaccatggagactgttgtcagggatgttaagtctttgaggaatgcaatactcacgtcttcagaaaaaaagaatctctaaggatctctgtgtcatagatatagtctagaaatggcaaaaaaaaaaaaaaaaatcccatctccttttttattttttggcagctaacccagacttaaagggaaggctatcacttgacattgtgcaggagggagaacatcgtggaaagaagaagacatgatgtgtgccagagccctcggcaggtgcagtttggctccagaccccagcatgccatgatccagcttacaaccgctgcattctctcccttttgtactgcacggactctcatgtgctttaagaggaattggagtttggcatgaggatctatttatccttgagtaaactagcagagttttagttcccacaagcaaaactatccagcagagaaagactgtccagtctgcaaatattgacaccacatggtggctgtgtcaacaggtcaagccacagaacagctgcaatgatgcagagaaggcatgaaatgtcctctcgggctcagggttcacacacagacccaatcaaaggcatataagtcatcctacatgctcattaaatcacaagtaaagagtgtttcctttcatggcatggcacctcaaggacagggttgaataatttttaagattataactgaagcctgagcaatcacaattcaaagcacattctgatcttcaccacttcaaattgggccactcctggctatctcccatcagtagacgaaaatattcacaaccacacagccagaacctttgcctttgttcttaatagaaacacccagagatgatgaaacaggaattttgttaaggcaaactatttccttaactataaaagtgtattaaaaataaaacatgaatatgggtaaaaacctggatgcttccccaaggaccaaagcaaacagagtggcataaaattcagaatgttggattctgagtagacacctggggtcaggcttggccactaactccattgggcacattgtccacctccatgggtcttagttttttctctggtaaaatgagtgtgtggaggtgatctctaaaatctttgtacctaagcatctagggggaattcacatacaaaatgggatctggtcaataaacatatgggactgagaggagttagagtctggctttgagccataaagcagtctatggtgtctttgatccaggtagtacccaatccttccttccctggggcagttcgcctcatggttcagccttggagagagtggctgcgtggaaccatgatttaggaggatgtcaaaacatcatgattaaacatttgcaaatatgatcaccattatatttgcttatgtgcttgattataaatttcctatacatgatgggttaaatagctatttggagagtgaattaattaatgagtgaatgaatgaagtgtgcagaattccgtgggccatgttttaatgtaactaatctgactgctgttgtctacttgggtattcagttttcctgaactgaaaactgacctgctcaccaatggctctaacgcttcttcttctctgaggactcaaattaaagctgccacttctgtcatgaaacagctctcagagaagcaacttcccaacagctgctattctccaataaatggtcttccagggaatatgccattgcaatgccaacctatctgatttcaacctggtctctacaaccctgagggagggaggcagtgggcatcagcctagagaagacctgggctctcattccagctctgcctgtggttagttatgcagcttttggtccattgtttaatttctctggaccttagtgtctttgtctataacctgagagggagagacaggagggatcgttttttcctcctaacactaacgtagaaactgtaaaggtctcttaatacttactctaggttctttggtgccaatctgtgtctaaaacgtaataacttaggtgctccaacccagcctctgttatttcaatgtgactccatttctcaccacaccaaacacacacacacacacacacacacacacacacacacacacacacacctcattttccctagttcccctctctctgcttctctgtctccctctccacctctctttacctgtcttcagcatacttcctctccctctgtgcaattccaaaatttgaagagcaatctttgattgataaatgtaaagagttcggggaaaacccatcttcgagcggcaaaaccaccactgcagagagatttcacatttcagtccctgcctttctccaaatttctatatgaaaactgagctaagagatcactttccattacctacttagcccggttatctcttctcttggcccctgatgctaactaggtaaccctgggtgagttacccaccatctctgaatcctggttctgtaccatggggatggcgatgccaacttcatgaggttattgtgcatgttaaaattccagggcttggcaaagggtaaattcttgctaattattatatagaaatattagtaatgatattcatgacctctcttgtgtgtcgaggcttatctagaaggcactggaatgcaagtatatatggttctgtcagctcagtctggctggcataagtccagaactgggtcttctccttcctggggctaaactgcgctcacctcattctcctgactcagtcccttgccagagctcatgagttaaagacacacaaaaggctcctgggtggtgaggagcagaaagaatttgaaatgagcttcttttcttcttgcagagcttccgagacaaattataaagctccagtaatggggaaaaacacagaaagaactccttagacctgagagtggtcatcttgggggcctcagaccaccatgctggttcatgaggatgtaggtgcactcagcatcagcacaatgtaagtctatcttaaagcacattttcttttacaagtaaattaaacaagtcagcatactgaatagttctcctactcgccaggaaaaccagagggcaagccatgaaagaagcaaacaacaaatgcagcccgtgctgttctcattctgtctgtcagtgcaggcgagagggggaaatacaccaggtcagtgttcccctggccaggatcctttcccatccttgctcagaaattttctttcaggacaaatggcctacggagaggacccgtgtgcgatattccaatgacagttttaatggaaatacagccataaggtttggactgacttgattctagaaagcaggaaacaaatgcccacttttaggagctggcatgacagcccggtggcccagcttggttccctccccgccagccccgtctgggtgaagctcctgcttcgtagagctcaggcctctgcacagaaacagggcatatggctttgacttcagccagcgcaggagggggaaggggacgggccccataaatcacttgcaaggctgccggccagacatgctgctaagaatcaccccaaatttccgtcgtcttcctttgtttagggaactgtttttttaatttcaagaagtgcatccattccacgtgctctgagacctcaaaatatcaacattgctcattgtcaattgccttcacccctcactagaaagttacccttgcccacgatcagctctgagtctcctgaatctcttctcccatcacaaactgactgtcctgtgccccagaaagatgctgctgggactgtaatagaggtgaagccatcaaggatggaaactttggatcccagaggtgggccctctaagctccttcgtgttgcagggttagggcacaagcagggtactgacaatgttcaaggaggcccctggagtcgccagaagataactatcaggttctcggttttcactgcgactggcgcccacccttgataaaccaaaggcaaacccaattgaggcattccagcagccaggtcagttgtcagcaaaggcatcacagaggaaggcatttggggtagattggaactggggaataagcagtcaatgggaatcgaaaggaagtagccagtggaagcagccccaagctcttctccagtgagcgagcattgcaccaaccacaaagagctgctgcattaattacatgtctccttgctaagattcgctcccagagtgtctacgaaaactaatgactgcaatcacagcatctctcaagaacttttcacctgccaagcgctttacaagattacctcattaatccactctgccctcctatgaagctggtaattatcattatgcccagttcagagatggggcaactgggcagacatgaagcaaccgcctgaaatccctgggcacatcacagcccacaaagcagagcacaggtctttgagccgtcttatttctgttttatcttttatcccaggttccccattgatacaagcagcccagaagagggtagaaaatagatgaggtggatcttaattccatgcaaccgctgattaatttccttttaaagccatcattctaaaaacaacaacaacaacaaaagtgactgttttataaatgaggtattgctggactctagccaatgacccatttattgccaaaacaatgcattaattcaatcaacagatacttatcaaatacctcccatatttcaaacactataccatgtactgtatacagtgctaacttagtgtaaaaaataatatggatgcacgttcgattttgttgtaatattatttaacccaaatatagggaattcctacagactatttaattaaaatatctattgttttaaaattccctttgaccctaacttttgcttcctctagatttcattgatacaagaaagaactaattttttaacactgtaatccattaacattatcccaagtcttggaaaagaaacacttttttttttttagacgaagtcttgctctgttgcccaggctggagtgcagtggcaagatcgcggctcactgcaatctccgcctcctgggttccagcgactctcctgcttcagcctcctgagtagctgggactacaggtgctcaccaccatgcctggctaatttttgtattttttagtagagacgggggtttcaccatattggccaggctggtctcgaactcctgacctcgtgatccgcaagcctcggcctcccaaagtgctgggattacaggcgtgagccactgagcctggcctaagaaacattacttttgcccattaatggctctgaactttttctgcagtgacttccattaactgatagaataagtaggtgtttctcctcttagtacccaacgtagagcaggcagccttcctcgtgccaaggtgataggacaacctagagtgtcaaagatttaggatgttaattttcattattatcatggtcctttttttaaaacctttccttcaatgccctcagtttaaggttctgtgagatgaaaatgagttgatgtttcatccttggctatgtctctaggatcatagtaacaagatttttgttttggtttgttttgtaacctgaaagtttccataaagatccaaggctgacacctttgtatttatgtgatattaaatatatgctattacttcttggcttaaaattttaaaaagtaaatcatatgaattttgaaacaaggacccatgtacacaatttgtagaggttagaaactataagaatatagctttcaaaaactcagtgcattctgagggtagaaaagcaaaactgacgatttctctagtgatttctgattatcccaactgggattaaaaccaagtggcccatgtatcaacatgagaaggatagaggaatggttctaggtcataggatgcagctatggaattctaggaaatagagatagttcagatctgcatattaaaatcccaaatcagttccttccagaagggtcgggaatgtgactgcccctgtatgtactgttggttgccagagcagctgggaagggagagggaaccatttatcataaatccctcctggggtgcctcatcacaccctctttgtgttgggcaaatgcttcacctctataagcgcaaaggcatggtaaagaccttatcacatagagtcatgaagaatgaatgatcaaggtgtcaattgggccaaaatctgcagtttaaaggaggaagactcaagacttggaagcaacaaacataaatactgctgggccactggaaccagtgaactgaacgggtgtgggtttcgagcagctttcccaacctcggcactgctgactttctggactggtgaattctttgtcctgggggtgggagggggtggggctttcccgtgcattgtaggatgttaagcagcatacctcatctctaccgactaaaagccaatagtgcccccgaattgtgacaaccaaaaatctctccagtcaatgacaaatgtcctggggctgggaagagggaacaaaatagcccccaattaagaaccactgtttatcccccaagtactttttcccaaagttagataaagtttggggagatgctttaagattataaataatattttctgttacagtgccattgaactactagatgaagtaaatctcatttctgcttcatttgatgcttaggatccctagtagatgttgtgctctgtgtgtgtgtgtgtgtgtgtgtgtatgtgtgtggctatgtagggttgtttcacacaaacactcagaaaaacataaagcagaaaaatctgtttgaaaaatgtttccccaaaagattcatgatataaagagaacacattcataaaataaagttttaaaaatgggaggagaaaaaatcatgtttttatactgcagagtatgcactaattgaactgcctttattttctttcttatcataaagagactccaagaaatgtaattgcaaatgtagtttaaagttaattatactattataaattatatccttttactactttctggggaacactaggaattttagggtgactagatgtatataaaaatacatagagtagtcaatatatgacttataacattgagctagcatacatacaatgggttcccacaatgtttcatggaaataaacaagaacaagactctttcttctttggaatttctaagaagcatttaagttttagtgtcactagtgctgtgtaatgacaaaacacattttattcgagagactccgcctggggcaggcagataggtgtgattaacagagttagaacaaatgtacacaaagaagatataatgggcctgaattctacaaatagagtctatggctgaagagaaaaagtgaggttaagaaaggtatgaggtcaagctcttgggatttttaaagctatttttataaatttcatgtctctttcagacacatgacgctctgtgtgtggctgagttcttgggaacacacatctgtctagaggtttacaataaggaagagaagaaataaggaaaaaatagaagcagctcaaagggatgtcttcatatatcttctcatttaattcttataatatccctggtaagtaggtattgctccattttaaagatcaggaaattagaggcctggaagtaacctgtcatgtcaaggagaaagcaaagatgccagatgccacagcctaagctcaggtctgtccaatttcaaggcccttattttactcatacaccatttggcagtagcctttctggttggaatatctatttttatatatagaatggactatactcttcattttctttcaacgtctacaattcaagcaattaggaattcatttagaatacatgaatttaaaactacaaataagtcttggttcaaaatgtacaagtcaggtttgcgttgggataaataaatataaagagatgagcacatttctctgaattttaaatttgggtcctttatttactaactaggtgtcctggagaatatcacttagctttgggaaaactcgattgccatattatgacacaagacctaatctagatacctaatcactctgtaggattgttttataggaaataatgcattctagaatctaaatcactgaactacaaatgttagaatacagcctaacattaaaacatcagtatcttaaatctagctttggtgtagtcattcattagtgggtaactaatctgggttttaaaatttataaaataatacgccacctatttcatgattgtgttgcaggcatcaaatgggatagtatatgccagagtgctctggaacatgatcaaaagagtgtcattattgccattattattacttaaataatgagaactaaaaaaatgagaaataattactgtgttctttatctatcatctgtctatatatttgttttgttttgttttgcttcaaatctaaaatataatggtcaacttatggcacagctgtgaactacaaaacaaataaaacctttcaatataaatgttacgtagcaaaaggcagtctctctcaacatgataggccacttgtgccatccacaacaatgcccacgacagatcattgaacatgatttctttttataaatgtcattagtctgatcaatgcacaccttagacgctctttatccatattgcttcagcctgagatctacttatttctgcaaatagtcctaaacagtgcaaatgtaatatattgtaagactccctcgatttatttattttttcattcatcttcataagaaaactacagcagtgaaatagctgcagttcttcacatgctacctacctgccaaggactccaacaaactagtgaagattaactaatattttgagaaagccattttaagcctgaaatatttgatgcgtgatgaaatctacaacatgtccctatggaaacacgaagcttggggactctttatctgcaattcatgtgtatgcatgagacaatcagaagcaatgttcttcctgggctaagccaatagccaatagagataagtcagcatttctgctatgtgaaaactcccagggagctaggctaatttttccagagtttctacgtattttgtgcttctaaacactccaaatcaaatggaagttgggttaggaaaatctccccatatttaaagcaacaattgggtaatgattacccactaagcgtatgccgttaggatgaaagccagtgacaaaactttctgaggtttggggaaaataattaggggcagaaatgggaaacctcagatatatttctacttctagttgattacaaacagagccatgaagtcccatgataatagctctgggatgccactggattggcaaggctgtgggatggggtggtggctattcctggagtagtaaaggcaactatgtaggcagcatcagtaatgcatctattcacaggatcagcacaaaatatgctcaaaacagcaactgtagcataggttagttgtatttgaaactggctgctttatgagtagcctgaaaatcatccatggttgtattcattgtctactgctgctgtaaaaaattcgtacgagtttagcagcttaaacaacccgaccgtattatgttatggttctgcagttcagggtctcaaggggctaaaatcagggtgtccactgggctgtgttccttctggaggccctaaaaagaacccatttccttgcctttcccagcttctagaggcccctgcattccttggctcgtggccccttcctctgccttcagagccagtggcgttaacatctctctgaccctactccattatcgcatctctttctctgaccccaacagagaaaagttatctgcgtctaagggatgccatgcaattaagggatgcattgccatgattagaccgggtccacctgcataattaggatactctccacatctcaaagcccttaagcttaatcccttttgtgaggtccctatgatggctgattttgggtgtcaatgtgactgaattaagtgataataattaacggatggtaattaagggaattaattatttattttgaatcactgcattaattattctcaatgcttcagcaggaccgaaccagcccctctcctgcagaaagagaaacccaggtgatttggcatttgattagaatgtttgagctgccccaggggtggggaagatctgtcctcagtggggcccagatgggacgaaaaggctgaagaaggatggattcttgctctctctcctggagctgcggcacccatcttctcctgtccttggatgtcaggactccaggtttcctggctttgggacttcaggaagaaaaccagtggccccccaggcttttgggcctttggcctcagactgactgagagagataccatcatcttctctggttctgaagcctctggacttagactgagttatgttatgggtttttgctgattctccagcctgcagacagcccatcatgggacttctcactgcacagttgaatgagccaattcccctgataaattccttctcgtctctctccctaaatagttatcatgtcagttctgtctctctggaaaaccctgactcaacagtctcttttgcaatataaggtaacatcttcacaggttctggggattaggacaagggcatctttgggaggctattatcctatctaccaccatggtctatgatctggagatttccaaattcctcacctatccatcttcttagtgggaaattcctcccaccctctgcagagagccatctggagttaggctgaccatagctgcagaagtcagtcggcctgctgcatattaaccctaagaatccattattgctattaatcatttatacagccaactctcaaagctgctcatgataggtgccattatgacaactgttagagcacaggaaattctcacttaaccctgtgaataggctcttggaaactgcgactttaagtgaaacaacataaaacagaacgattttcctgtgggctaattgatatacataagagtgacgttcccacggtacgtttcgggtcacaaaaacatcaccaaacttctaagtaaagaccaaatcactcctaatactaaacacttagatagatgtgaactatatgtattatgccattcttaaattgctgcaaagatacacttgagactgggtaatttataaaaaaagagatttaattggctcatggttctgcaggctgtacaggaagtgtaacagcggcatctgcttctggggaggcctcaggaagctaccaatcatggtagaaggcaaaggagagcaagtgtaacacatggcgggcacagggacaagattggtgggtgccacacacttttaaatgaccaggtctcagatgaactcagagtgatggctcacttatcaccaaggagatggcccccatgatccaaacacctcccaccagtctccacctccaacactggggatcacatttcaacgtgagattcaggcagggacaaatatccacagtacatcactatacatacatttttttaaaagttagtaaaaataaaattatttaccccattattccaggtccgggttgcaggtggctggagcccatcccagcagctcagggtgcaaggcagggcccagccctagataggatgctatccctttatagggcactcacatacaaacccacattcacactgggacatgaacctcacatgcatatctttgggatgtgtgggaaaacaggaggacctgaagaaaccccttgcagacgggtgggagagtaggctcactccacacagagagtggcctccaccaggaagtgatttttctttttctcatcaatgttacaaagaaatgctgttgagtggaaagtcattcaaggacccactgtctagctgtgttctattattgccttcttctttgttcatcttcttacaatgctggatctgggataactttgcattaaatatctttcttatttaatgactggcatctataaaaatgtaaagctcactgggaagtcagggaagcatttttctgctgacctgaagcatgatttgcatttttaaaaatgcacgtcataagcacttagctggagtgaaataaacttgcagtgctctcagaaactgaagcgtggccaatgtcacggcatttatgaagtcttatcagtggaactcttgtggctgttacctcataattagcttactcagtacattataattaatttttataataatttaatttagttaataattaattttttggttcttttgcccaaccacactggcaaagaaaatcagaaaaaaaacctatattgatcaggttaggataggccatacagcagcatgaacaaatcctgatatcccaaaacaatctaataaaataaaggtttgttttttttctcatgtaaaggtcaatgcagctcaggtaaacttaccccagcttgcagttatgccattaggaaagcatagttgccaagctggatggaaagacatggaatggccatgctggctctgaacccctcagctagaaagggacacatgtcactttcccccacaaccattggccagaaggaatcacatgaccctaacctgcatccagaggagaccaggtagtccaggggtgcacacggtcatggggtgagggctatatgtctctgccaatctatgaccgtcatccctttcactgacttcattgaccttattgtgaaagatgacgaaatggaggtcaaagtcatctgtagccaaaccgaccaagacactctccatcctaacacgtctattaccaacctgacattttgcttctctagaatttcctaaaggtaggatcactttctctctctaagaccaattctctcaagaatttataagaaaagaggtttaactggctcatggttctgcaggctgtacaggaagcataacaacctagtgcagctacattccattaaagtcatggcaatttcagtgagtgacactttgaagccacatcatttgtctttctctggctgactttccttgaaggtggtcaggaatattgacttgccttaatctcttacttcacaatggggcttgaatttcactttctcagatgtgtttgaggttagtatttgaaccaatttgatttatgaatattttactcaaatagacgtcttggtctttgaaatatcttcctattgccttttaaaagcatcttggctggacacagtggcctgcacctgtagtcccagcactttggtaacctgaggcagacggattgcctgagctcaggagttcaagaccagcctgagcaacatggccaaaccctgtctttaccagaaatacacacacacacacacacacacacacacacatgcacacacacacacatacaaataggcatggtggtgcatacctgtggtcccagctactcaggaagctaaggtgggaggattgcttgagcttgggaggtggaggttgcagtgagccaagattgcaccactgcactccagcctgggtgacaaagtgagaacccgcctcagaaaaaaaatatatatatctttttagggggcaatgaaataaccaattctgccatcttagagagcttgggtgatttgaagttacatggccagatttagaaaagtagggacgcccctttattccgttgatctatgttcaaacattcaactttcatctcctactcataacacttacttcttacaacattgcaaaaattatttttccaaatgaaatattaaaattagtaatattaatgggtcagctcatgtaagctgatgatttttttttaagtgaatgaaattagcagtctactctgctcatcttttcagattggaacagagcctggattaagatagaaatgaattctaacctcttcataaactcttccagattcaaacactagacacagacatggccagagatatgatgagctctaatctccacacacctatggctcgaggttctaggtggtcaatggagtctccagggttcttgtttgcaatggggctccaggtcctccaggaagagtggagaggaggactttgggtcctttgataaaaattgatggatattgagagccaggctgtctcatagaaaagttgagatttatttagtcaatcaacaaacacttttgagcacttactagtgcagggcactgtgctggaatctcttatagaacaatcagttacatgaagaataaaacatcaaccctgacctgtgaagggtggagactggtgagaaagaggatgctgagggagatggtggggggagaaatgaactccaaaaaataattatgacgaatgctcaattccatggagaaaataaaaagcgtgttcgtgcagagaatcccaaagggaggtgctgtgtacagacaaggaatgtgccttgaagcaaggcctggaggaagggctgggtcctgccctgaacgcagtcagagaggtgccaggcaggccgccactggccatcatctcaggcctggggcagccacccatgtaagtcgatccctagagggatggcagaacttgacgacaactctctgccctatctcttagcagattacgatcaccatgaacattcttgaggacaaccccagttctaagctcttcctatgcatgatacagttaaggaaacggagaggtgaggtaacccacctcaggtcacatagtggtggatccagagcccacactcttatccactctgccacttcactagtagagaggtgtggttcgctctgaggaaaggaaaagctcataggagatctcgaaacttggggacaggaggaaggagttccagccagttcctggaaagctgttagagctgccgccccagtgtggctgcagacaaagattctcactgaaccagggctcttgatatttctccaaggctggaaacacaaaggctgaacctccgccagggacgctgaagggagaattggaaaaatgaagggacaaaagaggaggatcctctcccacctcttagaaacatgatcattaatgtattgctcagccaggtgtatttttcaaatgcctcctgtccagcccaattccacgtcttggtagcacccggcaagtccctgacttagccagtcagacagggctgcaccagggatgctcccaggagtcacctgacccttccttttccaggtcctcacccttctgctatttcggtttggcatctgaattctgaataagttcttactcctgtccttgagtcttcacacggaaatttcagttttcaggttgacttctgtctctcccacaaggtgtgatcttagactgttctagcaggtctgccctgtttgcaacagtctctggtgtacacttcctgccctggtcaatccttcaaaacccaaactgtgactctagctgctggtcagcaccagtctattccccctgaattctcctgggtgtcaggctctctgtcccactccagattcatggagaccatacaggaagcctctcttgactctgacctcccaggacttatagtcaagtcatagcaactagaccgactcaaggacagtaacagcgattgccagaatcccagctgctcccaaacagaattagacacttaaaaatccacttaaactttataagaagagtctaaacactggacaatgttacatggtggagatgggcaaaacacatcggggtgagtgtatcgcaaccttatctttccttttaaccaaaatgtccagacacaacttgtgtttccataagcacccacatggttggtggctatctgaatattttaaggctaggcacaaatgttaggcagtgcaaagaaagggagaaaggatgaagaaaaacatccaagggcagataataaagccagtttacactttcagatggcatttcttaagttcagttcgttttaaagtttttttccttttcttatgtataactagacttccatgagatggtcaaggtggttaactgcaagcatctctgaatttaggtaaagcgttaagccttttttctcaagagtccacccctgtcttcaaaaatacaaaatggtgagtggccgggagtggcagctcacatctgtaatcccagaactttgggacgctaaggaaggaggatcgcttgagtccaggagttcaagactaacctgggcaatacagcaagaccccatctctacaaaaaacacaaaaattagcgaggagtagtgatgcatgcctgcagtctcagctactcaggaggctgaggtgggaggatcacttgagtctggaggtggaggcttcagtgagctatgaatgtgccactgctctccagtctggacaacaaggaaagaccttgtctcaaaaaacaaaaacaaacaaaatgacagaatgaatcaggagacctgtctctggtcctggccctgttgatgcttggcattcgtcaaatcacatgacctctgggggatagttttttcccaccggaagacagtattttatattagtcaacttgcaaggtcccttttcgttctaaaattcctgcctcactgtcatgcctgccagatgctgcctgtgacactggccatgaaagggcactgggttgctcatgagagctgtggaggaagagttggaaagaagctacgtgtgaccagcttcatgaactggtacagctttgactcaacttggcaacttcctctgtgtggcctcccaagaagggccacaagagccacttggcacaaacctcaccacacgtcttttgctttactcctgcctctcagggaacctattcagtgggaaatctcccttgagaatctcttaatgaaaaggccccagtcatgtggccttttggctcaggaactccgtgtccccattttaaggtacaatttgccactttggccctctgcctctggcttccgttcctgcccagggaagcccaaagttgggtaaaattgtgtgagaagagatagcccctacatggggccccacagccagaaggaaacagatgagaggatcctcgcatctccagagccagccagggcctcactgtcctgttggtttgtttgcttctctatggtgtgaagcctgaccttcccatcttcctgctctgttctttatgccccacactactcacatttgtggcaatgttgcaggcatggtctaaacttcgggctgggattttattattattgttatttaagtatttatttatttgagtcagggtctcattctctgccaggctggagtgcagtggcacagtcttggctcactgcaacctctgcctcccgggttcaagcaattctcccacctcagcctcccaagtagctgagattacaggtactcacaaccatacctagctaatttttgtatattttgtagagacggggttttgccaacttgcccaggctggtcttgaactcctggatttgagcaatcctcctccatcctcccaaactgctgggattataggcgtgagccacggtgcctggccccaggctgggatctgaatgttgaccacatgagattctcagaagaagccctcacagtaacaggaacaaaggttcaaatctgaatctgagccccagaaaggatgaaagaggctctggtctgagtaattatgtcccctcaaatttacatgtggaaatcctcacctgcaaggtgatggtattaggaaggggggcggttaggaggtgattaggttatgagggtagaactattatgaatgggattagtgtgcttgtaaaggggaccccagagagctgcctcaccccttccatcctgtaagaatgaggagagaaggtgccacctatgagccaaaaaggagattccaaatctgccagtaccttgatcttggacttcccagcctcgagaactgtgagccatagttgcttgttgttaaaccacccagtttatggtattagcacttactttgttatagcagcccgaacaaaccaagacagagaagtgagggttcgagactgaacataagcacctcagtgaaccttgaggcaacgcctccccacagttactttcccctccctcatcttccttacagcctctccactcctcacaccgagttgcctactgaagacactctgctgattcttaagttctttgcctactggggaagggaggcccactcagcagggcccagagagaggggagctccggcattctctgacttctcaaggtcatgtcctcccaatggcctgagctccctttaatgcacactacagttggttgtaaatatgcctgttgaaattcagcatgagggagtgggccatgccttgccatgttttgaatggttgaatggtgctcagttcccccagtgccttcttcccaactgacatctggcctgagctgcccaccaagctcgcaacacaagctctatcacttttcccgacattctggaccgctttggcaggttggggctctacatttctaatctgttgggaggctttctgggtttgaaaccgggggcttccctggagagagctctaccgtgttggttctcaggtcactcagtaactgagtccaaggaacagcctgtccttgaaactgcatttgcaaagatataacagctgagggcataactgatttctaaatttcctttttccaccctacccttgttctcctaacttacaaatagtttccaaaatcaagattatacttcttcaccacactactgtctccaagttcccagaggctcaggctccggctgtggcttgaaatgccatcagtgatttatttcttgttagtattttgaaaacacttatcaaaggtcaccataatttagcatgaaaattcaacaattctcccacatccccagaagtcttcctttcagcgactcctccaagcagctttgaaacatttgttcttacaaccctttgttgaaataaataaatagggccagactgcactttcttaacagcaacaaaagcccaaagaagcggcacgtgttaggtggttctacgggtaagatggggaaaagaatctcgcttgcctgagcccagaatttgaatggggatcatgcgttttccagctgaccacgagaaagaggctgtgcacactttacatctcccaagctctgtgtctggcctaatgaagccatcgatttcttcctgtctgacaaatgttacaaggagaccagcagctaggagaatgagagagcaatctttttattttctgcttttttgcttttaattttgtgtactcaggaagaaatgtatggatttctttcttctagctaatcacagcggcacggttgtaactgcctccctttccctttagtgctttgttttccttggttcatcacctgggtaaggtatggacactgcttttctctaatgcatctaacagtgttggggccgtttcagggaatgttgagcacctgtgttggagtccattgcagtgaacctgatggccttgattcatgggtatttagaaagtgagaggtggattcacctgaaacttattatcaaagtaaactatgcccctgaggaggaagcgggattttttttttttttttttttttttgagacagagtcttgctctgtcacccaggctggagtagagtggcgccatcctggctcactgcaacctccgcctcccaggttcatgcagttcttgtgcctgcctccccagtagctgggattacaggtgcccaccaccatatttggcaaatttattttttattttttgtatttttagtagagatggggtttcaccaggttggccaggctggtctcaaacttctgaccgcaagtgatccacccacctcgacctcccaaagtgctacaattacaggcataagccaccgtgcccagctggaagtaagacttttttcaactttcataaaacttaggcagagtctatatttactactacaattttctctctttatacttcttccaagaaagacagttactcctttaatcagatcaaattaccttaattgtgatttggaatcacagaaccaggagtttgaagtgttctgaacattaagggaaagttggaacctggagagatgttgacaataacaacgtgtcctaactctatgtggagtcaatgtgcatgatctcatttaagtcttaccactctatgagaaagggcccatcattcactgcatctcaaagagacggaagtccaaagcaagttacttattcaaaatgacaagtcttctgggtctctctaactcaagcctatggtcataaccactccacattattgctgtcttcgcaggtcccacgttttacaaatgagtaaactgaggtcagaaaggtgggattgttcaacagttagaatgagcagactcacccaggactcctgacttcaatttcttatccttccactttgccatgttacaggacgtgatgactgatgaagacttggggtaaggagcaactctttacctaccttgagtggaatgtgactcacccaggacagaactgaccatttattttttagggacgatgctggccaaggcaggacagtgcgatgtggtggtggagcaaagcggatgggggcagagtgggagcagcccctcgccctggaacctttgcttggtggaaaagcatcttggtgatccccttcctgcatgttggtcttattccactctgaccctggccatcaacatcagaaaatactttttttttttttaaatttagggtctcactatgttacccagactggcctaaaactcttgagctcaagagatcctcctgcttcagccccctgattagctgggactataggtgcctctggctcacactgtaaaattctttatctcttagacctaccaggggcaaatcaccatgtaagtgattcatgtgtagaaacaacataatttacctccatacaagtcaatttttaaaaattaaatacaatcatcattctcaaacagattccaatgacaaatagctctagttttagctataaaagggactggattttgtccttctgtcttgccagacttggctctcagagaggtatttgaaaacaccttggtctttgtatggagattctaaaagtccctaggtatgtggatttctaaaaagcttgcaggaaactcttgtgcttcctttaagaacctgagtgaaaagtgtgaagttttgggctccctctgataaccaagtccaatcttctctattgatattgttgttgttataggctcaatggtgttctctcaatatctatacattgaagccccagcccctgtactcacaatgtggctgtatttaaaatagggcctttaaaagatgaaattaaaatgggtcatatagatgagccctgatccaatctgactggtttcaatttttttttttttttttttttttttttgcaacggagtttcgatcttgttgcccaggctggagtgcaatggcgtgatcttggctcaccacaacctccacctcctgggttcaagtgattctcctgcctcagccccccaagtagctgagattacaggagcacaccaccacacccagctaattttgtatttttagtagaagcagggtttctccgtgttggtcagcctggtctcgagctcctgaactcaagtgatctgccagccttggcctcccaaagtgctgggattacagacgtgagccaccacacccagcctggttttgctttaagaagaagaaattagggcacagactggtacagcaggaagactacataaagacacagggaagacagccatcaattgggttggtgcaaaagtaattgctgtttatgccgcaaggcaaggatcaaggccttggaagaaaccaaccctgctgataacattgatctcagacttgcagccaccaggactgtgagaacatgaattcctattgtttaagcctgccagtctgtggtactttattatggcagccctagcaaactaacacaactgtggtaaaagatacacatcataaaattgaccattgtaaccatttttaagtgtacagttcagtggcattaagtacctccacactgttgtacaaccattgccaccatccaactccagaaccttttactctctcccagctgaaactccatacccattaaacattacctccccattttaacttagtcataaaccatatgcagtgcaactgtctgccttctgagccaaaaccaccttttcccacttgcttccaatgtaggtggggtaaactcaaacagggatgtgtagtaacaagttggtctatacattagagggaccatgtgtgaaaaatatctgaatttctccatttttacattgctgataaagacatacccagagattgggtgatttataaagaaaaagagatttaatggactcacagttacacgtggcgggggaggcctcacaatcatggtggaaggtaaaaagcacgtcttacatggcagcaggcaagagaaagaatgagaaccaagcaaaaggggtttttcgttataaaaccatcagatctaatgagacttattcactaccatgagaacagtatgggggaaactgcagccataattcaattatctcccactgggtccctcccacaatgtgtgggaattaggggagctaaaattcaagatgaaatttgggtggagacacagccaaagcatatcaatatccattagggaccagcaagtgaccctcctaaaggtactggggcttgatttaggctctgatctagaccaagaagtttcacagtttactaagtcaactctcctgcttgcagacaagataaactagcaattgtgattcatctatccttccagaaggcttaatagtctccaggcaagtgctctaataaaatgagtaatcgccttgcgttagccgtgaggaagcaacaacagctcagcagcttaaataaaggtaggagggatggggaaactaataaattctaatacagccctgtcacaagctcccaaggagattcttttcagttaccctcactgctaacgggagccaaccacactctgaaaaagtgtgggggacccttccaggatttaaagcaaaataaactatgtaaggaaactgagaaatcaatggagcttagactccaggtcatagcagacacaggtttaatgagaacacatctacaaagggacctgcacaagtttgttcaccatttgattgatcatttagctgtggtgaaaatttaaaattagggttcttcaagcaaaaatttatgtaaacaaccttcttccttctgcctactgctctgagggacaccttattacatagactgatatgttctccatagattgttgagtcaggagacaccacttaagccttagctacaaccagaaaaagtggtttcctaggatttgccatattattaaagtgcatcgctccagaaagcattgtgaaagctaaagtccaaataacattgccactggacatttaagagctatgtcttcaagggaggtcagtgtctcttatgagttccaggcatcagcctgaagcttaaactcacaaatttgaagggattatcaaacaacagtgtcaacagaaaacagcacttgctaaatgtcattcacaagcttctccttcaaccgtaattctcagctaaatcgcccaacctcagatttggattccttgtagaagctaactttagtaagatttccagggttaaaatggttttgaattggaatgacttctgccagttttgtggttgttaagtagcagcgttcaacttggcaatagttgaaaagctgatcactgaaaagacagcaaaatgtaaaagaaactacataacagacctaattataagcttattttattattttaccctctatatccctatattcatggtaaagatgaaaaagaccaaggaaaacaatccagacaaaacagactatgaaaaagataaaacccagataaaagagactatgaaaaataaatccaagaaggggaaatctgtggattggctctgtttattggtattcacaattctggagtatttattttctcctgtgttcagacccatttactcatcacctcataattacaaggattcctttgataatgtgtaatgttggccttcacttgtttgtttataatatgtgtcatttcaacaactttgttattttgcaagtttgcctgtaggtcattgaatctgagctctggttttaaaatacccaatcgtgggcaagtttctccacctctctgagaataataataattaaaaatatctatccttcattcagatttataacggagccaggcctgggccaagggtcaaacatagatcatctcaattgatcatttgacaagcctttgaggagtgtgccaatattactgtcaatttgctaatgaggaaatcgatacttgaagaggtaagtaacttgctcacggtcaaacaaatagttggtaagtaaagagttggtgtctccacccaagcagtccaactatcctattttacttctcagttatctcaactatgaaatatgggtaaaaatacttaatgtattgggctgtaaaatttaaatgattacttatgtaatcagttccgcagaggctggtaaatagcaggaactcaagaaatattagattgctaatactgttcaccctcctacagtggccaaaattgtcacaatacccataatcatcaaataaactctaccaacatgtacttaatggaagtatgccaaatcacacttctagatagtgatggtggtaactgaaatttataccaacaaaacccaatttaaactattgttgcaggaggctgggcgcagtggttcatgcctataatgccagcactttgggaggccgaggcggatggatcacgagatcaggacatcaagaccgtcctggctaacacggtgaaaccccgtatctactaaaaatacattttaaaaaattagctgggcgtggtggcacacacctgtagtctcagctactcgggaggctgaggcaggagaatcatctgaacccaggaagcagaggttgcagtgagtcgagatcgcgccactgcattccagcctgggcgacagagggaaactccgtctcaaacaaacaaacaaaaaattgttgcagtctaaaaacattaataaggatctctcagcaataaaatataagtgtagtgactgtaaaacttgtgtggtactatatgcattggtatactacttatgctatatgcttctatggttgtaatatagctccagtcctcattcgtgtcttcccttcctggaaaactcctattcatccttcaaggtcccactcaaatgcttcttcctctgggaagtcttctcttatacccgcaggaggaggaagctgccctttcctctgtcctactacaaaattgcagggaaccacatcctaggatatatttgatacccaggtccaacacagagcctgatacgaagaaagtatacagcctttgcttatttaatgaaggaacactttcaacgtgctgattttgaatttgcaataatctaaatatctaagattgtatggagtagggtttaatgtgtaagtattgcaaagtccttcaacactcattagacttttcatattagagtaagtgacaccgcttcccagcgtgataagagtgagggtcagacaagcaaagcagggctgctccaacccacctttcctagtttctatattcacattcttgggtctgagcccaattattgttttcacaaagccctgtctaggattcctagttgagctggggctacaggtatcagcttgtatttcataggcaagagaaaagatgcaggtgaaaaacacgagcttgaaaagcaaagttcaactggggcaccactggaggcattggggtaggctctctcttcaacctaaatggagttttacaagatttcactagcaaaacagctcctgcccatggaggcatgtggaaagcaaaatcctaatatcccttgttgctcccaacactgcagcttcagagtgacactggtctgttccctggttctaccacatgctgtgagactataagtgattgagtcaactcatctgaccatctgtaaaatgggtataataatacctctcaaagttatgaggtttatatgaaataccaggtgttaagtacttattgtagggctgaagactgaatatggtcaataaatattaactcccttgttgacttccttcccctttcactttttccactgaagtaatttaactcatgatccgacgtcagggatcactgccagctgactggcaatcaatatatcacgttctcaatttgtctcaacgtccagtaaactaatcaaatggtaatgatgatgttttgggctgaacaggtagagttgggaaacactcttctgctacccatttagtcaaaaacgcaagatggcggatccaaaaaaatgcaaaatggtggatccatgaaagaacttctgagttcccaagatatcacagcagtgcaacatgtggatcattagaattcttctcatgtatcatggtgctaatttaagatcagaaattgcccttacttattctgatttccaaagtgttgacattctctcatctaagctcctgttcttcttggactccgtaaatggatttgtgtttggctggctgagaaaaggaattgcaaatgcttggtagaactttcttctctcatcctctcaacactgagaaactcaaaagagaaagaaaggatatggtagcttttgattctattcttgctcaactatttcttagactgtctcttgaatggaagcatgggaaggacgagacgctcccgtgtccctcagcaatattgccaaacctcctggctgagtgaacttctgcaacttgacctcttgcctttccaagtttttgctcaaattgcattttttatattcatgctgctctttcttaagtagtggcttgagaaacaatgtgccaggaaaatcaaaatttttatgatagaaaaagagctacaagaagagaaacaaaaccatctcccacttctcagttaatctcagtatctaataacaccctggaagtcaaacagctgttttttccagcaagatgcaagagtcctggtgtacacctgtctccaatgccagaagtcactttcactattgcagacatgccctttggaggccgtaatctttccccagcatgaggagtatgaaaaccctgcatgtgctctgtgtaaagcaagcctaaacaaatccacccttcaaaaaatccatttggtttgaaggcagggatgacaccaagggaggggatggagggagacagagtccatactgggaagcttcctggatgggacaaacttatcaaacattaggaatctcgttgcccctgctgctgaggccaccaaaagaagtgaaatggcaatggtcacatggcctcctgttaaatgattggaacaacacatttgcattctcacatagactatatttcgcatcactcttggcgttctgcactgttaaggtcaatctctaataaaattgcaaagcaggcaaagtctatcttctgacttcacccaccagtgtcccaatatttcttcttgctgccatcttgctctttgacaggccccccgctccgtgatgcattcatgctctcaggtggtcatcaggcatggacctgctgaggtgtagactggccgttgtgctcttcctcttccgtgtttctatagaaattctatgtgtgtacaattgcataaagaaactgatcccattgctgagattacagctttcttacatgttctgcactagcctgcaagttccctaagggaagaggctctgtttccttcctttttgtatcctctcatgttagcattgagttttacagttagtagttacagaatgcattttttaaaaaatgaattgaatgaagtgattaggatactagttaataacaccttaagtgtattttctctgagccacataaatatttcaaaagataacaaaggaccacaaaatctttaggatccaaagagtaagatgtcaatcagtgggaaaaggagactgcacccaacgacttctcagacccaattgtactgatagtcaccagcaacgcttataaatgagacagtttctattgtaaaaatatttctcttttcactagttaggaaataaggcgcctctccactgccacatcaaaaagaatacttagaaataaacctaacttgctactcaccactcaccctactgaaacagttcactctaccttcttaagactgctctctctgccagttcttgaggccttttttgcaaagacctggcagataaaatgaatgacaagtgccagttttgagataaataggatgttaaaaccataattctttaacttcagaattgacaaaacagctcttatccaaaaatctcaaagtggcttacacgctaaccatatgaattcttcctagactcccaccaagaaacaagatgtttatccttcatttacagaggaaattgaaactctagaataaatgactttctacggtgaagagatggtgatgaaaagacactggccctgagaagaaagacttatgccaacccatcccctctcatcacccttttcatcttttccattcctttcttcaagaaatacaagtatgacttgcagagtttaatcaggttagttaggaacaggtggattcataacaaagttcacagtcgaacttcccaacagtaaagtagtaggatgccccgttgctcccaaatcaaaattggaaatctccaaagccctctcagaatgtactgatatggtttgcctggagctggaggtggtgggggctggaggtaagggaaggagacaaaggtttgctcaaattaaaatccaacttaacatatgaagggaactatgtgcaactgtacactgggaatttagacttaccacggtctaaagaagccatcactatgtgttaataataccccagtagactaaaggatgctgcattatggaatggaagaagagcgattttgcaaggcttcatcttgccagattttaggcaagatatgcaacctttttaaaaaatattaatttatttttaaaattgttattgtgctaagaacacttaacatgagatctactctgacaaatttttaagtgcacaatatttttaattgttaacaatatagctattgctacctataggcacagtgttatacagcatatctctagaatttattcttgcataactataactttatatctggtaaacagcaacgccccatttctccctctcctccagcccctgcaaccaccttctactctctgtttctatgagtttgactattttagattcctcatgtaaatgtaatcatgcagcatttgtccttctatgcatggcttatttcacttaacataatgtcctccaggttcatccatgttgttgcatatgacaggatttcttccttttcttaataatgaataacattccagtatatgtatatactacattttcttcatctttaaatggacatttaggttgtttctacatctgggctattataaataatactgcaatgaacataagagtgcctatgtctcttcaatatcttgatttcaattattttggatatatacccagagatgggattgctggtttatatgataattccatttttaattttttgaggactcattataccgttttgtatagtggctgcacaattttctattcccaccaacggtgtacaagggctccaatttattcgtatctcaccaatatttgttgtcttttgggttttttttaaataaaataacagccatcttgacaaatgtgacgtgatatcatgctgttgtttcatatgcattttcctgatgataagtgatgttgagcacattttcatatgcctgttggctatttatatgtcttctttgaagaaacatctattcaagtcctttgtccagtttttaattgggttatcgtcattatctatttgcaattcagttgtaggagttccttatatattttggattttaatcccttgtcagatacatgttttgcaaatttttttacaattctgtagattgcctttttacaacaaactaagtataaaagtaatttacctcaacacaataaagtccatatatgaaaagcccccagctaacaccatcatcaatgatgaaaacttctaacggtgggaacaaagcaaggatgcctactttcaccacttttattaaatgcaatataggaagtcctagccagagtaattaggtaagcaaaagaaataaaatgtgtccacatcagagaggaagtagttaaattactactgtttccagatgatatgctcttatatacagaaaatcctaaagactccacacacacaaaaaaaactcttaggacaaataaatgcataaagttgcaagacacaagtcaaaatataaaaatcagttttttctatacattaatgatgaactatataaaaaggaaattaagaaaaaaatcctatttataattacatcaaatcaaataaaatactaagaaataagtttaactaaagagatgaaagacttgcacactgaaaactacaaatcaagatacaggtaaatggaaagacatcttgtgtttatggccagaagacttaatgttgtccaaatgtccataaaagccacctataaatttattgcaatccctatcaaaatcctaatggcattttttatagaaataggaaaaagtcctaaaagtcatgtggaactacaaatgaccctgaataaccaaagcagtcttgagaaagaagaacaaaactgaaggcatcagacttcctgatttcaaagtataatacaaaggtataataattaaaacagtatggtgctggcataaaaacagacatacataccaatggaacagaaaagagagctcagaaatgaatgcatatttatatacagtcaactgattttgacaatgatgccaagaatacatactggggaagggacaatcttttcaataaatggtattgtgaaaattgaaaaaccacacacaaaagaataaaactggacccttattttacatcatatgcacatataaatcaagtcaaaattgagaaaaaacttaagcacaagacctagaactataaaacttctagaagaaaacacaaggaacagcatcatgagattgggcttggcaataatttcttggatgtgatgccaaaagaacaagcaacaaaggcaaaattaggcaagtgggatgactacaaactaaaaagctctgcatagcaaaggatactcaaacacttttaagcccactctcttcatctataaaatgggaataatggtacctacctcacatatctttggctccaaaataagtaaaatatatgataaatgacttagcacaatggctggcaaataggaactcaataaaaggtgtctattattactagtgaaattgattttttaccccagtgtaattactggacatttcaggaatgtgggagttatccacagcaagttgaaaagagaaataaaatgaaaaaacccaaactgtgatatttttcactcaaccattacttcctgagagtgatactatgaagaaagggaagattcaagttaaaccagggaattccttcctattttcaatttttataaagatagaaagaatgaagaacatttgcttctttctggatatagattcagaacactggaaataacaaagagatcacaaattcatacatttgtaataccatctaaaatttgtaatgactttccaattatcttaccaaagagaaaactgaaaataagggattgacaaataagaaaattagtgctatttcaattaaaatcaggtagcctgacaacagcacatgggttttattttgaaaagtgtaagcaggaggaagacttaaatatagatattctgacccagggtccagatctttctactacactaccatgtataaaaatggctagtcatcatgttttcttggtttgatgccaagaatgcaaggttggcttaatagagtaatgtaatttacctcattaacagcttaaaggataaataccatctgatcatttctgcagatgtcaaaataataattcaacaaaatataacatgtattcacgataaaaataaacaaattagaaatagaaaaaaacttcattttccagatatctttaaaaagtatatttatacaaaaacctttagaaagtaacacatttaatggcaaaatgttaaaagcattacatctaagagtaggaacaagctaaaaattcccaccattactactcctactggagtagcatagtaagataaaaaactatatacatatataggaattggaattatattattattaatataaaactcaaaagaattagcgaataaattattaataggtgagcttaaaagattaaataatttgttaaatttagtcattttaaaatgtgatgtattaaagctaccatcataatagttatacatacatatatatttcttaggaataaatctaagtacatataggtgctttataaagaaaatgagaaaactttaatgaaagactacagagacctaaatagatatctaaataattcatggataagaagatttgaagtgttaatttcccccaaagtaatccatgtattcaatgcaattccattgaaaattccaaaaggaatatttacgaaactggatgagatgattctgcagtttatacggaaacataacttggaaggaggattcgtcttgcagatctcatgcattttatgaagctatagtagttaagacagtgagatactggcatgtgtatgagaaataagccaatggaatagaacagaatgctcagaaataagcccatgcttatatggagatttgtcacagaaggatattgaagaccatcaggaaaatgacagacaattcaatcaatgatgcagagacatcattccaaatgcaaaaaccttaaatggcatatcctcctcacatgctacacaaaatacatccctggtgaattttattatatttaacaagaaaaatgggctgggcatggtggctcacgcctgtaatcccagcactttgggaggccaaggccagtggatcatgaggtcaggagattgagatcatcctggctaacatggtgaaaccctgtctctactaaaaaatacaaaaaattagctgggcgtggtggtgggcacctgtagtcccagctactcaggaggctgacgcagaagaatggtatgaactcgggaggtggagcttgcagtgagctgagatcacaccactgcactctagcctgggcgacagagcgagactctgcctcaaaaaaaaaaccaaaacattttttaggagaaataggagtttatgatcttcaggtagaagttcttaaacaaaacattaatacataatccattaaagaagatttgtaagtatggttacattaaaataaaaaatttctgttcaccaaaaggtattaagaagagtgaatacataagccaccaaatggagatattacatttataaatgacaaaggataagtatcatgaacacataactgataaaaattaagaaaaagacaaacaagtgatagaaaaatgtgcaaaaggtattgctatggtttgaatgtgttccccaaaattcatgtgttagaaacttaatctccaatgcaacagtgttgagaggtgtggcctaataagaggtgattagatcatgagagcaaagcctaataatattattatcatgggagtcagttggttgtcacaagagtgggcttttttgatcctctctgctctcttacacttgcactctcttgcccttccaccttccaccacaggatgatgcaacacaaaggccctcaccagatgccggtgccatgctcttggacttcccagcctccagaactgtgagccaaataaattcgtattgcttacacccagtctcatttattttgttatagcaacacaaaatggactaagacatacaacaaactgggagtttacaaaagagtaaatgcaaatgtcctatgaacaaaaatgttgtacttcactgataatcaggcaaataacaaaaatcacctaacacttagcattgtattatcacttcacactatcagactggcaattgtaagttttgatgaagatagagaaaaaaaaaaacaagcaatgcccgttgaccagtggttagagattaaagtagtacaacctcttgggaaacattttgacatgactcaagttttgtttattctcagatccaacaattccacttcttggcataaaccctggagaaactcttgcacaggaaacataattcaagaatgtacacacagtgttgtcacactcgtgaaaatatggaaacaagccagatgtttatcaacggtagactgaatcaatagatgtgctagattcacaattgcacattatatatcaatgttaaggaacctcaaagataatgtaaatttaagaagaaggagaagaatacttgcaggatgattccagttatatagagttaggcaaaactaaatgtattacttgggaataattccacagtaccacaaccaagaaaagcaatgaaattattcacccaaaatacagactggttgatacctccaggtggggtgggagagtgtgcagtcaagcaggggcacccaggggattcctaagtgccactaatgttgtttcctaaccatactggtagttatattgatgtttattttattcttcttctttatactagccatatgtttgatatattattttgtgcatatgatgtattttctgattctttaatataagaaataggcatatttggctttaaaccattgtgatgttaaaactcaaggtctcacagaccagaggtccaaactgcttagtgtgaactaataaaaaagaaacaggtaaacaaacatattaggtgtcctccacgttcacaaggcttgacatagatacaataataaggccatatggctttgcagtaaatgcaatatctctgcaaagtattgcaatccatagttcactgaccctcactataggcgttattattatgctctcttcatgtgtagtgtaaactggcccccgattcaggcagattcaaatggacaaatcagtgaaatggaagcctgcagtattcttttaaaaaaagactaataaagacataaaggcgttttctctacaacagtgagcacattctgcattgcgttaacctgctgacactatttgtaatggcatagaaaggtcactaaagcctaaatccgctcagcaagattcgctaccacgatcttctaaaaaacacgagctttattaaatatcagctctcatcttatttccaagaaggcaatccaaaggttatggtgggctcaggtgtgaggagcgtgtctattattgcgtcttgcatttgcatagcatctgccctcagaatcattcagcacgtctcctttacagtctcacattaatcggcaatctatcctggtatcagggggatgggataagctgggattccctgcttttttttaaatggggaaactaaagtcagacaagaagacaaagtatttttagtaatgagattaattctctccctcgttaaagcagtaattccaaaggatgtcagcctgtatgaactcaggccttggcatagttttacatggagtggaagaaatgagggggcccaacatcaacatgcttggagggctttgcaaccttccagattaccccagtgggtgagccccttagtatggcatcaggtacatgggaaagccacctcctgatttcactcctgcctccatgtgatgccctagttttactgggaggatttacttggggtgatgaaatacctaacttccactaaagacccaattcacttttatttgatttttttaaaaagtgaagtgattcacaaacttcaaatcaagagaaaacaaaagctgattttgtttctgttttgctggttgagatgcaaagaggagagatgttgtagtcaccctagtcccatttcttgagctttccatttcagcttctgctgcctcagtttcttcatgtctcccaattccagaccaaggaaactgctgcactcagctcatagtttgtggcagatccattagagtcatatgctaagggcattgtctggaatctgggctaccccttctccagtggggacatggtgagaggagatgaggaggggatggcgcttacaaaatccagctgcagcacatgggctgtgggtggctggctctcccttaggtggagtttgggagagggggagttggcagaaataaagcttcttgtttaattcacatcttaaagatatgtactacttaatgagaaaaagcctctgtatatactaacatgtacataaattcaacgtaataagccttcaaaatagaactgctaggttatctcaaaaataatttaagaaaatgaaatgcagcagtttaaacggggtcaacataaatgggtgaaacgatctttttcgaaatgccatgacatgttatgactctctttgcctaggtgctttattaagaattttttttcctatgactgtttctatttttaaattacttaacaagaagtgacttcatggctgtgggagaaaatgcaaaaataatcacctcgcctggcgacggggggtctctggtcataactcacttcctactcccagcggaagaaaaatagagccaagggagactgggtgatgtgtgcaaaattttaagccctttatcgggtgagaatatttcctgcagaggcctttggccaaagtaatcaaattctagcctggctgctcacagccaggaacacacagatggaagccccaggccagggctccatagaaagagctaatatttgatctcctgctctgagatgtggagggcagagtcctttgccctgcagcagaattctctgctcaacctcattcccctggctgtctcctgagaacagccctcctgcccttgcctctctcaagcctctgggcctgtccttccagtggtcatgtttctgacccccatgcctttgtgactcgcctccaaactgccctcaggtgtcagctggctccatctccctgcagtgtctgcaacactcagatgatcccacgcataccagtgaaatgggttagtatcgctgattccttaatataaaaatgctaatgtggaaaccaaatgagaaagagatcaaatgcttaatgccaaaagggaattcatgaattcttgtctattttctcatttatattcttgagtcgttaccataaattacaaccactctctgccccaatccctcgcccacttggggcatttctccaccataggatcctcattttttgcagctctgtcttcattatcatctcagggaggaagagcaaagggaaatgaagcgcatacaactccctttccccccagttctcatcctgtcctaacttagtgaaaggaaatatgtggcctttgtgctccagtccttccttctgtgccaggggagacaacatcagtaaatcacagaactctccgagcccagacacagcttctcaatacttctcatcgtagtgctgcccatgtcaggggcaactgaacagaaatagctcacaagatgaaacctatttgtcatctcccaccaaaaacaatcctgccagatccagagaatgccagctctccacaggttcttttcagatgttctctttctcatttttttttttttcttagaaagttcaagaagatatagaagaagaacatgcctatcactcaggctgccattttaggaaatcatacttggagcaaaagtgataggtgtacttctaaggcacatgacagtcaggtcattacagacaaacaagggggaaacagccccttatcacatgctttgctaaacttccatccttattcctgcagctctaatcatatcacagtgtccagaaggatgggagtaaaatccaaggaggcaggcagacccaggagtaaagtcagaccatgagaaccagggtcaaaaaggcagagagggaactctggaactgtgtaaggaagtatggatggctcatcattatcagaatcactccaggaaacttcatttgtgaggtgaacaaatattgtcttcaatgcttcctacctccccaacacccactagaacctattctgggtatcctgggtcctcctgactggaccccaggcctttttcaaattcctgcatgtgtttaataagcacctactctacgttaaccactttttgtaaagtgctgtgtgtatagaaaacatatgaggcagaggacctgtaacctggccacagacataagatattcaggacagttgatgattgagggcccaggtaagcggctctgggatgagcccctgggagtccaaggaggcagagccttatggtgactggagactatatagcggccatgaatggcgatatgaagtggttgtattttggctaggcttttaggaggtgaaaagccaagatcttaacatcagttctgccacagaccagcaattaatgttatctctctgggttttctcagctgttacacgagggaaataaactagatcagaaaccagcatgacctgagggccaaatccaacccaatgcctgtttttgtaaataaagttttattggaacatagccatatttgcttctttatctaagtttgctttcacactaccaagacaaaggtgagcagttgtgacaataattgtatgttccacaaggcctaaaatatttactatctggccctttgcagaaaaaaattgccatcctctgcaccatatcaaaaactcccaagatccagtgtctacatgaatctgacaggtaaatatacaccagtacaccagtaaagtagggaagatataagaaaaatcactgaatcctcttggtctagttttcatcttctcagttttgattataaacagagcatacagagggctatttctccactggaagaaaagcacaatgaaaaaaacaatgcaactggccctcagtctctgtgtggggtaggatctgtggcaaaccaggcaggacacccatgccctgcctgagggaagcctccactcagctgcaagaaaatactggcccactgttgcctgcttctgtgtgttttctagagaagctacgagtgtagatttttatgtgacatctctccacttaaaaaaaattaattttcagtttaggaacaagccaagctctctgcataacacccttgtcttgtggtggccactttttgaccttgggatcaacacgttgctgattggctggatctgtgttcgtggcctttctagggaagagcccttcagaagacagggaagaacaggagaacgaaggcctcccaaagggaaagcactgagaaggatggaagtagctgttaggagcaatgagtaggggaggaggacactcgagtgaggcaggagggaaagggaataatcttgggaggggctccctttccggattgaagcaggaggtagtgtctggattactcagaggatgaaatggtgttttgagatcaaattttatggtggagttacctaaagtgttggggaaaaagagtttgccaaaggatgaccaaagtttcccatttccctgggacggagccatttctttggacaccagacattcagcgatcaaactgggacagttctgggacaatggacatttggccagccttgtagagacaagatgagctttcagaaggctaccccagtagtccagatagaaggtgacaagattcctgagctaaggatatcccattctcttctgatggaaaacttcttgtcaaagtgtccataaaaaagaacagtctgctttgctttgttccaggtgcattttagccatagcctctggctgcaaaaccttaccccaatggactggttcagcagcaagaacatggccacgtgggctggcctggggagaagctattgagtaggagccatcgggtgcaggagggaaagcttgctgccactaatactaataaaggctcccatggaggggtacctgctatagcctggtacttcacttaatatttataaggacccacataatgcaaggattgttttcaccccgtgtggcaagtgaggcagctgaaaaggttgagtaatttgtctgttgtcaacaaacgtgggagccagaatgtaaattgagcatcattccaatctccattccccagcacacctcacctctccccactctacagtccttgcctcctctgtccttttgggggctctggccataagcacagaagcctatctcctgggaactcaatgagccgcctcagacaagacacatcaactaccagaaaggagccagtagcctgaagggaattcagaggagagccacatgaataattaagagcctagaaggattgatctgtcagggaagattagaagaatacagtatgtgtagtttggctaagctgagaccgaaggagcaggcgtctgggagtggggaggggctagagcacagagtccttgcagaatgggtgggctgtctgcttgttataacatgaggaagcagagctgggaagaagacatgagaaagagaaagtgcaaagtgaaggctgaagaatgatttcccaaggaacaaatttctccccagaatccagagaggaactcagtctagttcctctagaactagaacttttataccttcgtgtaggagccctacacgaaggtataaaagcccaatagctctgttttccctctttccaagtggaatgtatttccttagcaaaataataaattcaagttccttgccatatctctcgagtccccaggtcttctccaggtctctgacctctgacgttaaactgctttattctgtaacagtcaactctgaattacccaggagagagaaggcttggaggtatgatgggctgatctgagcactgactttgccatgccctgcaccaagcttagaataaaattctcatcctgtattcacttgcccaaggtcacataagtggtttagacagtctgcaatttttaaaaaattccaagccccactcttacttatttgtttcttaaggcaatttagcatcagttctgtcatgaactagcaattgatgttatctctctgggttttctcatctgtaaagtgagggaaataagcacttggccaaaaactgggtctgtagtggcaaccaaggcagggttggtccctactttcatgggatgtataatctgaatgaggaagatgaacattaaagtaatatttaacaggtcattgatgtaaaatggtgaaagtaaataatgcaatgtttatgatgttgtgaaacaagaagacagctccatctaaggagacagaagggcttctcctccaaggaaagtgtaagaaactaaggccagaatgttaggtcggaggggaggtgttatgcactgaagaattaacattacctaaagagagatctcaccttttccctttgctactgggaggtgatttctaggacccctggaatatcatgtttcataagggtatctctgtttgcctgagagttttggccaacaaatggtctagcaatgtgatttacaatgggagctttgggccatgttgtattagttatctaacctccaggagggatggagaataaaggtcagtcaggtgagaagtctcacatcctgctcagtgtgaccaagtcccctgtaaaaactctagatagtaaagatcaagcgagattctctggttgacatattgtcactcataaacaccaggaaagtaacattggtcctgactccatggagagggcaatgggactctcatattttgtactttcccaggtattcactgtatgtgcttcttttcttggctgccattaatctgtatcgttcccctggaataaactctaaccatgggcataatagacattactgagttctgtgattccttctacaaactaatgaacctgaaggtggttttgagaacccctcaaacttgcaattgttgtcagaagtgggatggtctcctgggggactgtccccttaaactctcacaggtgctgatagaggaaacgtctcctagacagaaggcagggtgtgagacagatgcctctattttacttttgacattacacctgttttctcttaatagcaataattgttttctgaatataccccaaactcattctcttttattcaattgactaaatattggccattacaagaaacattctgcatctaatgatttctgttggattttttttcatttgcattatcttctttctataatctcaaactctattcataaaactatattccatatatagttcttctttttctataagaaaacatgttttccaatgtcatggcaggcttcagaaatgctaaattcacaaaggaccagaaaagattcatgggcagtaaaatttgacactgcaattcaagaaggggaaattgagcttgtgatttttttcaaaggtaaatagaaattgcctgaagagtaggctgtataaccctggatggttgggtgcaggttggaggaattcagtgagcaggagagttgagcggtccagggacaccagataggaagggactgagaaagcaaagtcattcccagggagtttttcagacaaatctggggaaagaaaagtctgaaaccatcacctcaaggtccaaatagctatggaataaatcccatcgtaatggaaagggtttgatttttgtatagtgcattggatggtcattcttctgaagtccctttgtggatttctcattttctccaaccctgtccttaaatgccagtttccctccagggttcctttctctatccaaatgcctgaagccaactccaagacatgacaaatcttgaccactagaggctgatctagttggtttggggaaaaaatacaagttgtaactgttaagaaccaaacttaaatatcaagcagagccaagctggactcagcaaaacagatacacagtaaaacatgtcgcctccatataatgtatttattcaggtcttctcactttgtattaaaggaactttgttcaaaaatagcatcatggttaaaagtgtgatctctggagtcagactccagcttccaactttgccacgaaccagctatgcaactttgagcaagttactaaacttctcttcacttcagcttccttcaatacacaatggagataacaggtttttatgaggattaaatcagctaacacacacggacttcttagaataatgcctagcacatagtaatttcactaaagatagagaatggtaggctgaaggcaccattttctatacagtcagaggctggagtcattctagtgtccaaacatacagcacaacagtttaaatcctaattccaaaagttaatactaagatatctcattagatgggcaggaactgtatacttgtgcatcctgactgctgatggtcaggtggtcaccagccaagaacattgtccacagggacagaacttggttaggactaagccctatatcaaggcagaggtccagaaaagggggactctcaaaagcaacattagacagcaggactcttcagaaaaaaatgactttgatcttggaggagcagtgggtagggaaacaagacattgaaaagatggatatctcaggcaggaatcctattcttcaaacaatgtcaatgcaagatgccaaaacttgccctatagcagcagatcctggcctcagctgcatggtagaactccctagagagcttttgaaaaacgccgatgctcacattccatttcaaggcaacccaatcagaacttgagtattggcaatttttagaaagcctcctcgtaccccttaaccccacagttctagggtaaccagggttgagaaccacagctctggagtctacccaactgcttctcaaattttaacgtgcacagaatcaccaggggtccttgctgaaatgcagactctgattcaatgggtcggggtgagacccaagattctgcatttcccacaagctccctggtgatgccactgctgctagtcagtgggctgtgggcgctagggcctggcagcacaggcagtgtttggggagaagcccaaagtgggtgtgtaatagttataatttggctaccaagtccttggattggtgagtgtgtccaatcctaagccctactagaaaagacggatggaaaatccatcacgcctttctcatgccctggggtaggcagaagattacatttatgggcagtcagtgaattcagctgtgcaggactcgggaagcaggagacaggggctgacacaggcagcaattgtagccaggatgaaggagtctaagacttcaaagtaaaaggaggtagaggagttaggggagtctggtatatggcagcagtagctttttccccctcttcattcccccttacttctcacccttggcaatcatcattctgatttctgtctctatggtttattattatcatggtttattattctctataataatacattctagttcctcttataagtagaaccatatgctatttgtccttttgtgtctggcttatttccctaagcataatgttgttaaggttcatccatgttgtagcatatgtaagagttgtctttctttttaaggttgaataatattccattttacatatacagcatacctttttcatccatttatccgctgatagacacttgagttgcttctgccttttggccactatgaataatgctgctgtgaacatgggtatacaaatatctcaacatcctgctttcaattctgctggatatatacccagaagtggaattgctggatcgtatggtaattctatttttaaatttttgaggaactgccatatcgttttccaaacagcagctgcaccatgctacattctcaccaacagtgcgcaagagctccagcttccttagatccttgccaatacctgctattttctgtggattcgtgttatcattgccatcctgatgggtgtgaagtgacatctcattttggctttgatttgcatttccctaatgatgagtgatgttgagagcagccgttttggtggaaatggaaacatctcactcttggctttataggcagcgtctcctgatttcttgcttcatcatacgcttgttcatgttacctgccatgttacctgtcagcatgaatgctagtcttagtcccaatctaggttaaagaatgcttggatcgaggaggtgccatttctctcctgtggcctgggagcacgctgagtctggccaagctcatggtgacttctctgttcattgactctgtggaagggtctgtctatgtcccaccagatctcctcctcaatcatgctaccactttaaaactgtttgcctgagggctctggggccaggcagtgggagaactttctttccccacagagcatattacaaatgccaaatcagaagtgctggagaatgaatggccccagaactcactccaccagtggtgatgggaagatggtggataaatatcccggctgcatctcccttgagctgggataactctgaagtgtgttctaggctgtttcccacagtggtctgaatgtgtggcagatgctcacagtggaaacgggtttgataaagcttcccttttttgtttccctgcattgcttccccacttccctacaagtgttggctgggatcgctgccttaataaacaacctgagcttgaatccttaccttagggtccgcttctgggggaaaccaactcaatacagataatattatgcctctttcagctaccaatacctattaccagcatgtgtccagtcttggtcagtgtgaaaagcagttagtgaaagatttttaggtccacagaaatgctcaggggaacctgtgctttttccttgagctatttaccaggttcattattcacatttccccaaaatacacgtgtgcctaagggagattgctgtgtcccatatcctcacctctagttacaaaatacactaaggtagcatactgcacacatgaaattgctgaacaaaaaaatgaatagattatatatctaagaaatatggtttgtactctctcccattaaatatatttgtatccccagtataacaatgtaacatatattggaatctacaaagttctcatgccaaggaaacatccctgaagagtttaacgctggtaatagaataatatactcgctaatcaaggcaatctttaaggccagatggtgtctctgttggactcttcttggtggttttctataccttcataaacctggttcttgactgttctacagagagtgagactctataaaaattctcttataaacatatatgcacacatatgttcattgcagcactattcacaatagcaaagacatgaaatcaacctaaatgcccgtcaatgacagactggataaagaaaatgtgatacatacacaccagggaatactatgctgccataaaaaagaaagagatcgtatcctttgcgaggacatggatggagctagaagtcattatcctcagcaaatggaggaacagaaaatcaaatactgcatattctcacttataagtgggagctgaattatgagaacacatggacacatagggagaaacaaaacacattgggacctatttggcggatgggcagtgggagaagggagagcatcaggaagaatagctcatggatgctaaggcttaatacctaggtgatgggatgatgtgtgcagcaaagcaccacggcacacatttatataacaaataggcacatcctgcacatgcacccctgaacttttaaaataaagtacaagttagaaatttaaagtggggaaatcttttttaaaaaagaaagaaattctctgttcacacaactgttagatgagaaacataaaagtttttcctgtaggaaattatatacatgttttaaagcagaagagtaaaaattcatattagccaagtccaaaatagaaaagaggaaggaacggtgaaacgcctgttcccaacacagagaggtcatctgaactatcatcgtgggaaagtaaaagtttacccgagagaagcccacagatgctccaaaatggagccagaaatagtaaccagataatgcttataatacagcaaacagctgagcaaactgagatgacacagaatctttttaatgctcgtttcaaggttatagacattataatagcaggtcctgagcaactctgaatttcaatatatgaaaaacacaggccctctctaccaggcctctgctcattttctccatggaaaagagttttgggagtctgttctgatattttatgaagttcattgtttgatcctatgcccctgtaaggggaatgcactagttacaaaaaagaagaaaggtggagataatgactcagtggacattcagtggaggtttctctgtttaaggggtaatggttgaaaattttattttaaatatctccagctcttgaaaaggtaaaatgatttgtccaggattttaaagccatgattttactttatatattcgaaactctgaaactaaagcaattttagtgtgtatggggcgggatggggagagaaggcagaggaactaaggacaggtacaacatttagcaaactcataatcctataaagaaaacatttttagcttccaataagaccacactcctactcctaacataggaaccagggacatgcaaaacatatgaaatgcaactacattgatgacaggcaaatgcttctgctgtttacaaatccattctcatgtattagccattaatattgcttattaattttctttgattcatggtttctgacttctgatacttttctttgagaaaacatttgcattcatttgtcactagaagcaaaatatgcattcgcaaagctactcatttagaacccaagaatgaattcgagaaaagtatacagagaagaaaatcggcactgcaggaaggctcagggccttgcgcaaagccctgttagccaatcagggagaatgtccacaagtgagaactcactcccctcaaaaattagccatcaaaagaaaaagaggatgagcgcatgacagatcttatttgtcctggcttgaggttgtcattagtgacattcacaccacatgtttgaaatctatcttgaagagcaaatgctaagcctctgtttattctctttttaattccacaccatccagagccagaactacaagcccaaactctgtccctttgattggagcatctctctcacctgctacacgtgttcagctaactacggaaggaaacctacaggcaagaaacaaagtggtccttctagcttgacaccttgtgtgataggaatagtccaactccattggggggctttcagaaataaggagaagagattgggataccccacagacagtttttgtccagttacatttatatgctttctcaagcatcccctctcaccgagctccacgaacgataagggaatcagtcttaaaagagccgcgagttacaggcacacctgagagaaagagatgtttgtattcaccttagaactgactctagccctgggtcctagttctttactggggtccttacttcaatttctcactctctaccttctcattcttttcctctctccactggattcattatgagatgagttgttgaaggctggtggcaaaatctgtgcggcaaatatgctaaagtacatagatagagtttctccctgctgaattgacaactacaataaagggaaacactaattttcagggtttggaagctcagtctttcaaacaaaggaggacttgctcaatgaagttgcatttctaatcctttagctagagtcaaatgaagccagttttgaagagcatttcaaactctattgatgaccaaattgcactattgattgataccaactgtaaactcgtggctcctcatccacatccctttaattggtcttgaatgacactcttttaaatgactttgggaagtgaaggggaagaaatgtgccaaagataatttgcacaaagaaaatttacatctcgtctttgtttcattttttctggcatggatactgactaccaatttattattatttttttttcttgagggaagtagtgagaatacgaacagcagtctggatttttcttgttctgtttccataattagaaaaatagactaaaattatgcaggagcagattgagggaaaaatacaacctgctttcctatgatttagtgaactcttttttgaattcaaagatatcccctccttcccctggcccctatacatgtctttttatctctgagtagttactgtacctcttttaagtttattctccagtttaatgacaagagcattcttcaaaaagctttaagccatgaagtgtgttcataatcacatcactatttgtttgaaaacaatgtcctgataccctgctgtcttcccagtaggcccaggcaatacaaaccagtcccccataatcacatggtacttacaaaatcaggttgggcttgaagaaactggtcaaattgttttcacataagttgaaaacgtgacctaccaaatgacccattggttagttatcctacaagatgctgctaatacggggaacgactatgaaaattcattcagcccatgcatttttaaatgtacctggagagttattcaaagattcagtggtatttccacttagacacctgcctttccttccgtctccgtttttgttgaaaaaataaaaagcactttatgtaagcctagattcaaaccacaatcggctcacagataaagatgttaggggacagagaatttctcaacatgcaatcactttcaacaacatcgcctgttaaaaatcgtacatgtagactgggcatggtggctcacgtctgtaatcacagctacgcaggagaccaaggtaagaggatcacttgagctcaggaatttaagactagcttggacaacatagtgagacctcatctctaaaaaaattttttaaattagctgggtgtaatggctcacatctctaatcccagctactcaggtggctgaggcgggacaatcgcttgagccaaggaggtcgaggctgcagtgagctgtcatcatgccactgcactccagcctgggccacagagggagaccttgtcacaaaaacaaaaacaaaacaaaacaaacaacaacaacaacaaaaccgtatagagtcaccaaagactcagagaattagaacttcagaggttaaggctctgaaacatggattttatataaacttccaaggcagttctggttcatttaagttctgagaacccccgaggtagccaccagtcattaaggcttcactgagcagcattcgaaccccagcctccaggcccccctcctgcctccatatctaacagtgggtccagtgttttcacccctcaggctccgtatgcctccctgaagacttgcagtcatttcctaactgatcagcccacgaccatttcctcttcccaacgtagtcttctcatcacgtaactccctgctcaagaatctgtggtgaatcctcgtttccttcctatttcaaaacctattcttcagctttaaatgtaaaggctgaaagaaaatcccttctggcctgagtcccccaccgtcccctgcaccctccccgcattccctccttctgaacccccagcaagactggccgttcttccagcacctgtgatgtccttcgccctcgtgcatctcagtgctggggtgctgctctcccagcttctctaaccctgtgagttgaaccccaatgcatcttcgaggatcctacctctcatcgaggatgtggccctgcctccccagctggctgggatctgcctcggctttgggcctctgcagcattttgctcagcccttcccttgagctctcgccttattgggttttgttgttcatttctttacgcactcaatttggccttcactggccttcaacttgcccgcatcctaactccctgaatgaaggagctctcctggtttgcttttcactcccctcaggcaactaatgatacaggagctagaaagaaattatttaggcagacagtgagggtcaaagagtcctcggcagaatttcccttttaacaaaaagcagccccagagtaatttcttttctaacaaagagcagcctgaaaaattgagctgcaaacatagataagcaagctgaaagcttgcacgggtgaatgctggccgctgtgccaataggaaaaaggctacctggaagccaggtatgttcaacatggaggctccatcctcccttttctttgtcaccacgtgtacagtaaagaaacaggcacagggccggccaggtagcaaaagcatctgcataataaacgattagggtgggggctaccagaaattcgagcgctatgcaaagggcacacctagcccgaaccagttttttgcgccctatgcaaatggcacaccttgtccaaccaatcttatgtgccctatgtaaatcagacactgcctcctaaagctcagctatagaatcccttgcatttcaccatggaccagaaacccattcaggacccctctctctgcaggagagagctcttctcttttctttcactgttaaactttctgctcttaagctcgctccttgtgtgtccccatcttagttttctgtggctttgagacaacaaatcttgggtaatttccccagctgaaggatgccgcttcactagcatggggttcaaacacagcagaccctcaatgagagcttactagattgtttcatagactcttctgtcaccttctttacatgtccccaaggtggtgtttcctggcttgcatccctctgtgtgtctgtggccaccagtgcgccagcaacagagccctttgtggtcccacacttggaatcccacacaagcctccccacctgtctcctgaatttccacctcctcctcccccaccatcgcagtccctaattgaagaagagcttcttgaacatctccctgaatcctggaaaacagctatctcgacctttgtagaactgaccaatttagataaattcacaaagctttggaacataagaagggtcacattttctaagaaagtttcaatgccaattcaaccggctgagtgtgagatcccagaacatgagccatctggttctataggaccatgctgcatgcactacacatcctctctccctgcaaatgccctttccagtatgtccaattcattttatattatttcttatatttttcctaccaagcgtggccttctgctacatggtaccccccaccctcccacccacactcatttctgccatctctcacactctctctcccctctccatctttgctcaccctccagctcatgccttactcagttccaggtggtcatggcagccacgtcttgctctccagggctgttccatcttctccctcctgccccacaaaatcaagccaacccccatctgtctctcagaggttcctgacgactcctatgcaaagtgatttcttccttctttgtatttccaagcatgaataaactatgtagttgagcacttacatattccatttcatctggccttttgttactcaagttttagagagtatcttgatttttcaacccagagcataaggtcattgaagtgagggaccatgtcttaaaatttttcttatatggaactccctggtgttaaacaattaccagggctcagcatgtattcatagatgaaatttcaatcttagatatctgttcagtaaaatgtgcaaggtttctttgtgctttaggtttaaattaatttgatctttgaaaagcgtcataaaccatttcctcagtgaaagtaagaaagagcggggagcattctgagaataggcatgaaatttgggtatgattcttgggatacaaaattaaaaggccatctgcctttgagaggcagcagatgtgtaattgatattcactgctcatttgccacttgaattctgtagacatttaatgctgtaattgtttacacagtaagattcttaacacccttcagagaatagctcacttttcctgtagtctccgtacttctgatcagcctattagaatcagttctcattttcctggagcttcaaaagtagaattaaaaactaattcgcatgatatccctttgaagatgataattttataatatctacaaaaatttaaaatgatatacctttgatccagcatcatctatttaggaatctatcctacattatacacaagccatatgcacaaagatatatgcacataaatgttcattgcaggatagtttataattataaaatattaaaaatagcctaaatgtctatcaatgagggattgattaaataaattatgagtcattcatacaatataatactaggaagcacttacacagcatgaggtagcaaaactccattctataaaaaaaatacaaaaaattagccaggtgtggtggtgggcacctgcagtcccagctaatcaggaggctgaggtggaaggatcacctgagcctgagagatggaggctgcagtgagctgcaagtacgccactgcactctagcttgggcaacagagtgagaccctgtcacaaaaaaagaaaataaataaaaaagaatgagttaacactattggaattgacaagggaagatgttgcatatgtgcagataatttccaaaaggatacacaagaaactaaagtattaagaatctggagtagtaaggaaacctggttttaatgtataaccctttgtattttttttaaacttgtaaacgtatttttatttttaaaaactaagtccaggagtggtggctcacacctgtaatcccaatattttgggaggctgacatggtagaaccacttgagcccaggagttcctgaccagcttgggcaatatagtgagacctcatttctaccaaaaaaaaaaaatttttttttaattaaccaggtgtggtggtacatgtctgtattcccagctactcgggaggctgaggtgggaggatcacttgaccccaggatgttgaggctgcagtgagctatgattgcgcctctgcaatccaccttgggtaacagagcaagaccctgtctcagaaatacataaataaataaaaactaatttaaaaaattaatttgcaaaaaatgatattagcagttaaaaggatttggaaccaatattggaatggttaattatctacgaagagtttcagaaacatctttgtcatattgcctctttgtgtacacaatcataactgaaattataatgcttacgaaagagacaatgttttttgtttttctattttctttttgatcattagattccagctatttggtaactattatctctcagatttggacaggaatctgattggtgtcagctgtgtaaagagagatgcaacagggacagatgtttgtatgaacaattctttcacgtagatcactttcatggaatgatgactatattttcaatattttgaaatccccctaagaaactcatgtaacaaataaaagaaagcatctatctcatctattctattcacagacctatctatatccacacttatctagaagattcttttggttgtctgcacagcagccattactctgtatattcttccctacaggaagagcctaaaaatgcagctactcttttccccagcctccatgataactgccttgtgtatttttcaggattgttagttgcagacaacaaagtccaccctaattaggttaagcagaaagggatttactactggatattagacagtttaagaacatatgggaaaaccagatagccaagcacatttgccagaaagccagaagaaatgcccaaccacagctcaagactgttacagcaaagatgccactattgtcattcagccaccacctctgacactaaagagcagacactggcacttccacaggaactggtccaaaataacctaacacttttgccacctcgcatgcaagaaaatctgatccacaactgttccttcgagctactcactctcacctcacctctccatggctggcaccagtgagctggcatggtggaagtcaggccacgtacaggaccctagctgtaaggaaggcaagaaaatgtatcttttaagatctccagcctctatagtttaggaaggcatcctggtgaggggttatgggaggaggctatgtgagctaacctgccctattttggccagtgaaaaataaggggaagtgttctggggagcttctgggagagattttcctccctgataaaaagaaacacaaggagagctctctttaccactcctcctctttctgcttttggacacaggtgcaagggatacgatgcttagagctgctgcagccatcttggaaccatgaggggaagcactgtcaacatctacacccactcatatttttcatgttgcaatctctctgagcttccttccttgagtttatagcaatattcaccgttttcccatctctaaaatctctccctggtttcgtccgactcttcaggctaccatccaatgtctttcctccccatcgcctacaaatttatcctctctatgcttactcattcacctcctatctcctcctcattcacttgcagcctgggtctgagtatattatactcaagaagcatctcactataaagtcaccatgccatgtgattggcgaatcttatatatagttttttttttaatttttactttcctttatctctctgctgtacctaactcttcatcacttcttttttgtctttcttgaaagtttctactctctttatacgacaaattatattctcttggaattctagttacctttctgactgttcctttctttgccttttttacggactctccttccactccctcccctttcaatgcctcatccatggatcccggctcttctctgtctattctccccaggtggttttcatcctttctaaccatcacccgaatattgatgaccctgaatatgtatgtccagcccataatcttctcaagcttcacatacatacctctaaccacagctacatacctccactagaatgtctcatggatccttgaaatgaatgtgtccaaaaaaaagatatcattagtccttagaaacctatttcttctgtgatctccaccttcttcctcacccaacataaagatctgaggtcatccttgcctcctccctctgcctcatgtatgcgagtaaaagctaatcaactgctgatttcacctaatcatttcttacctgtgttcctacagcaattttctacatatcactggcagagtgatccagtcaaaatgcaaatctgattattttgttctcttgcctaaagttttttctaatgctttccattgtttacaagatatggatcaagctcctcagcagagtattgtgcttcatcttctgatttttcctccatttttgcttcagaacccctaaattccatgacttttcaaaaggtatcatgcaaccatatgatcctctactcttcctgatactttaaattctgccttaaactattcccttattgcatcacctggtctgaaccttcaagttcagatactagctcctctcacatgcccttactcatgtgacagatgtccactgaacacttactatgtgccagacactgagctaggagctaaagaatcaatggtggatgacatatagtccctgttctcaagaaagttatagtccacatactgatctccaattctaccaggtgggttgggtgccctgctctgtgctctagtcatagacactgttgattgcctatgcagcaaccacatccaccttctttttcccttgtatgagaccatgggaatctaccccattcccagctttagaagtagatattgatatatctgatccaagcatagtgattccatgcttcttggctagtgtccagttgaggatcccaggtgttgtggtttgaatatttattccctccaaaactcatgttaacatttaattgtcattgtaacaatattaagaggtagagttttcaagagaggattaggtcataaagattccaccttcatgggtggaattgtgctgttataaaagggtgagttcagccccctcttgctctttcttgcccctctgcctttgctgtgggatgatgtagcaagaagggcctccccagatgcccattcctcgatcttggatttctctgtccagtggaactgtgaaaaaatagatttatgttcattataaatttcccagtctctagtattttgtgatagcagcaaaaaaaaaaaaaaaaaagaagaagaagaagaagaaaccaggcttaagccaatcagtgcttgagtctttttcctggggagggaaagtgacctgagttggtcctctcagaaggaaagaaagaatttatcattcccattttgaggagagatgtttcttctttcccccaagcttgaacaaggaagcatattgaacagttgctgcaggcagcaatctggtgaccacatgaggaatatcaggctgaagacaaagcttacagataagagcagagccaaaagatctagtggtaacaggggatgggtggaaccagagccacagcctaggaacaactccatcctggacttaatatgtgaactaaagaagtgtcctgttttaaagccagtttaagcagcttttaatttagttcttaatgagagtcaatatgcaccatccactggaagttcccatgtgaaactcaagaatccacactctctcccattctcgcttttcctggcattagttcaagtccactttgtcgctcaattgtatgactttaatatctccttgttcagattcctttgcctcagattcacctcttctttcaatttattctccatatcatttccagcatgatatttctacatctgcactctgatcatgtccttccccacttaaaatcattgatgactatttgtagacttcaagataaagttcaaactccttgccatttattctgaagacatttcgtgtctgcccccagccaggatcttgacctctctttctctattcctttttgccttcctcatacccaaatgtcacatagttgctgggacgtgtgactctcccattgcattcatgtatgctgttccctgtacctggaactactgtccactaccacttacctcacccacctataatcctccagaaccttcagctctactttagaagtctctgcacggtgttcctgtgctttatagcattttgactatttctctgccatcacatttatctcactgtgttgcaactgtttgtttattggcctttccaactaaactctaaacttcttgagagcagggactaggtggtatttacacacatatccacatatcctcagcacataccacaatatctctgactgagaccctcttaaaatctttttacaaagagaaggaatggaaagagaagagaagagaataggaagggaacaggaagggagggaagaggaggggagagggaaggagaaaggagaggagaagacaagacaagagacggaaaaaaaaaaaaaaaaggaagaaagccagttctttcttcttgggaaaaaagaaggccaaaggagtccaaaaaatagtcacagattttactctgaacaggccaaataactaactgtcctgtctagatacagagtctgagttttaatgcattttcttgctagaaaattcaaagtatataaaaggatgtacactcaaaggacctccgcttcaaattttccctgccgttggtgcttcatgcccatgggatgtgtattaaagaggctacctcactcagtaattgtagagaatagaaggaaaacaaatagttgttgatacaggtaatgttcatgtttccccattgtagcagcatatggcactagttgtaatggcctaacgtaaagcattcctgaacaatattaatgaccaactaggttaatgaccaaagactcagcctcaggccccaaacatagtctcctgttcattaatccctaggaaatgacctcagccatgttcattatggctcaattacattcacactccctcatgagaaaagaaagcattgcagtcctgataccaagctatatccccccccacctttttttttttaccttgacacatgggcaataaagacacaaaacaagttattagtcccaaggccaagcatgtaaaggaaaaaaacattattgccttttcagctcccaatcatcaataagaactgaatttgggacctcagaggtcacagagcaggctgaccaggatttacacatcctctgagtgttctttgaaggtgtgacatgcactaagcacatgttagccccagatgttcagagtttggatgaaaatcggaaaactcaaaaggcagctctttgctagtatgcaaaaaaaaaaaaaaaaatgactccttcagatatcaacctatcactcattcaatcaatatttatacaatgtttcctctgagtaaagtcccatagacagtttgtgagtaattcagaaaagagcatcaaggaacatagaatcaagttacatagaatgaacataccctgtggtggcttgaaacatgtcctgaaccacatcgacatgtccttcatcaagaggcagtctatatcctctcaccttggatctagccttaatgacttgtttgtaaccaaggaaatgcaacaggagcaagtctgcatgacttctgaggctaggttatgagcgatcatatggctctgcctggctagctcagatactcagttttggagcctgggtcactctgcaaatccacctaccttgaagcagccatattttgaggtggcccacatcatgtggggagactctaacgttatggttcacagaaccagctgtggtctagctaacaatagcatctacccatacatatgagtgaagacttatctccagaagattccaagaccagttgttgaatcaccccagccatcagctcttcccagctgaagctccagtgtggaacagagacaagccattcccactgtactctgttggaactcctgacccataacatttatgagtgtaacaaaatactgaattttgtacaaaaattacaaagtgtgggatagtttgttttacagcagtagtaactgaatatctctctctcctctctctctctctctctcacacacacacacacacacatgataaatacatacagccaccttgtgaggtttagtaatagtttgcatgcatatgttcctagttcggccatgcctacagaaatctttgaggaagtgccgtcatctaatggaactgcatttaacctgcatctattaatagcaaaaatcaccaagacttcttcaatggggccatgcggcacattcaatgtgaagaaaattaattccaaagtcgagggaacattgattgggtacaaacactgtcttgcatcacaaggtgattacactccattagaatgcacctctctcaggcttggcctcctgttatttcctctctataatctcttcaggatttctgagcttcagtgccactgccagatctgcctcccataccaaatctaatccaggacctaacccagcctttacctccaactgcccaccctccacctctactggcaaatctcattatttcctcagcaccttcacctctgtagtcctcagtcaatagaaagctattcttattcaaatggtatttcccactccagagtggcttgtatgtgtcatggtccctgcacctccaggagtcacagagttgtcccagctggctcctccctgtgcgtgtcccctgtcatccatctcccatccaatcctgatggctctcccttcagaatgtttcagaattcattccccttcctcttttcttactgtcagctccgtgccacctctttacctcccgcccaaattcatgcaattgcctctaaactggccctctccctccaatgtccccagcacaccctgccttccaccactagattaaacaccccacttcccatgcctgcccattaagtcagtccaatccaagaacctggagaggcttcagtgcctgcagctccaatccagatgcccccaagagcatttgcaatgtcttgccttattctttagctagcagtccatctcttccatgacacagaccctttagcaaaatatcaatccctcctttcatactcccacatttgccctccccaaccccacccttggcggtttaacatttcctcctgaatttcctgatgattttgttccctccactgggaagctactccttccctctcttccccagccaacatgatatacacttttcaaaatagcttaacgccattttctacaaaccatgtggactagcgttctagatctcacacacctgtccctgcccctgcctctgatttcttcaaatgccttgttagtaaataccataccttccatgtagggccctttctcaacatgcagtgtgacctaagcattttcagtacttcttatttctctaatgagatataagttcccaggcaagggccatgcactatactcaccaaaattcctcccaaagcctggtgtgtgctaagctgccaggaagcagccaatcaataccttcattaccaaatatatcgagaagagtgcatgaagctggagtctgctgaactccttcccaccccggggccatggcccaggttggaatgccccatccatgacttttcacccttgcctgcttcttgcagctcacccttcagttcaaatgcaacctcttctaagaaggcgtcctcagtcactcctctaaagctgtcttccaagcactgtctccaaataaccatttttaattctctatagggcactcatagttcttctatttattttcaatgtgttatttttatttttatttttgtcttttcccaggagagtgtaagcttgatgacaacagaaagactttctgtctggttcaccactgtatccctcctattaaaacagtgtccagaagagagtatgtgatgggttaaatgaatggatgaatgaatgaaacaaatgaataaagtatagagaaatactctatacttatgaggcactcacaatctattaagaaaaacagatacaaaagtcaaatatcatctagtgataagtaaaattttacatatatatgaattatatatatgaatgaatatatatataattcatatatgtatatatgaaataaaggagaaagagaggaaggtagaatagcactccaaagaatagaaagtgtacattcagaagtgcacaggcttaatcctgcatatcatttgtcagggaaggaaatgtccaacactgtgagagtatgaattttgaggggtggaggaagggaccctgggacatgaggctgggcaggtaggcagagaccagatctgtaagtgagtaatgtggtatattaaaaagctagagccttatcctgtgtaaaatcaggtacaactggagaattttaggcagagaaattagacctttatttcataactaacactctagaaaaagtacagaagacaggcaacagtgataagagactagaaacaggaagaccaggtaagaggccctgcaggtagcccaggtgatatggtttgcatctgtgtccctgcccaaatctcaagtctgaattggaatccccagttttggggaaggggcctggtgggaggtgattgtatcatgggggcggacttctcccttgctgttcttgtgacagtgagtgagttctcatgagagctggttgtttcaaagtgtgtagcacttccccctttgctccctcttcctcctgctcccaccatgcaagatgtgcctccttcctcttcgtcttccaccatgattgtaagtttcctgaggcttctccagccaggcttcctatacagcctgcgaaactgtgagtcaattaaacctcttttctttataaattacccattctcaggtacttctttatagcaatgcaagaatgaactactacactaggtatgagagagtagaggcctggactaaggcaggggacgtgagtacataggaggggccagattcaagagaaactgaggcagcagaagcagcatggcccatgactagctgaaccaggtagatgacagaaagcaaggactccaaggctaatcccaggataacaagcacaaaggcaccaccaccaactaaggttggggagaagaccataaattctacatttgagctgggctgaggtgttctgagtttcacatacctgtggaacaagcaggagaataaatctgataaagcatttggacttgcagttactaggagcttggggcaaggcctgagtgaaagacatgatttgggagccattagcgtacagatgacagggaaaaccatgggtgtgcatgatgtacttggaaagatgaattggatctaccattcaggaaattgcttcttcaggtccagactgtgaggctaagatttcaatatccaggattataaaaagcactcatcacaatgcaacagaagttgcaggccagtgtttccttgacattggaattcactctccccacttgatacgaaccacatggtcttggtagagcatgtttccgggacctttgattactaccaggctaaataccgtatgttccattaagcttcatattctggcatagaagccaatgagaaactgctacttgcaccagtaatgtatgttctccaaaccactattatactttgcaaagctgctgtacaattaatttttagcagagatgcactcatagctgccccatcatgtgtaaaatgcacgcattttgcctttgccagagagaacatattgcagcccatattttagtcatctcccttcaaagggtaagaaaattttgtgagttattcaagataggaatgcaaatttaaatttgctcataactagaatggctcacatggccacaggaacatctgtttttctaaaagcgttagctgattgtccagaggtggtcactcattgtccagagactgggatggagaaagacagaactgggcaacttgtttcttagatggattttgtctcatgtaagagttgcatgagatgaattcaggtagacaatcatttcatatctttttaagacaaaggaagggactactagtatatactgtgctatttgctttgggccaaaaatagcactacgaactttacatgcatatctggttgaattatcccaaatcttacatggtagctattattatcttattttacagacggtgagatttgttcaaactagcataaaatatttaggcaattgtgcttctccatttatatttattttgaggaaaattgaagccatgatttgggattcactgatgctttacctccctgactagttttgcagattacctatcatggtatacaagatgcacagacaactgtaatgggtatctatcctttttgcccttcctagcatccccttctgataaaatagcatcctccctcctgataatacagctcttccttttttggaacctgcttttcccaccccatgtaattcagacagagttatcagccagttgattacttccttccttcctttcagtaggtctagacacattagccagcctgattagtcagaaatctccatctctgtacccagtaattggcccgcgaagagcctgttattcaagagatccaaagacagcttgtaagagatgaccatgaaagagagtcctgctcatttacctacattcactaactctaagaacaagtaaccctagagctgctgggagaagaatctgccagaaaatgaagtccacacaaagaaaagcagagccaagacatggcagagccagagaaacagggttcagatgccaccatgcaaagtccttgatccagcttctcctggagctcttttattcctgagactccctggtcacatcagtcagtaagtttccctttctgccaatgctagcagtttgagttagtctctgtcgattagactaacagaaacaggtccagcagaaaatgaaataaaaatatatttagcaaaaaatcatctgagttagttttacagttatggatttcaaatttcaccatttgaaacagataaatttgtacactaaatagtaactaaaaatattaatagcaagatctcaaagatacccattgggaaattttaccttgggtgcaataatttaagcttaagaagggtttttgccactgacttggaggtaacaatgacatgaccatttctcagggactttttgacaattatcttacttatgaataaaccagaaagatagatgatactaaatattagtttcgcccttagacccaaatatctaggacctctcccctgggccccatgcctggatggccccattctgtatacagtggtttaggtggcttcactgtattactatgtaattattattctccaaatttccataaaagttgtcaatatcactttttttcaaacatatgcatgaaccatcatgaaaacttgagtactatcttaatgctatttatttatttatttatttagagatggagtcccgctctgtcacccaagctggagtgcagtggcgtgcgccgatctcggctcacggcaacctctgcctccttggttcaagtgattctcctgcctcagcctcccaagcaggtgggactacaggtgcaccccaccacgccttgctaatttttgtatttttagtagagatggggtttcaccatgttggccaagctagtctcaaacacctgacctcaggtgatctgcctgcctcagcttcccaaagtgctgggattacaggcatgagccaccgcacctggcctgtatctaaattttatcgcaaattatctgagtcatcttgggcaagccctttgacttctctggaccccaacttcaccatataataggaagatgtcctgcctaacctgcctggagtgttgaggacatccggtgggacaacatctgcaaacgcactttgaaaaacatagagattattaatgtaagagcaagagtccttaagacaaaactcaattttattctatgctttttgacagttgggatctgcggaaaagccataggcttattacaaattctgaatctcttttcaggatctaatctgaatctatcagattagacctctcacaggtcaaatgtagagaaggattagattatagtaatagaactaggaccttgatcacatctccaactggcctttctgatcttgcaaccctttgtcacctacaggaaatctgcccaaaccagtctactccccgtctcccaaacaagatccagactttgttgtattcaaccactcccctcacctcaaatctgctctcttaactcatccatcactcaacatcttgcttgaacttcaagaacaagttcatccactctgacaaccagcgccccctagggctcacttggtgatgagttaggcactgttttgttatagttcttatgtgattctctgaagacgtcctgtaaatttctcattgttacagttcctgcgtatctccaacctgtcttgacaattagactgtaagtatgctaaagccagtcactgccttgtactcttcttgcacaaagtagatactcagcaaatatttgttggttagttaaaaaggaaattgtccaaaggaggaaaatggcttagaaaagaatttataaagaaatgaaatgagggagataaactcatagaacagcaggttacccattgaaatctattaaacatagacaagggagctggtctattcaaaagaagcccagaaatctgaaatcaaatatttagaatggaaagaaacttcaggataatccaattgacattcttcattcattgtggttaatcacccactaacttctctgacttgtgaattgagtttttatacatttaattttttatgttataaaatatgactctcagtaatttcctagaaacagagtctgagagaatagaaccttgaaaaaatggcagctatttcatcgatataaaaaaatattttttcttgctagagtcaagccagacatcttgagccagacttgtggtatcccttttttattttacacttcaatatggaaaagaacagatgattaacagaaagacaggattcctcacctggaaacacagaaaatgctgactggttcagaggggagctaacttcaggagcgaatccaaagtgttagaaggtcctagaagtcaaattgttgagctttgatatgctgtcagagaaagcactggcttgggactcagaggaccgagattttgagaacttgcttcatcagtttcacttatgtgaccattgacagtttcccaaattctaattatcagattttttttggtcttaaaaatagggtcatggatggaattaaatgagataatgtatttaaagacacttcatttatagaaaagcttaatttgcattatttattatccagttaatttccattaaaaactattttaatctagctgtcctgaaggtgagcctttataatctaagaaccgaaatggcatcataacacccttgaagccccttggttattcatccttatcctggctctaaagataaactaatcctcggctctagcatgttccagcccttgcagctttccctgaactcacacgccctcaacaaatgacacgtagccaagagcttcccgctctacaattagtcacatcaatctgaagcctcctcacgggttggtgaacacagcagtatcttctttcgctgcctgagattcttgcaaagatgggagaggcagcttttcaacagcctaaaaggccatctccaccaccagaatgtgtcttctctccaagtccccccttccgtggtcatatgagtggctctgtcctgtgtggagaggcatcactgccctctgtgagctgtccgttgaaagaatcagtgaggtcctcccacctcaagatggtccaggcatgcttaccacctgggacccctcccagctgaccgcaacccagccctagcttgaaaaggcctctgagacactgttcaaaagtcattggcttttgtccaatggaccaacttaggttcctgtggggtagactcctgatggcagagtatgaatgaacactaatgatcatccgtgtcagctaataatatgaaacatatctgccctagcataaaagccagagtgggaacacactccaccattttcatagcaatactgctcatgtgcaaggttggaaatagagacataacgctaaataaagccctcgaattggctatcctggaacttcatctgtacactgtttcttagagatcttaaattgtgtttaacagaatggaagggaacctagacatcagagagcactctcagttagcaaatggcatcaccaaggcagagaaaggaagggacattcccaggatcactcaatgagtggcaaggctagaatggagcacagggctgtccaaccctccagactctgtggccgcttctgtaaccaattaaacatgctctgccctgaagcatttagcatctaagctgaatgtaacctctgggtgtctccttatccaaaagcaaggggtgtggccagatcatctccccacctaccccttagccccgatgactccatagcacaaaatcagaactgcaatccaccaacctggtatcagcctcccacagactgtgtgtttatgagctctggctcttgctgttatgccaggctactttcctcagtgagcagacacgcgataaatactgacaactgattggctgatgaatgagctcataaataataatgtttacagcttccttcctgaactcacagccaaagcaactccgctaaatggcctcttttcctcctttctttcctcctcggcttgcttataaattttaagatgcatcatgcaagatgtcagggaagcaattactttggggtttacccttaaaaaggaaaaaaaatagcaccaaagtccataggggaaaatttccctgaactaaacatgaaccagaaaatgtatacagactttgattacacatggtactccagggttctttaatcaaacggtccatcagggtgtcaagagctctttcccctggtttccaagagaggagaacacgatccttttttccgggcaggaggagagtgccagggacagatctaagggcagaggccactgacaaatggaaggtgaagtctgagatgtagacactaccaggacagcagccataatatgtggaagacccaggaccagaagagcctgtgtgtgtgtgtgggtggggggggggggtgtataacagcagaaatggatgctattcatttaatttggataccaaggattcatgcttaggggcttggaataaagcagatacacatctttcttctaagtatagaagaaaggtccaagtaggaggctgagacaagcgggtctaactctccctaaagatatttttcaagaaaacttttctcctctatattaacacgatgcaggatttatttctgttagtgtactagataatataatatacatatgcatgtgtgtgtgtgtgtgtgtgtgtgtgtgtgtgtgcatatgtgtgcctgtatttcagagcatataacccaggctcccaggttcccagaagtctcctagaccccatagataatgcattttagtgccagccatcatcacgaatactcagtgatggaatgaaaattcctatccagtttatttgaccacaggtagacgatggaggataaagtatcatcagacgatagaattagtaagggaaagaagtcaggtaatgggtaatttctctggaaactgacaatttcatttcttctagtcctactcccccagtgaaatgagaagtcagcagaggcccatgagatagatttcaggcaattcaactaaatctgtggacccagtggaattttgagcaacgaagaaccaagatatctgttccttttaacatgacctggcttgccacccagggggcaggcttcccactgacggctcttccaagtcacctccataaactcatcaggccttgcaaagttgcatttcccctcctcattccgaagacacaaatcaatatacacagaagcacttatgcttggttcataaaatctcctgtgtaaatgctggaaacatttccatgccaagcctgatgcaggctacttccgacaacagccagtattaccgtggtgtgtgggaaccctgggaaaggagagagatgcaaaaccatggcaaaagccactgctgaacctagtgtcaagccaaaagccaattgggttggaacaagacagtgcccatgtccttgtgtgctttaatatggtaagagctagggctttcttaatatggtgaaaattccagaggggcataaggtgagtcagctgctcacacacagataaatgcctggacaagtcctgccaaggttggccatcaatggtagataggaaacaagctgctcccaactcagtagcccaagcatcactgaagccacagtgaacctcctccaccacctctacaggaaagtatgagcagatatatgggcgcctagaaagaagaccccattctgtcaccccatgggcaacagattccacagttgccctgagaagatatccaaaaacaaacacaatcagctcaatttagatgcaaaagacaagggggaaaggatgctgggagctggaggaggcatcctagcaatctatttcgaggggctcttagcacctgtttgcaagcacagctctcaaaatagcattcagcaacaagtttctgaaatggcaaatctacagcttcttttccctgcaagtgctttgtcatgctgatactctgacccaagaaagcatttccaaagagcctgcgggataaagcggagcaatgttgaacatgtctgcagccactgcagcggcagcagcagcccacggtgcaggggaggctggagtggacgctgcccgggccccacctcctgtctgaacactcaccatcagcaggccgagagctgagtcgggcaccagctgcactgccatggtctccgattcccatgcacgaatcctgctgccgagtcagtcctcctgggccccgggtggctacagagcatccaaaagcacctgcagaaaaagcagccaaaatccagacttagggagcaaaaggctcaaggggaagataggccacctttcacacagggtggggaggaggtcagggaagacagggtgggaactgtgcttagggaggaaaaaaaaaaaaagaagaaggaaaataggaagctgcaggttatttaaaagtgagccctccctagcttcgcaaagcggcacagacagggagaccgcatcaaacacaaacgtgaaagcttagaacacggaatgtttaactgctaccttcgccctggcagcaattcttcctttaactgacaattaaaataaaacattccctattgcagataaatcaagcagcccgagccaccccctctctctgcatctctcagcaattctgctgcataaacatgctgaatgtcacaacataccgctcgcaatctggtcagtgtcttctttgctgcagataggtgtgtccctttttgcaaaatcagatatctgggagtgagacagccgagtctgaccatgaggcaccaggcagtcactggagatcagcaaatgcccttaccatccccgaggaggaagtcacttaggaactgacccttccaccttccccagatctacttttcctctccaagtagactggccagctcagctcccggtagggctaacatacttaagaggaacatggaattgcactgcctgttctgtgagcgttctgatctccctggctgtaccacatgtacgccgcatacagacacactctacctctctctccctcccttcctcccgcccttcctccctcccatcccttccctcccatctctccacagggctgcctgttaggaattttgaaggagcctccctagttcagggaggcataggaggtgaatttgtcacaagggacactgcttaacaggaaaaggcaagttagccttgaaaatcatatcatgcagcattttccccggaagatgtcaatgaagggagaaagaaaaaacctgccgaatcttgttatataatgggtagctcaaagggctttccagagtcaaagacttaagaaaattagatatcttttcatgagcactgtcaagcttgtatcttcttctggagtccatgtattcaactaaaaatggttattcctgatacttctagtatgtccttttctgatttcttcctttactcacctcctgtaatggctccaaaaaatcctgaaaattaactagacagtgtgaaatgtagaaacatagagaacagttttcgaaataagaaactagggggaagaaattaatgacctttcatgttcctgtgcacgagcatagctactgttcctttattacttatacttttaaaactattgatttgggccaggtatgggagctcacacctgcattcccagcacttctgggggttgaggcaggaagatagcttgagacccaaaattcagggtgagcctaggcaacatagcaagacttcatctctacaaaaaaaaaaaaaaaaaagaaaaatagaaataaaagaattagccaagcatggtagtgtgtgcctagagtctcagctacttgggaggctgaggtgggaggatcagttcagtccaggagtttaaggctgaagggagctatgactgcactcctgcaatccagcctgggggacagagcaagactctgtctctaaaaaaatttaaaaataaaaagtatttgctcatcacagtgcttagcacagagtaagtactaaaatatattcaataaatgagtgaaggctgggtgcaatggctcacgcctgtagccccagtactttgggaggctgacgtgggcagatcacctatggtcaagagttcaagaccagcctggtcaagagttcaagaccagcctggtcaacatggcaaaaccctgttctatgaaaaacacaaaaattagccgggtgcggtgggcacccgtgttcctagatacttgggatactgagacaggagaatcgtttgaacctgggaggtagaggttgcactgtggtgagatcgcaccactgcactccagcctgggcaacagagcaaggctctgtctcaaaataaaaaaaaaaagaaaagaaaagaataaaacaaaataaaataagtgagtgaaaaattttctcccattttgtttttcctatagtggcccaatgagcttgaaccttgattccacagtgtgtggatggagtctcatgttactgatccccggaacaccagagcaaccctccttgccagcaggtgcctggagattcaaagcatgacttgagtcgcatgcatgtggccttgcacagaactgtcaggacattctgactgtgctggtggattgcaatactattcaaaataatatgtatagtcacatttgaaaaataataacaatgatttaaggaacaggtctataatagtgatttaagggaccttatcctaacttttcagatggatttctaaatgtattcaactgatatttgcagaatgccgactttgtacctctgccctcaaggaactttttatctggtagaatcattaatgatacaagataatatgtaagaaatgcaaaaaaaaaaatcccaaatagtttggatagcacagagtagggagggcttaccatttcttttttttgtagcttttgcactggaacttcaggaacagcagaacatctttttcaggacatttgctttctgattctacatggactatgtgtttggaaaataaccaaagctaagaaaaaacgttaatattggagctattgcaactggtggatatgggcagagaaaagacaaaccctgaggagagacaggcaggagcagcctcaggtatgggacagtctgggacatccttaggttgcagaggccggcctgagagattttgtgtcagcccttgacgttggcccccagaacacccgccttcctctctcagcacttcactcatggctcctttgcctggaaagcctcatcccctgtctgcttgaattgcagcccagattttctggaaaatagcctgcagcaaatcttctgcaagaagacatcattgggaggtgcaatttcagggtggcaagagtgggggtgtggggaaggtgaggcagggatggaatgagagcaggtacaaggtggggttgaccaaagtgggcataggacagctactcagtcctgaggaagagcttccagacaggtatggaacttccagtttttggcataacccatcaaggagacgaagggagagggagctaacagcctagtgctgtccattagttgactctttttggtcaaattgattccatcagacattaaccctcttgcgcttcagggttatgttaccaactcccgcaggtaggcatgaaaggcattgcatctgagcccagaagataaggaagaaaccatagcctctgtgagtcagtcagacaggacctgggccctggggtggtgaggctcctgcctcagtgtgtgggatggaaaccctccctgttctgtcctgggaggctaggacagctagcagtgccaggaattgaaatgacaatggcagcacctgggattcccaatgagcaagtggctcaatttgcccagggaagacaggaggagccaagtaaatctgggaaacacatacactgagtctggtaacagcatatacgttcacacaacattcagtgtcaaaagttgcatacttcatgaaattcttcccaattcctctatttgggcattcatagttgctttgtttgtacaacttttaaattccttctttaaaaaaattggcagtgatttgcttttctctagtatccccctactagagaggaacaaactaatttcggaactgagcattgctcttctctgtttacttctacagctccaagcatcgagctcaaacagcagcccatgctcaataagattaaatcaggcaccaatggagatatcaaaatgtaaagcgcaaagaggaagaggcaatggcaagacctcagggagtggataggacatggggagtttgtgaggacaggtcacaggctgatggagaaggagttgtcaaaggaggaaaaggagaagagagctcccaaattcgagtggcaatggtcattccacaaagatgcctgggtggggtggaagggtgtttcagtacagtttcggacacagaaatcgaactgcaaggggttatcgagcagcttgtgaggaagagaagttaattcatattaaataggccctcatcaaaaagcagtggaatatgagctatccaggtcctttcaagaactagttcaaggtcacagaaggaagaaggtgtggggacagcaatcccatcctctgagtcactaaactcgattcttggttaatcttacctcccaagaaagctatatatatatgaaatccatttcaatgtatcctcctttaaaaactcctcaaatgaagcatagttcaatgtcacacccatcgcaaaaaacagctcttcataaacctcttctgggccaggtgcagtggctcatgcctgtgatcccagcactttgggcggctgaggtgggtggatcacctgaggtcaggagtttgaaaccagcctagccaacatggcgaaaccccttccctaccaaaaatacaaaaattagctgggcatggtagcacgtgcctggagtcccacctacttgggaagctgaggcaggagaatcctttggaggaaggtgggaggtggaggttgcagtgagccaagtttgcaccaatgcactccagcctgggacacagagtgagactgtatctcaaaacaaacaaacaaatactcttctgtatttagcgtgaagctgttgttcagacattggccatgagaccacccactgccatctatataagttgccccaggtgagaaattcctctcagaatctagtacaaaggaaaatgtcattatcctgaaagagcctgtggtgtgggtggctttggccccagaacacctgccaggccattttactctcaggaatctgaaggcttattctgtcattttctctaggatcccgagcaagaattacaagggtgaggtgagactcaaagaaagtattatttattagagattttcttaagttgcacatagtagacattcaataactgtgagttctcttttggtccccttttaattctgataatgagaatagtgtacctaatcacacttggcacactggacttccagaatgcccaaaatctaattttactttcaatgacagcagatactatcataactggcattattacttccttcttttctttcaatcttatttttccttctaatgcatactctattactcttattgagtaggcctttttgtcagtaagccatctgaaattcatttttagtaagagatgggacataaatcactcattaatgtatacactgtgctcaagtagatttggcacactgtgaaatattttgcagctattaaaatggcaattatgaaactatttagaagtattgcaaatgtctgagatatgtttatttgcaagtaatatgagacatattctctaattgcaaccatgtaaatatttgtattttaagaatatgtgaagaactcctgcttctatccaagatggaattagagggagcaagtctacacttcacatgaaacaaacaaaaaatgtaaaatatacggaacaatacttttcaagttaatggacataagacaacaaatgccagtgatccatgaaagataagaaacaaattagagaagccttacaattgtcccaggttattgaatcaagagtatttccaggctacggaaccgagagtggagctacgtggaatcaagtgttctccagagtcatggagacagagctgagagtcaggaaagattgggatgaacacagttcacaagacagagcaccaaagagaagacaggtgtaaagagaaagagaacttctgagatcttcaaagagtccccatgagcactcagttgagtgctgatcaccacatacatgtggggaagccactcaaggctggggaaagaaccacataaaaagattggaaagaatggtgaccagtgctcacccagggccagaacagtgtctgctcacatccgccagactggagaacttcataattcctaatacattattagaacactcagatggctcttgcctcaacagtgagaaataattggtcatagattgatcactgtcctgaatctgcctaaccattctgaaaagtaagacccaaaaggattaaactatttccacgtaacttaactggattccaaacaaacttaaagaacatttataaaattacaaaaatatccaactctcaatgaggttaaatctataatgtaaatttacattgtgtataatttacatgtagatttataaactagaatgtcatctgataaaaattaccatgtacgaagaaagtaggaagatatggtcactaaatagaaaacaaatcaatcaaaatcatccagaatgaacatagatgttagagtcagcagaaaatattaaaacaattattattgtttaaataacattaattattaaaacaattttgaatatattgtattcaatatattcaaaaagttaattagaaacatggaaaatatttaaaaattcgaagaacaaaataagcatcagtcagctataggacatcttcaagtagcctgatagatatatcatttgtatccttgaaaaaagagacacacagaaaattgagttgaagaaataatagccaacatgttcacagattatatgctgaacaaattctaagcattagaaacatgaagaaaactacaccaaggcacttcataatcaaattgctcaatatcagtgataaagagaatattttggaagcaaccagagaggaaaaacatatatcacgtacacagggacaaagataagggtaacagtagatttcttttttggaaacaatgcaaagaagaatccagtagagcagcgttcttctaaaaatttaaagaaaaattatcagtataaatttctatacctacaaaactatctttcaaaaatgaaagccaaataaagattattttagacccacaaagtaaataaaaggcaaaccaatttgaaaagaagtaaaaattctcacaaagaaaaccccaggcccggatagatttactggtggatcctagcaaagatttaaggaagattataccaaatttacatacattctttgggaacactgaagaggagtcaatacttacgaactcatttttgtgacaccaatactaccctgttatcaaaatcaaagacaataaaagaaaagaaagcaacagatccttgtccctcataagcaagaatgcaaaaattttaaacaaaatgacaccacatagaatccaacagtatattaaaaagataatgcactgtggccaaccagtccatattccaggattgcaaggttagtttattattctaaaagcagtcagtgtaatttactatattaactaactaaaaaagaaaaaccatgtgattagctgaatggatgaataaaaagcatttgataaaatgcaacatctattcctgatcttttttaaaaaaattcagcaaacatggagtagaagggaacttccttaatctgataagcatgtacaaaaatgtatagctgtctgcataattaatgcaaaagattgaatgtttttcccctaaaatcagaaacaaggcaagggtgaccattctcagcacctttcctcaacattacactggaaattctagacattgcagtaagccaagaaatgaagataaaagctatccagattgaaaaagaaagtaaaactgtctatagtcatagccaatatgatctttcatataaaaaacccgatggaatctattaaatgctaataagcaagtttggcaaagttgaaggatgcaaggtcaattcaaaaatctattgtgtttttatatagcaacaacaaataaaaggaaatgtaaatttaaaacacacttcacagaaacttgtacacgaacatttgtgtcagctttatttgtcatagtgaaaacttggaaacaacccaaacatccatcaatgagtaaatatataaacaaattgtatatatgtataatgaaatcttattcagcaatgaaagggaatgaagtactagtatgctacaatacagatgaactcaaaaaatattacgtaaatgaaaaaactagatgcaaaagaccacacttcgcttatgaaatttacatgaaatatatatttaaaaaacccacacccatggagataggtgattgttacctgaatccacaaggggaagcagggagtggctgcaactggccacaaaaggtctttaaaagtgttctaaaatcgcactgtggtgacggttgcagagctctggaaatttactggaactgaacggtatgcatttgcaataggtgaattttatgatgtgtaaatcatacctttaaaaagctggagtttttaataaaaatgaatgagttattaatacagtcaacaatgtggatgaatctcaaaataattatactgagtgaaagaagtcagacaaaaaaagaattcataatctatggttccacttatgtaaaattctagataactcacactaatacatagtgacaaaaagcagatcagatgcctggggagcaggaacagcataagagaaacagggtaggagggggcagaggggagaaattacaaaggggaaactttgaggcagtggatatattcactatcttcattatggtgatggtttcacggctatatacatgtgtcaaaacccatttaaatacgtgcagatgactgtatgcctactctacctcagtatagtggctctttaagggacatgaacggtaggataactgcaaaaaaaatacaattagttgttacaacgctgcgagtaagagtgattttcttccttccttcctttctttctttctttctttcttttttttttttttttttttttttttgatggagtctcgccgtatcgcccaggctggagtgcagtggcgcaatcttggcttactgcaacctccacctcccgggttcaagcgattctcctgcctcagcctcctgagtagctgggatcacaggcatgtgacaccatgcccggctaatttttatatttttaatagagacggggttttgccatgttggccaggctggtcacaaactccatacctcaggtgatctgcccacctcagcctcccaaagtgctgggattacaggagtgagccactgcgcccgaccaagaaagatattctcatttcaaattgtttaacttgtcgttacattttcactaattaaaataacaatgtttttagaaatagcttatttttcaaataagaaggaaggcttggaaaaccagcagagtcaagggaagatgctgttgtcgttggtactgctgctaagggcagaagagccctgggtgtgttttaagacacaccaccagaagcccgtaagatgaaaagaaaaggcttctgtaaggagaattctgaaggagaacagaacccccagcggaggaattattttccctagggaagcgttttgtctcttcccatgagatgaaaagaaaaaaaaaaaggtaaaaatgcaagaactgttgataaatgtgaaagggtgtaaagagagatttttttttgagaccgagtctctcactgtcgcccaggctgcagtgtagtggcacgatcttggttcactgcatcctccgccttccggttcactgcatcctccgcctcccggttcaagcgattttcctgcctcagcctctccagtagctgggattacaggcgcctgccaccacgcccagctaattgtttgtatttttagtagagatggggtttcactatgttggtcaggctggtctcgaactcctgacctcgtgatgcgctcgcctcggcctcccaaagtgctgggattacaggcgtgagccaccacgcctggccccttgtaaatagagattttaatctggtaagaacttgcaggtcccttcattcaaagtcttgatctcatcagaggctctgtatgtttctgttcccatcttcttctgccttgaccatgataatggtagaccctggtagctgctggtcccaggttgatggcttgtgccctccagcatcctctcccatgccaggcccttcacgcggagttgctgcctaacatgactgcagaagattccagagtggatgcagaaaaagcccccaagatgcaagacggaatctgctctacacacccagagctctgggatctgagatgaaactgaccaggaaagatctgaccacccagtacaaagcctggctgggccaagtttctctgggcactctccctattgctgtctcagagccctcaggccaggactggacctatccccctgcagcccagccccaggctgaaacacctgcccctctgaagtagagctgcccatggtagccccactctggtctctgcggggactcctaggagggtcagggatgcctgtggccagcagactcagctgtctcagctcagagtcaatgtaaaccagagtgaggaacccactggtatcctgcattgtcccaaggggacctggtatttgcagccttcaccggccacatccttgctggggcagctggactcacatagctgcttctgcccatgtcctctgccaagcactccagtctcacccgactccaaccctggccccaaaccctaggtcatgtggctgtgatccaaaagccctagcgagctcttgactcttctggcaggctgcatcctcttctgtcctcattttctccagccccttgtccagctactgaccactgtcctgctggccaatgacctgtcctcagatggcaacatctgctgggggcaactcagcttgatggctcccccaagacctagagtcttgcagctcaggtgcctccatgcagcgtgacaacctgggtcaactttcccagccccacacgccccatgactcctgcctcaagaacccacagaacaaaggtgtcaatagacttgaagttcatgcccatcccaatgctgaaaaaaaaaaaaaaaagaaaagaaaaaagagtgacactctctaagcaagtcaaagcatagaaaatgctccttcgatacatttttttgcaacacccaaacatctcctaccgatctgctaatacagtatgtcgatgtttacatgagttcttcaatgttaacttttgaaatgttatacaaattacaatccaggtttcttcatctagactcaactacctttctcgatgacattttccatattcacccataggtaaacatattcctatatttggatcatggggaaaatgtcatgtcctatttcttctatttttctactttcctatctcagattcacagtaagcacgaatctgatttatgcatcagattattaaactattgattacttcatcatcattctccagtttgtaaacatgtatttggtttctagttattgttcatgattacaggtaacccagagctaatataatgcatctttgtacaagtagtacttatctccttttaaattgttttcatataaaaacttcgctgcaatgggtttcccaaaataaagctaaaaatattttatctgtatttatttattttttttttgagaaagagtctcgctgtgtcacccaggctgaagtgcaatggcacaatcctagctcatggcaacctccatctctcaggttcaagcgattctcctgcctcagcctcctgagtacctgagactacaggcatgcaccattatacgcagctaatttttgtatttttactagagacagagtttcactatgttggcctggctggtctcgaattcctggcctcaaatgatccacctgcctcagtctcccagtgctgggattacaggcgggagccactgtgcctggcaggtaaaataatttaatgctacctaaaacattgttctactgaaggaccgaactcattaataatgtcactgctagtgcagaaggcacctttccttcaagattcacaaatgcttcccccagatttgggcttatttaatagatgtgaaatttacttcactaattatttaatttctatttctttccttataaatgatgtgaagtaatttctcttttgtgtgacttatttgtgtatatgcgagtatatttgtctactggagactgggggttaattttagaaattttatgagctctatatatttcatgtactaagtctccatctgttgtaaggagatttgaaaaatgtcagaaactctgaagaacatttggtagcactgcccagatgacacttggacttcctgcagtttcctaaaatattttattttgctactattttgtctttattttaattgtgcaaatgtttaaattttactcgaacatctttgtccattttttcttcaaaatatcttcaataatgtaacctggtttctccatttggttacattaactatttctttgtgtaagatttaatttttattgtaattctttgaaataatttttgccatattgaaacaaagttattccagtagcacgtacaaaataattatgtcctttatgatgttactatactcatttgccatgttttcatatgtacttaaaattattaattcatactctattttatttccgtggtctgtatttctccttctaatccagtgttacactggttcagttactgttgttttttaacacagtctattttgtgagataattattattctttcattagccctctaatattcttatctatctttcccagcacactgcagaatcaattattctgaattctataaaatgccaatgatatcattgttattttaactgaagttatattaaacctacaaattaaaccagaaataatggcaacttccatttgatctccctacccaggagtagaacatatttctctgttttcaagcctttttttccccattaaaattttgcagacttctttgatacatattatatacccttacataagtttaattaatacataattcaattttgtggctattataaatcagaagtctcttgttactatagttttggctggctaataaaggcatttgagtatccaactgatctgttattgtatcttttgaacagcagtttttcttcgctgttctattatcccaatagctttctggttgattcctttagctcgtctaggtgtataatcacatagccttctaatagtgttccttttaaatcttatttctttcctgtactttattatgctgccgagaaaacataaatctctataaaataatcattgtgaaagttctccctccattcttcctgttattcatgccaaaaagaaactttcatttcatatttgacctgtcagtaaaacctgctgacgcccccttcaaaatagctctgtaatccagctcctctccatctcccctctaccaccctgagctcagccacccaccactctcacttgggatgattgtgctggcctcctaatcataagtcaaagatcactagaggatctgtgagaacttgtcagatattatcacacttctgctcaaaaccctccaaagtccttagagtcccttgcaaagtcctgtatactctgcctcctccacctgtccgactttacttcctactgctcagcatcaggagacttttctttccagccacaggagactccttattattccccgagcacagcagatacattcctgcctcagagcctttgcactggctggttcctttgcctggaaaacccttccctgggtatctgcacagcctccccgcttacctcctccaggtgtttgctcaaatgtcagagtttcagtgagaccttccctgactcccttatttaaatgtgcttcatcttgttctttgttccctaagcccttcctcttccagtttttcctgttgtacttttcaccatctgacattctatatacttgtttctcatctccctatcttttttccatatacataataaactaaactgtaagcttcagagagcaagggtttctacctgtttttctcattactctctccttggcattagaaaatagatgctcaataaataattgtactgacggaaagcacacctatgttttcatcaggttgcaggtgagctgctctgaaatatctaaattcagtgtgatttttatctgtgatattaagtggacctttttatcatattgacgaagaatatttttatccccagttttcatgggtgaggttaggaacaggtgctgaattttattaaacactcatcaggcagatgtcatcttatgtaccatggcatcctacagaggggtaaataggtcactaaagagcctcttccttcagtaattaaataaagtgtgtctccagggatatacctaaaaatattggatgtattgttcagctgggcttatttccttctcgtggttacaggccaatggttgatacaccagagagcaagaagaagaaattctaatgatttaaccaacatgaaaattaagcaagatgagaagataccttgctgacatatttcaaattgacccctgtgaatatgtttcatctattcgtgtctatagcactgattaatggttgtgtctggattcattgatgggagttccaattatcaacaacgacttttatgcagacaatgtttcattgtcatattatatagcctagacttgtcatttcttttcatctctttgattacttgattgttttactaacatttggaagtttctctattccctatattcttacaaataatagactcacaggtaagaagaagtaaaaggtaaatttattcatttgggctttaattctaacatgcatctgtgattctagcatggaaaacacaaatattttaataaataaattacattaatatttgtctttcagtggtaaaaatctgctgtttaccctaagattctgaagacttagaatttttgtatagtttttatactttcaatattcaaaagccaattgaaattttaaccatcagaaattcagatattttgccaattttaggtagtttgggttcatttcatgtcaatacagtctttcactatccaaggtgaacattatgatcataatttgtttcaagttaaagttgtgttcacaatacgtagcacacaaacaaacttctttatcatcttttaagtatccaatggaaatttgccatttaaagaaaagctaagcctggcaaacaccacctcagctgggtgtatcaaggtcaaaccaacagcaataagtcttgttggcattacatacctttaatacaatacgatgaaaatggcacaccacctccgtgatctttctccccaaaacccacaaccccagtctaagaatgagaaaagcatcaggcaaatcccagttgagggacattctacaaaacacctgggcagtattcctcaaagctgccaaggtcatcaaacacaaagaaagtctgagaaagtgtcacagccaagaggaaactaaggagacaagaggactaaatgtaataaggtatcctggacaggatcccagaacagaaaaatgacattaggaaaagagtatggacttcagttaataattacacattaatattgcttcattaattgtgacaaccataccttaagctgtaagacattaaatataaaggaaactatatgtagagtatacatgggagctctctgtactatctttgtaattattctgtaaatttaacattgctctaaaatgaaaagcttattttaaaaactagagttgttaggccgggtgcagtggctcacacctgtaatcccagcactttgggagtctgaggcgggtggatcacgaggtcaggagatcgagaccagactggctaacacggtgaaaccccgtctctactaaaaatacaaaaaattagccaggcgtggtggtgggcacctgtagtcccagctactcgggaggctgaggcaggagaatggcgtgaatctgggaggtggagcttgctgtgagccgagatcacgccaatgcactccagcctgggagacagtgagactccatctcaaaaaaaaaaaaaaaaaaaaaaaaaaaaaaaaaactagagttttaacatggctgaaacttggccaatgtttttaattattgcggtgattagttttcataattgatgatgaagatagtttgaaacctgtatgagaatatttgaataagatattttataagtaaataataatatgcactcaggtaaatgacaatatgcattcagatgacttttccttcaattttgtagagattttgcggtcatctttggctcgaattatttagatgattgtctcaatattccatgctgtttatattttgaaaataacctatctttataaaaacttgaacaaagagatggcaaatcaaaaaaagtaagagagcaacattggttttaactgataagtggaataaataaagaacagataaggatcctactcaaaaaagaatgctgtgataaatatttttgaaaactgatcatctccttgtaacacatacaaccactggattttttctcttcataaataccgacttctgtgcactatgtttatttaaggtgatgtgtatctctacaaacagaagactataaagtatatccactggtatcaaaccaaaaatcaccctagaatgcaggggtcaccagccaaattaccacagagatcagagagctctgggcctatttacaccatcagaaacagagcaccagccagaaggaaaacatcctgcacctgagaactgatgataaatccatcatcatcccacaggagctaatgcagttgagcccaatcagagcaacaagctgaacgaacatgaccttatacatgaagtcagcctttttactcatcaccctagctagtgtcaaggcagaaaggtcaagcaaagagcggggagcaaagaaattttgggatgtctatctcagcattgctacgaagttgagaggacaaatcctcaaaccgtgactctccataactatcttgcagggtgtacagaccctcaaggagcattgtatttgtctgttttcacactgctgataaagacatacccaagaccggacaatttacaaaagaaagaggtttaatggacttacagttccacatggctggggaggcctcacaatcactgtggaaggtgaaaggcatgtctcacatggtgacagacaagagaagagtgcttgtgcagggaaactcccccttataaaaccatcagatctcgtgagacttattcactatcatgagaacagcatgggaaagacctgcccccatgattcaattacctcccactgggtccctcccacaacatctgggaattcaaggtgagatttgggtgaagacataaccaaaccataacaagcatcaagaccaaacactgcctagcaaggtttaatataaaagagagttcaggggaaggaacaaacctcaggagttatttccagaagtctagcttctatgactatgagcaaattcatcactgacttgctatgttttaaagcatgtttatattttaaatatggacaatattgactgggattggtggctcatgcctgcaatctcagcactttgagaggccaaggcagggggatcacttgagcctgggagttcaagataagcctggtcaacatagtgagaccctgtctataccaaaaataaaattagccagatgtggtggtgcacagttggtcccagctacttgggggcctgaggtgggagatcactggtttgtgagttccaggctgcagtgagctgtaatcgtgccattgcactcaagcttgggcaacagagtgagatcttgtctcaaaatatatatatgtgtatacacatatacatatatgtgtgtgtacaccagtatacatgtacatatatacatatacacacacatatatatacacatacacatatatacacacacattatttactaatgtaaaaatataaccatattagcgtttcatagggatagactgaatgtgatatttctactaaagtcctcaggaagaagtttacctacaaatactaaaaatattaaaagagaaactagttaataaattaaccacatgcaatataggaaaattttccattccagaatatttttaaacacaaaattattcaagtcacatggtttaaatactgacggctggggggatagggtgggaattaacctaaaaatacaaataatccaagagaaaagaactgcaacatagctttccgcattctctcctaaatgttatgacaccatctcatgaaatagttgccgtaagtgttttatttccacttttgtcacttgtactttcatctccattaattctcatcttagcaatgatttcttccacggctgcccatgggcaggcccagtgttagcatggagtttaaatgttgtgtttctgcttgagaaacagtctaaccagctgctggcagccagcacctcactccatctcttagtttgcaacaagaggggcctaggagactttgagcctgtcccaaggcaagaacagaagagagttgaagaaagaactgctagaataagagctaaaacagcatttattacagaatggccaaaggtaaatcctccctctccccccattaggtttcccaaaagaaaacacaaatgcagcctaattagaccccgaaaaaaaatgcagagaatgtttgacataaaataattaatgccaaacgccgcaaagcccaataactaggtggtaacattcaggttcctccattcgtttactgtgaaacagtcttaaccacacggttatgttacatattcatgttcctatacatcatgtgttaatatacagcaagagaaaatatacaaatgctgggagttctactttaattaccagggttttgcccatttagtttatagctgctgttggggataggtgttgagtacgtggatagaatgtgattaagactaattttacataatatctaagtactcctctcatttttccaccaaagtggccaaacacatctcattatgtcccaattatctgcttataaaggctctataaagcctttcccaggctcacacacttgctaaacagttttataaacaagattagccttccttttagaatctgcaaagtgacaacttctccaagtctcaaaagtccattccaagaacttcatttccatactgggtcatgcaactgcttcttcccaggaacaccatggctattctgtatgggagagagctgaagagctctgggcaggggccactgcccatcagggggtgtgctggctccttgcccgggacaaatcccttgtgacagcctctaatgggaggcaggaggcagggctgccagcagggagttgcatccacaatggcttcctgcatttaaactttggaaaaacaggggactaatagcctctataagaaaagggaaaaaaaggatgcggagtccttagtcctggccaggagtgtggaaatttaagcagcctcccttttgctgctgcaacaaccagtcctatgcttccgaccccttctagtctcagtatccaaatccaatatcttaccccaaatatagaaagaaacactggcccaaaggtccaaatttaaaacccactgatgtcctggtagacatttggcaatgaggttattagaaatgtaatgtaacagattttttaaaatttgctccattctcctccacttttttttggtatgggctcctgtagttacaggggaattttaagagcatatgcggtagacagaagatgaaattagtcggaatatctgtaaatgggattgggatcaatgcactaaatgaagctgtctgtgaggttgctcagctttctcaagctcgtagctggtcagtccattgatgtcttagatggtgtattaatcaaggttctctagagggacagaactaataggctagatgtagatataaaggggaatttatcaagaagtattgacacatatgattgcaaggtgaggtcccacaataggtcatctgcaagctgaggagcaaggaagctagtccaagtcctaaaacttcaaaagtacggaagccaacagtgtagacttcagtctgtggtcacagggccacaagttccaaagttgaagaacttggagtctgatgttcaagggcaggaagcatccagccggggagaaagacggaggctggaagactcacccagtttagtttttccacattcctctgtctgcttttatcctggccacaccagcagctgattagatggtggccacccagattgaaggtagatctgcctctcccagtccactgactcaaatgttaatctcctatggcaacaccctcacagacactttgcatccttcaatggaatcaagttgacactcgatattaaccatcacagatggggagaatgagtctaagaggaagggcaagagggtgtcctcaaggtgaattcaaaaaggtccttaaagaaagagggcccctagagcaagagaggcagtggagcaaactgccagttgaacaagttagactgcctgcttgtaccccacttctggactctgacactcaaaacacagaagttcccccgaaaaccatctgagtaggtctgctttaaaacaccagcgcatgtgctcacaactggttcatattccatttgtgattttgtaaatagggtgtgatgattgtttttctgtgtcaacttgacaggcctaagggatgcccagatagctgctaaaacattaattctgggtgtttctggaagagaccagcatttgactcaggaggctgagtagagatacacccacaccaaggagggtaggcattatctaatctgttgagggtcagaataaaacaaacaaacaaaaaaaaaaaattgaagaagaggcaaattctctctacttgacctgggacttcccttggacatctgagctcccgattctcagacattaatgaagaggtgtcgcggtctagagtaataccaaggtttgtcatctcatgccaaggaaatcgagtacgcggacacaaaaagtgggtttaggaatggaggtttaataggcaaaagaaagagaagggaaaacagctccctctcttccaagagagaagggcaccgaagtgggaattccagcccaccccagggtgcactggattttatagactggcttcaggaggcagtatcagatttacacagggcccacagattggctggagcttccccgagctccctccttcaccacttacatcacgtaacctatgttgctgtgcatagttatttattaacctgcctacgcagcccaccaagttgcatatgctttagcagaattaagctttctatatcttatgtgccctgcagtgccctgaagatgttgatttcaataaaggtttgctgaattaacaaacacatgcgtactatggacagacactacttgggaggctgaggcaggaggatcgctggactccaggagttcaaggctgcagtgagctatgatcatacccctgcactccagcctgagtgacagagcaagattctgtctcttaaaaaaaaaaggacagacaatgcataacccaaaagaatgaaaagaaagatctctaatgggaattcaatgtcgatgatacctgagtgctgtaaagaaggactttttatttgtttgtacctagaagtattttcttgtggatcccatcagtttctgcagacatgcataaatttttaagcattctttgaaagggacttgagggacataaacaacaaaaatactgaaatcactctttgcttcctgggatataaaacataaacataactgattttctctgttcttcttttatgttgaaatttgacattttatgatccgtaatcacaaatcacagtacagcataatttgtcttcttctaccgctaacttgaattgccagcaatgcaagaaatttcccaaccatccggcctaccagaatcattataaacttttatgacatggccaggcgcggtggctcacacctgtaatcccagcactttgggaggccgaggtgggcagatcaggagatcgagaccatcctggctgacacggtgaaaccccatctctactaaaaaaaaaaatacaaaaaaattagccgggcctggtggcacatgcctgtagtcctagctacttgggaggctgaggcaggagaatggtgtgaacccaggaggcggagcttgcagtgagccaagatcgtgccactgtactccagcctgggtgacagagcaagactccgtctcaaacataaataaataataaaaataaaaaataaaaaactttaatgacagaaaattctttctagatcaccttttgtcccttcatgattcttgtgtcaatatatagtcttaatctgttaccatcacattgttatagatggcttcaaatccttattctaaaaaaaaaaaaaaattagagaaaattattcctgtttgtccaaagctttataaatgcaaattggcatatgaagtacagagattttttcttttcttgagaaggctccttctgctttatacacacatgagatctcattcttaattaggttttagcacgtgaacaaattttcccttatataaacaaagttaatagatgatagatagatcagacaggtagggaagcaaacacacatgtttggaagagaggattaacataaattatgattcagtgtatattcattatatcaaggcaaaattccaattaatctaggaaaatgccttacaggtggtgagatataacttaggcatgaaaaaaatggaaggcaaaagactgaccagatggaagttatccaggcaaaaagagaggccttcttgaagggtcaaggagggaagagtgaccagctctgaagccaggtgagtgggtgatgacagatgggtaccacgagggaaagcaagccaaacagttttagtcttaatcattttaactcaattatgtgtattaagatcattaaagattcatgccggtgagtaaggattcaattactatagacattatgtcattcattttgctagcacttccagtagaaataatgtttatatatcatgacatatgtgcaattatggacaaatataatttattcgcatacaaaaaaatccctatagcttagtagtaaattatatttatgatttagctatcataatcatgaatgtaactgtacacagagagagagagaagggagagggctgtggggagatcccacagatactcatgcgggtaggctgagatcccttctgtcgaaagatatagaaagtcatgttacaggtaattcataagaaattaactatgttttggttttgtttggttggattcttgtactgaagtttcttcacaacagaatgatatatttcccaacacttcaccatttaagaagacaatccaaagcctttgagccttagaaatcaggacttaccttatctgaaaggagtgaacagattctgttttcaaaagtgtaggctaccaaggggagataagagacttgctgaaaaagaggagagctctgagaactggaagacaggaaactggcccagcccaggaggtggtaggaattcctcaagacagggaggagggaaagggatagtgctgtccacaagtgctaggaacttgccctccgtctccacaaggctgcctggagatgggatggcaggggggctggacaaaaaacccatagcattatgagctgcagcaagggttccctcttgcctggtccaggcaagatctcagtgaggagcttcctgcaaccagtgtggctgtctagaaatcaggacagcaagggctccatgtgccagatgcagccatggcaacactggtgtacctgtcagggtgctatgattgtaagcaaacaatgctggccaccaaaagaggataaataaggagtatttcacagaatcaaggagaaaactggaaaccaggcctcagaaaagaaataataagaacagttcaggagatctagataaccagccatctccactctcctggggactccactgtgacaaagcattgggttccacccgttttctgtccagatgtcaagaacacagctccagttcaaactcccagaaaactgagcgtgattggcttggctgggttggtcacccacctattggcccagtagggcaggacacttaattgacaatcccactaagctatatacaattggggaggaatcatttcccagatgaacatgaggagctgctggctaaaagaagggagcatgctggcaaaaatgcaggtgtccactacagatggtgaccactgtgagctaaaggaacagcctcttccaatttttcccatactcacacaagacccaggatttttacataacccgttgtcaaatagggtagcctcctgaggacagctatttgtgatttatgataataatggcaccttgagctagttttaacctgatttcataaaacaatgaggcattgcttgtgcttgggctttgtggggaaaattcattcctactgtagctgctagtgatcttctgtttgtttcttcacatccactttctacccttcattgatacccagaggctgacctatgtggggtgcatacaggttccctggccctctgttttctgactgggttggcttattcaggggaggtaacagcttcatcttattgaagaggacttcattgcctcttgttggtatccctaacctccccaccatccccccagccccctactttacaaaaagtccctctgggagtttaacttggtcatactcccttgctacaaaactccagtgcagtagcctcccttgaatagtcttcctttccatattgaacaggtgtcatgaaaagttattatttaacagttacggcacctgcgatttggacagaatcagattcatcgccggattcccagacccctctctcagaactccaaatatgcacctttgaagcctttgtgttcactcctggtcaattgattggaaatctgtttgtgagtctgactgctgagccagtaatctcgaaggcagcccactgaagtacaagattcctgtcataaaatgcctgacggctcacactattcaccgaatatcctctactatcaagtcccaacagatgggctgcctgatccataatgaatgaaccacagttgaatgagaaaattgacttacattgttcaaaggaaagaagactgtcttttcttgaatgaggaggaggactggtcaaaaaagactatctttttaacctaactctagtcaggctcctctaagccctcagggaccctgaactgggactctgtccttctgttttgtccaggttcagcaagaatcctgctgcatttgtttagcaaaaatctccatggttgatatctgatcaattgctcatcccccaccctcaatattgaatcacactggcccatcttcagcaagaatcctgttgagtggatttagcaagaatcccctattcttgatgttttctcttagtaattttccatccactgaccccatcctgttccttggctggaaatatccacttgcccttgttgtatttggagttgagtttgattttctaccaactacaaaactccactgtagtagacccttttgacttgaataaaatcttccttgccatcttaaaattttgattttgattttgattaacactctgtaatgactccattggagtattccatctgtctcttgccaggaccctaagtgatacagtaaaaagcaaattcaggtcgagtaatcagaaaaccaatgaccaatgtgactcaaccaatcacaccccgttgtccaagtatgtgcccatctctccttttcccaagattaaatatgatcagggcagctgtgaatcggtgtttagcaaagagctcaggaaggccagggagcagctttcagtgcagcttgttttcaggagagcctggagccaacagtcataggagtccctaaaactccccagctccttacatcaaagcaatgaaaatgcagggtgagctcagctcacctgacaccccaaaaagggcgagatggctgctgggtttgggcactactgcaccttcatgctcttctgcaccacataacacggggccattgcaagagcacattgccaccccactggctgccaaaggctgtgtcagggccacctttgaaggtttgtgcccagttgcaatagtggaagagggtggctaggccacacacattacatatgtgagagtctgtgctagtgccaattagcagcatgtgttgttgaccctctttcaaagtatgcaacagtcagtagcatcaggagagagaaggtggagccaatcagaggtagattcagacgcagaatatcatgcagtgttattgttagacagagctgcagcctgtcccaggaatagaaccttgagaacaaaagccatagcagagggatgtggtgcttagaggtttaaagaatcgccttttgcctctaatatgctgggaagacagatgcaactgctgtctcgtagcttctcctacaggttggaaaaatagctgctataaattgccccaggcttttaagtcagagctctaatgtaaccttcatagccttcacaaagaaaagagcatgaaagagttaaatctcaaactccaaaactgctagacaaagagagagaggcagaacttaatgatatgccaaaagtagaaactatggagaactctaaagaaatgagggtgtctaaattcacctggagggttttctcctctagaaaaaggccagggcaggagagaaatgtcctcccacctctggcagatgctaagcctagctgacttgacatccaatcctgtttctttgagtgccttgcgctactacagagactcaagtgtcaaaaacattcctcagactctcctgcatctagagtcctgcatatgatataggttcaaccaattcagtgcatccatgacagacataaacgcagtgctagttacaaggagaaacgggaggtggggagcaaccacggtgctggctcagatcatggtagaggcaggatggctctgcagtcaggagtttcctgggttgtgtttagcctgtggcagaagcagcgatgttcccagtctcccaggatttacatatacgtgtaagggtggggcatggtgggtagggtatcaggctcagttgcagaaaacaaacttttctaactggtttaagcagaaagagatttgacatcagaatataagtggcttacaaaaaaatacttgggaggagtagaggagcaaatcccatgccaagttctcaggacattttcctgagtcatgaaaccacacattgtaataaatgacatggaaattacagcacaggacctaaagagaaataagagacaagaaaagaaccaagagctccacatcatatagtccttgcattggtttctcatggttgcgataatgaagtactacagactgggtagtttaaaaaaacaggtatttggtcgggcgcggtggctcatgcctataatcccagcactttgggaggctaaggcgggtggatcacaaggtcaggagatcgacaccatcctggctaacatggtgaaaccctgtctctactaaaaatacaaaaagttagctgggcatggtggcacacgcctatagtcacagctacttgggagactgggacaaaagaatcgcttgaacctgggaggcagaggttgcagtgagccgagattgtgccactgcactccagcctgggcaacagagcaaggctctgtctcaaaatatatatatataaattagctgggtgtggtggcgcttgcctgcaatcccagctgttctcgaagctgaagcaggagaattgctttaacccgggaggcagaggatgtggtgagccaagattgtgccactgcactccagcctgggtgacagagtgagacttcatctcaaaaaaaaaaaaaaacaaaacaaacaaacaaacaaaaacagctgggcacggtggctcatgcctgtaatcccagaactttgggaggccgaggtgggcagattacgaggtcaggagatcgagaccatccttgctaacacagtgaaaccccatctctactaaaaatacaataaattagccaggtgtggtggcatgtgcctgtagtcccagctactcgggaggctgaggcaggagaatcacttgaacccaggaggcggaggttgcagtgagccgagattgtgccactgcactccagcccgggcgacagagactccatcctccccaaccaaaaaaaaaaaaaatcgatgtcacaaaagacaaagaaaggctatggaaatgttctgttactagatggaaggagacttgacaatacctgatcctagagcagctgctatactggaggaagaacataggttataaataatattttgggataattaagactgttgaaataccagtgatagaacagataaagtactgggttaatgttaaaattactgaggttaattataccgttttgaagagaatctgtttattcttagcaaatacacactgcagcatttgaggataaacaaccatgctatatacaacctactcccaaatgattcaggaaaaaataatattaggaatatagaaaaagagagaaagtgataaaaaaaaaaaagcatgtgcaaagaaaatgccaacaaacaatagtgaatctgagtcaagtatatacagatgttccctttacttttccttgaatctattccttaagtttgaattttcaaataaaagactttttaaggtccaattgagttcagcaaacaaatactcacagagaacttactatgcaccccttgtggacacaagtgtgacaaagacctggcctctgtcttttaggatccctggtctagtgtagaaggaagaacagcccctgaattaggccaattggttgcattcattttctccaggaccaaaatttcttttggacccacaggaatgcataattccctctctcactttatgaactcctcctgctcactggcataactgcccattgaatgattctttagcactttattatttgtgtgcaacaaaatctccgatatgccaccatcccatgtacaccacacagcctgggctctgcacaaaggggccaagtatggagcgctggtttgagatccacagtccatatagcctctgttgcctgtttcccttctaggctgcccgaaaaccagaactgaaagccataggggagaagtgattcaccctagagcgtcaggggcctccagaggctgagttgcctacaggaaagctggactgccccccaggaaggctgaccacctcatttgggtcactggcctggttttttggcagaactttgcttgccctcaaattctaattgcaaaagaaatgctctaagctgccactcaaatcatctgtatccgcgagaggagccacccttctgggccagactaattggatttgtctttattgcggtcattaccaagggctattggaagctacataagtcaacatgttccaacttgctatatccacctccagctcagagcaggtgttttaaaaagcaactgtctgaaattatgtgcaatgaattaatgactcctttgtctctgcaacagagttgctgtggactaaggcagtgagtgacaggaccggacttgcaaactgaaatacacgatttaaaaaaaaaaaaaaaaaaaaaaaagttttaaaatgggattcaccataaccatgctgttggcacggagcttcccattgggatttaagttgtactttacttttcaaacagcatgcttattctgaaaggagagtctgacctattttacaggagaggtgggccactgcaccagccagcttgcttgtagtcaggttcgaagccatctggatctcacagggtttcatcaatgctggcagagcctgagctctgccagatgtcaacagtatcttacttttttttctgaagaagttcactttctgtaccacctgcgtttggtacaatacactgagactctccactaaaatgtcaaactatttcagactcctatttattcactgtcttagtccattttgtgctgctattacagaatacctgaaacggggtaatttatggagaacagagatttatttcttatagttctggaggctggtcaatgggctggcatctggtgagaaccttcttgctacatcatctcatcgcagaaggtggaagggcaagagggcacatatgcccaagaaaatgtgtgcacacacaaaacagtgggagagagaaagagagatagacaactagagagaggaaaaggggaccaagctcatccttttatcaggaactcattcccatgatctaccatgataatggcattaatctgtcatatgtgcagagccctcatgagctaatcacctcttaacagtcccagctctcaacaccactgcattggggattaagcttccaacacataaactttgggaaatccatacaaaccatagcatctgcctcccacccacatcttggctcttcaatgtcaaggtatgttggttgtgaagggaatataaatgcactcatagtataaacacaggaaaacatgtctctcctttcattccaagacttactggaattgtgtcaagcttcttatggtcagagatgaggacttctctttattttgtcattcttctgctcccataagcccaaataacagtgaaatgttaagaacctagacatcttccaataaatgcccactgactgtcttgctctcagcaatggctggtttctctgctgatcttcagctgggtcccacccagcttgggagatgccagaaggatggctgcagaaaagcaatctccctccacagtgactgtcacactgctgctgctgtcaccatttatatttctatcaccaccaccacggctggggagctgccatgccagatgatgtcagagcactttacgaacatgccacatttacacctcagggtatacagccacattcccaaacgttttttaatctcagtatgaaaatctgaagatgtgccgtcacagaaattaaaactgataattttttaaatagttacttattaatttaacataataacaaaacccgacattatccaaataactataatttttaatccaagcacacttcactgaaaagggtggcatggttttacatttttgcaaaaaactcttaaatgtctagctgaaaagaaaacagctggcattctcatatctgcttctacattcaatcagttgagttatcacacatcatgtagcctctggaaaatgccaccacacacttgtgggagaatgagaatgatgagaatgacaaaggaaaatatgccttgtatgattgtccagaatagttttggcctttcagatcccctaagaatagccagtatagatgtggtagttatgactaaagtacggtggttgatttctggctccaatatctcactgccctggctcaaaatgtaccatacactagctatgtaccttttcctctctgcctcaatttctccaggcattctttcaatcagaaaatgtatattgagcacccattgtgggtcacatatagttctaggtcctggaaatacaccattgagtgtttctgtctctgcaaaattcctgtgttgaggtttcaacccccagtgtgatagtatttggaggtgggcctttgacaggtatttaggtcgtgaaggtagagccctcacaaatgggattagccccttaaaaaaaaaatggactccagagagcgttcttgctgtccttccaccaagtgaagatacaagaagacgatcaactgccctccccagaacccaaccatgctggcacactgatcttagacttccagcctctagaaccatgaaaaataaatccacccagtctacagtactttattatagcagcctaaatgggctacagcactgagcaaagcagacagcccttgttctgagggagctgatattctaaaggagggataataaaagttcctaaatcattgcaaagactcaccagggaattcatgtaaagtgttttgcatataatcatgctagctatcatgattatacctattttatagatgaagaaattcagacagagaagttaaacaacatgtccagggtcacagtggtacaaagcaacagccaggatttgaacccaagtcttaaccacaagaccttctaccagtttccagtctcctcttggctgtcataaggtgcaagtgtgaggacaagacaatgtggctaaggaaggatgatctttgcaagagcaccctcatagaagggcagatggctagcaccttctcaaatgtaactaagagaacatgacaaatgcatcaatgttacattttaagatccactctcccccaaaagctgtgattccacctaaatcttaggatgctcaaactgtaaaagatcttagacatactcataccacatccaaatgtagcagatgagtcagaggaggctccaactgagatactttcaaaaaattagatatgcatgctttctacatgtttgcttttcctgcaaaacccagtagctactcaagaggctaccaagaacccagctggggctgcagaagctaaggtggggcccagcagacagcatgcatctcagactctgacatcatgacagactggaagcccccatctctctgcagcagccacagttggccactcacgttctcttaaaacattctcaccctctctcctggtagcttccctcccacctttctgatctttctttccagggtcctcttcatggacacttacatgcagtattcatgcgtcatttttaaatttttcaaagagacagggtctcactctgttgcccaggctggagtgcagtggtttaatcactgctcactgcagccttgacctcccaggctcaagtggtttaatcactgctcactgcagccttcacccttacatctcagcctcctaagtagctgggactataggtggcacatgccaccatgcctgcctaatgtttttattttttgtagagacaggatctcactatgcttcccaggctgatctcaaactcctgggcgcaaatcatcttcctgcttctgtctccaaaagcgctaggattacaggcatgagccactatgcccagcccacatagggctttcacattatatctgatgactccaagtctctctctgcagcctcaacctctccatgcacttgaggtttgagtagccaacaggtgacacacatttccccttgggtgccccacaggcacctggtgatagccaaggtccctcataaacctctcaggtgtcaaggccagagaaatgtcaccccctcaatatcgttcaaatctgtccagatgcctgaaactaccctccagtttgggacttctccactcacatgaactatcgtgattgccttctaactgcagcccccaaccagtcactctttgttgtatgaacacctaacaagggcctacgacatgccaggcatgaggctcagggcacaaaagtacccaatcttgtctcctttaaattcaccattcacactgtaagcagaggtttctagtctcagcccttttctacttaggtactacaggaaactggcttggtgtgtgagttttcgagacagacctgggtaaacattctggttgttctatttgtcacctgcataacttggagaaagttggtttcttggtactttggttttctcccttgtaaaatggagaacaataattcctaactataaggttatttccaaaattcagtaggtctgtgaagcatccagtgcactagatagcacatagcaagttctcatgaaggggtaattattgatggctatgtaaagtacttacagagcatgccaacatcaacagtcttcggtgttccccacagtggcacccaaggctgctgctgctgcgttctgagcctcagtgcctccctcccatcccctgttaatcgtagttcctgctcaactccatggcactgcctcggcagtctctcctcctggaatacactcgcctcttctttgtcatccgtcagctgtctcccaggaagcctcttccagtgccccaggtgggccagacactgctccctggcaatgttgagcctgcacacgaggtacagctgcaacaaatgtggtcaaagtcaaaaggccagcacacctatgctttcaccctggtacagagctgctgcccaggcccatcgtgtgcccccatcctaaccactctgggcttcctttccccacaaggtctattcagctggagtgggctggatagtggaaggaagaggactgccctggtgacaattctggcaccctggtaggcaaatgaccagtgcccccacggctcctgaggacatgaccacccgctgccagccagggctgccccagtgtcgcctctacctgtctcctcatgggaatgacagcctccgcagaacaccatacaggctgacatatgtctgggctgccatcgcctagtgctctagggctcatcattaagtcatcaaatctttccctgccgaaactcatatatctaaatgctgaaatatttcctgtttcattaactccagtaaacagctgattttccccagagtcgacgttcagccagtggtatgccccatggcctagctgatcagctgtcccggggcacactgtcacctgcagaggcccacgttcccagccaggatagctgtcaacaatcgctaccgtcaccacctatacctctccactcatggctctatccaatcaccgcttgtcaccctgaacttgcctgtccgctttcctctgacacaccattgtgtaagaggggccaagatgaggagggtgtttaatgtatctttatacccccagcaccaagcccagcctggcacatcacagcaccaggtgaaatgctgagttctctgcagattggcccagttctcctcccgacctcaggaagtggagagttggctgtagagattccagaggcagattaggaaatggcactcagagctgaggaggtcagacagagctgccaatgaacccagcttctcctctgacactttctaaagacagaagaccctgctagagaggatgacagccacctctggtcaatggaggcttctggaggtaccactcacacagccagactatggaccgaacagacctggcaccatatcattaatcctaaatagaaataaaagccatcatctggccgggcgcggtggctcacgcctgtaatcccagcactttgggagaccaaggtgggcagatcacttgaggtcaggagttcaagaccagcctggcaaacatggtgaaaccccatctctactaaaaatactaataaattagccaggcatggtggtgtacgcctgaaatcccggcaactcaggaggctgaggcaggagaattgcttgaaacggggaggcagaggtggcagtgagccaagatcccaccactgcactccagcctgggcaacggggcaaggctccatctcaaaaaaaaaaaaaagaaaaaagaaaagccatcatctgccactgaacatcctctatcccaaccaatttaaataataccggctccaagcttgttggcatactccatttgaatagctcagcctactattttagatgtagatagagatatctgctgttttcaaattagcctctagcactcatcattaagtcatcaaatctttccctgccaaaactcatatacccaaatgctgaaatatttcctgttttattatctccagtaaacagctgattttccccagagtcgacgttcagccgatgatgtgccccatggcctagctgatcagctgtcccagggcgcattgtcacctgcagaggcccacgttcccacctatgtcaacaactgctgttccccatgggcaacctgcatctggcaaaataatacttggggagagtggaatagacaagttgtttgctattcacttggcctctgctgtaacacagcagggaggaaaggctttggctccagaaatcccagggttcaactcctagccctattatttaccatctgtgtgacctcaggcaagttgcttaacctctctgaacttgttttctcttctgcaaaacctgggctaatcatacccacctcactgagttttgggtgtgaacatggaaggagttaatatgtactaagtgcttggtgtctattcagccttagataaatgctagctccctttccattcctttctctctcaactagagtggtattcattggtgtttcatgtttcatgaaccactgagaagattagaactggaagaaaacttacttgagagtttctggtgtgagctgctcagtttacaggtgataaagacgaggcctaaagaccaaactcctcctaaaaaaaaataagaatttgggctgtgcaaactctccccttctttcttgcctaaattgtcaccttgctcctcagtagggttggaaattcttcacatccaccagaaagagactctgcttgaggcttcagcactgacacttacggttgcacaagttgtgcactgcacaattaaggaactgcattcacacaaacaatgacgggaatggtatcccaaaattttgaaccacagatccttggatgtcctataaagaaagggacaccccttcttctctgagatggagccaaccaaaggcatagcacctcacacctggctgctggtgtggagtttgtggagctcaagagggttgactgggaccttggcctcagataatgaagtggaaactctggtttctgacagatcctcagcttgaaaagggggccagattataaacactaaaagtgataagcagtcacgaaaactctatggggtgctacggcactctatgacaggaacggccccaatttgctcccacctcctggcatccatgcctgcaggtgttccctcccatgctgactctgggcttagcctgtgacttgcttgggttgataggacagtggacaaacgtgatagaagtggggacttgaagagcgcttgcaactcacaacttgtcctgtcttggtgctcttggactctgcagccagcacatcagctggccccagccaggctgctggaggacaaagtgccctgtggaaaaggcctccagccatccagcatccaagataaggccctgacaagccagccctccccatctggcctccagctgaccatagacacatgagccagcccagctgagatctgcagagcccagccaagaccagaattgcccagccatgcccagcccaaattgccaatgtacaaaatgactaagtgttcagctggtttgttacatagcaaaacaaactgatgtaggctttgcaggggagtcttgagattaataaaagaagaaagaaagaaactataggacccataatctacttggacagaaagactgtgtgcatatgaagaaacaaatggattaaagctaacaatcaaatgagggctaagtacccagagaagccctcatggaggagaagccttagttgtccttgaaggatgccacttattccctccagcacacatttatcacttttttttttttgagactgagtcttgctctgttgccaggctagagtgcagtggcatgatctcggctcactgcaacctctgagtccctggttcaagcgattctcctgcctcagcctccccagtagctgggattacaggcatgtgccaccacacccagctaatttttgtatttttagtagagacagggtttcaccatgttggccaggctggtcttgatctcctgacctcatgatccacgcacctaagcctgccaaagcactgggattatcacatgtttatcacatagtactgggcactatgccaggtgcatacctcaggtacaacacctcgcctgcagtctcatgtcctatgtgagggcgtggttggtattcacacttgcagatatggttcttgcccaaattcacacagaaacaaagtggcagtccagaaatttgaatccagacagtctcactccacaactcaacacctttatcacatagttttgccaaattcaggggtaactgatgcaatatccaacatgtatcttctattagagccgttcttgagccctgcatgttagctctgagacacatccatgtggagcagccatacaattccatactgaatattttattctcgcctcattctttttctttttctttttcttttttttttttttttttttttttgagacagggtctcactctgtcacccaggctggagtgctgtggcacaattcacagctcactgcagcctcaacctccccaggctcaggcaatcctctcaccctcagcctcctgagtagctgggactacaggtgcacaccaccatgcccggctaattttttttgttgtgttgttgagatggggtttcaccatgttgctcaggctggtctcaaactcctaggctcaagcagtctgcccatctcagcctcccaaagtgctgagattacatgtgtgagctgctgcacctggcctcatttcattttttttttttttaaccgaagagagtaaatgactgaagggaccattttccacatttattgtaccaatcttgggtggaggtaacttggtgtctaatgatgatggaggccagtggagaaagaaccttgccaaccctccactaatgtttgtcatccagtggggtcagacaggaaggaagtagattgtaacaggaacacaagaggtaaggccaaacattccagtgcctgcctgttaccaggtagatgaaaccatgaaaagggaataacaccaagatcttgcctttataaatctcgcaataaccaacaccatcttttcacatgtcttatgtttaatctgggaatgtcagtagatctggttctagttaaatttatgctttgtggtaattacaatttcacttgtttgtacctataaatagagaggaattacttacttacaagattctgggcagggattattatgatgttgataagactatgttagcatgtgcttagaaattctcaaaaatggaagacacatatagaccctagattgaacagtagttaatatttattgcacagttactgagcaccagacactgtgctaattgctttccatgcactatctcagtcgatactctcaacaaggctgtgaagaaagggctattagttttttccattttaaggatgaggaaattgagacttatcaggaataactaatttatctgaggtcacacagttggtaagtgaaagagacagaatttaatcctggcaacttagcattggagcccttgctttgagccactttgccattctgtctcaatttaaacccatgatatcaagctcaaaggaaatgacttttcagggattcaaaatatatgtaacaaacagaaagaacaagatattaactcgaaaacattgtgcagaccaaaaatatttatagacaaactcaagattcctagcttgagatagagctgttaatggaaagttagatatactagaaacataaccctaagccacccaggataataaatagggggaatttaaaatccaggctagttagtattgaatttagctgccaagaacaaaagaaccctcgtagtgacttaaagtaggtaagaaatttatttctctcttatgtaaatgtaggcacttaggtctcattgctcttcccacctctacaagtgtctttgatctggttcaagacagcttctatagctccagccatcatgtctgcattcctgctagcaggagaggggaaagaaagagacagacacaccctctccgtgaaggacgcttcctgaaaattgtacacatcacttccatttacagcccattggtcaggatttcatcacatgggccatacccatttgcaagggaggcagagatacctggtttttattcttagaggtcatatacagagcaaaaaggagagattgagtagagagaatggatattggtagcacaatgagcagcatgtcacagaataataagactttatagtcgggtcacttctcttctgtctttgacaatccaccggtcccacatcgacacccatcccctccatttcaatcatgtttaactccttgcatttacctaagcacactggaccctacccacactctgggccttttctctctgcctggttgagcttctgtgcctcctttgtcttctccaacttcttccctcctacctctttgtcaagccccattctcctttggattgctctgatgaccctcttctcccctttccccagcagctgtctcttctctgagatccacagcctctgtgcttcccccttatttggctctcaatacatcatcaccagctgctatggttggaatgagtcccccaaaattcttgtgttgggaatttaatctccaatgcaacagtgttggaaagtggggcctttgtggaagtgtttaggtcatgagggatctgctttcatgaatggattaatgccactaaaaaaaaaaaaaagctcaatatttattgcacagttactaagcaccagagcaccagacactgtgctaattgcttcccaggcactatatcagttgatactctcaaaaggctgtgaagaaagggctactacagggaaaacagaaggaatacatccttcttgtccttctgccttccaccatgtgaggacatagtgctcctctcctccaaaggatccagcaacaagatgtcatcttaaaaacagagactgcacccttaccagacaccaaacatgctgttgccttgatcttggacttcccagcctccagaactgtgagaagtagattttttttctttataaattacctagtctcaggttttctgttatagcggcaaaaaaaatgaactaagataccaatagtttgctcaccagtctcctccaccaggctgcaagcacctttgggtaggtcctgggtctctatctctccctctgcagccccttctcagctcctacctaacacagggaggtgctcaaaaattccttgattctcaaaactctttgcaccactgtcagaagtcaatctgtgatcactgaggtctagacatggttgagtatgtctttccatattaaaaaaaaaaaaaaaaaaaaaagctgggagaatacatttgcatgactaataccaaaactctaataaatgaatacacagagggtcttgcacccatgttttcatccattccatttctgttgtctcccaaaggaactatttttttctaccttccagtgttgctttatacatatgcaagcaaatatgaatatatgcatattttcctctatttctgcttcttgctttttttccactgaacatatcctagcaatcttactacgtcagtaaaaagagagtgttccaattcctttttccaggggcgtagtatgccgttatgcacatgcggccactgcttttcttaactagtcctttgtcattaccaacaatgatgcagatgacatttcatatgcacgaaagtgaatctataaaataaactccaaaagtgggatttctgcatgaaagtgtaaacaactttgtcattttggtagctattgtggcatggcattcctaaatttaaaaaagaaaaaaaagaaaaaagtactaaatctgaagaaagttctttggtgagcattggaaaaacaattttctctaaggaaatagaccatgaagatagggaaaattacctcattgtcactgggatattttctcacatccacagtagatttagggtgggtaccaggtgtgagaaatcactctgactttgctcctttctacaaacatagggcatctcaacccagtgatttccatggcatttataaaaaggccatttctgcccggggtttgtgccactacaaagcttgtaatggatctagagacaaaatgacaggttttccacattgggggcactttcctggaagcgtgcaattcagcttcacgtcccactctgggagctttggaaacactgcaacgtatcaaattgctgggccatctgtggtttcctgtccacgggtagggagaggggacagacagaagctgcctctctggatctcagcaaatgtgctgggctgaggccacagaccagggcactaggacccttctgtgcccaacagatgccatttgtgagctcagagcttctgccacctgtctgaacaggcaccaaaactagcagctgaaacatcctccattccacaaaagccagtgcttatatatttagcagcttagccatagtcacacagaaagtagagctgtgaaggactagaaagagcttaggagagtcaatgcctccaacccgctgcaaacaagcccgaagcaccattgtccctctgcatgaggcagtgaggtccctgcaagtcacggctgctgcaggagtgcacacaggatggtgaggtagtctggcccatgacccagggcctggtacagcagggtgagtagtgggtgacccttcccgtggacttgcaggtggttctggagtcagatgcgtcttaaggaggcagaacgatttggggcaaaactgggaatagacaaagttatgaagatggcagcacttcttggcttccgggtccttgagtccaaatccttctttgcatgtttccctttgctgcatccccacggtcattgtcacctgaattatggccacaggctccccgctggccccaccattttcccgtgcccttcccacgccatcctaaacccagtggctacagtgataaacagtctcagtttaatctatgtggattctctgctcaaagcctgtaacagttcctgttccattcagagcgtgatctgacctccctgggccctctggcctcctctgctgccactctccctgggccctgcacccctaccacaccagcccttcgctgctcctccattgccatcagagacccaccttcagggtttttgtgctccctgtgccccggcctgggacaactcccagcctcctaatcacacagctctcctctttcaggtcttcgtttctccctggccatctgcactttcctgtccatgggctggaacagtgacagacagaagctgcctttccggacctcagcaaatgtgctggggcaaggccatggactagggcaccaggatccttctgtgcccccaacagattcctttcatgagctcagtgtctctgccacctgtctgagcagctcctaaattagcagctcaaacctcctccaccacacaaaagccagtctgtgcatcctgttcagacagtggctctttcccgaccatccttcttaaaaaaggcaccactaatccccatctcattggaaactttacctccctctgctttttctccaaaattctcagcacagtctacgtaaactgttcattttatatatttatgtctccatcatcccctccccacactagactgggagctctgtgggggcacagacgtatctgttttgattaccaccatatcccacacatctaaagcagcgccagggcacacagtaggctcctgaatatctgctgaatgaatgaacacagaaatgaggaaggtatttcctgcaagcaacctcatctcagtcgtcacagaagaagctgtcgttgtgtagaaacccacgcacaagaaggtgctatcactgccccacccctgtccgtccctgctaccatcgagggtgtctttcattgttgcattttaaatgagaaaagacagtgtctaacatgaacagaaggagctctatcgtggatattttaggtcagggtgggtgggggagatcattttgagcagagagctttcctgagtgtccaggggcccacctccatcatctgccccagcctctagcagtaacagtgtgaaagagctctcacaggctctgttgcatgccagtatagaagtcatggggctgcatcgcacacctagaggtaaactcatttgctgggtgtgatcagagcacctggccactgcagctcaacaggtgagcaaataaatagcatgccattgttcctcttccaccaaagccatgatttcctggttagtttgtatttgacatcaaggccaaatgacaataatttttttttttaaactgggtctcactctgtcacccaggctggagtgcagtggcgcaacctcagctcactgcagccttgacctcccacggttcacatgatcctcccacctcagcctcccaagtagctggggctacaagcacattccaccacacccatctaatttttgtaatttttttttttttttgtagcaatagggtttcaccatgttgcccaggctgatctcgaactcctgggctcaagcaatccaccagcctcagccttccaaatttctgggattactggtgtgagacatgcagccctggcctcgacagtcactttcaaattatttaacttctctagtgacctaatggttgatctttttattttatcatgcttataccgtctctctagtcttaggtataatttctctgcaggacatgttgttgtagtaaaaggaagaccataagaagatgacaatggccatgagcactacagtgaagccccacggtggtgttggtaaaggaagttccaatagcagttcagtgtctgcaggtggagcacaagaagccgggacaacaagcaggtcctcagtcctcatggcttcctcccacggtagttgtgaggtctagggaggtcatgccactctcccagtgcccatattcttggctagtaataccagtgttatgctagaggcagtctgatgtctttcgaaacgcacgtctcatcaagacaaagcagcctatctctcaggtaatgtaggaacttggaaagaggcaattaaaagatgactctaaggcagggtgtggtggctcacgcctgaaatccccacattgtggggggccgaggcgggtggatcacctgaggtcaggagttggaggccagcctggccaacatggtaaaaccccatctctactaaaaatacaagaaaattagctaggtgtggcgttaagcacctgtaatcccagctactcaggaagctgaggcaggagactcacttgaaccaggaggaggtggttgcaatgagccaagactgcaccatggcactccagcctgggcaacagagtgagactccatggcaggaagagaagggaagggaagggaagggaagggaagggaagggaagggaagggaagggaagggaagggaagggaaggaaagggaaaggagaaggcagaagagaaaagagaaagaaaggaaaagaaaggaaaatgaaaagaaaaaagaaaagaaaagactctatgagccctgatggtactctaaatcaaagttcctgaagcctggaacaccagagcttccatacaagctttccatagtttgacccaaattaataatcagatctgaagtgtcatttagatgaacgtggcagcagttctccgggaaccccctctgaagtcagatttcactgtctgctcttaagcttgtttcaagaaaggaaattgaccataaaagctcctatccacttcctgatgataaagacaactatccagtcttggcttttactgcagtcattgctattgcatcatttccattaatcttctcagtggcccagggagattggagtgccatcattaatttgaaaagtaataaaagttctagattgagccatttcctgcattcttaaaacaaggaatgtctatatctaaccttccacattcccaaggtcaacgtcaccaactatctccaggttaagtccagggatcggtctccgtccccatcagtgaggccctggctgtcccaccaagtatttcccaagtatttcaaggctattcttgaaactgtctttccaaaattatgactgagacagtgaaagatatctaacaaacgactccatcttgcttctaacctccaagctgtccttgttcattcctgggtgtaggctgaactaactttgggagaaactttatagtttaaaacaaagatgataacatccctttcccaaagccgacctctttcttgcctggggactagattgcctttgtaggaccaacattagccaaaagatgagaaattatggtttaggagtcatgcagctggaggctacaagattctgaccctccctaaactgctcctaagatcagtgctctagataccctgcacttgatagatcagctggcaccacccagatcaataaactgtctcatctgatcttgtggtccccacccaggaactgattcagcataagaagacagctccaactccgtatgatttcatctctgagcagtcggcactcctcctggctcacttgtttccccccatccaccaagttatccttaaaaactctgttccctggatgttcaaggaaactgatttgagtaataataaaactccagtcagtccttcacagccggctctgcatgaattcctctttctctattgcagatcccctgtcttgatgaaccagctctgaacccactgggcagttacattgttggctatttgcatgtgctttcttaggatttcatttccctcttcctctccaattctgccacgagcctgaaactggacttttgaaattgcctcctaactggtcttcctgccgctggtacctcatctacatacatctagaatgatcttcctataggacaaatgggatcacttcaatcatcttagttcactttaatgcttattgagcaaggtctggtggatataaaaaggggaaccagagtggccgtggtggctcatgcttgtaatcccagcactttgggaggccgaggcgggtggatcacatgaggtcgggagttcgagaccagtctgaccaacatggagaagccccatctctactaaaaatacaaaattagccgggtgtggtggcacatccctgtaatccctgctactcaggaggctgagagaggagaatcgcttgaacccgggaggcagaggttgtggtaagccgagatcgtgccattgcactccagcctgggcaacaagagcgaaactccgtctcaaaaaaaaaacaaaagggtgggggtgggggaaccagagacatccctattgtgatggttaatttgagtgtcatcttgattggattgaaggatacaaagtattgttcctgggtgtgtctgagagggtgttgccaaaggagattaacatttgagtcagcggactgggagaggcagatccaccttcaatccgggagggcaccatcgaatcagctgccagcacagctaggataaaagcggacagaggaacgtggaagcactagactggctgagtcttccagtcttcatctttctcctgtgctggatgcttcctgccctcaaacattggactccaagttcttcagcttttggactcttgggcttacaccagtggtttgccaggggctctcgggccttcggccacagactgaaggctgcactgtcggcttccctacttttgaggttttgggactcggactggcttccttgctcctcagcttgcagatggtctattgtgggacttcaccttgtgatcacgtgagtcaatactccttaataaactccctttcatatatgcatttatactattagtcctgtccctctagagaatcctaatacacctgtcttcaaaaaaagcagctctagaagtttgatgactccccacaattgcaggctcctcagtctgcaaacatgctctttcaccggctgcccctgcttgtttctccagctcgtttccagccattttctcatgtgcattctccaccccagccatgcctgctaccaggaccactggaatattctgaacctcttccccctcgcttcctgtttatctgtaatgtctcaatccaaacttcttctcctggctgcactgaatttttagtccggaataagttacattccttctctgatgtacagttgtcctggacaaaatgctattaaagtttctttttttttttttttactttgctttaattgtgcattttatttaaattgtttattttcttgtctgtctctcccactaggctatgctcttttagggcatgtcaatgtcagaggccttttaaccagagcaactttatcttgaataggggctgggtaaggtaaggctgagacctgctggtctgcattcccaggcattaggcattctaagtcacagaatgagataggaggtcggcacaagacacaggtcctaaaaaccttgcagtaaagaagttaaccaatcccaccaaaaccaagatggcaacaagagtgacctggtcatcctcactgcttattatatgctaattataatgcattagcatagtaaaagacactcccaccaactccgtgacagtttacagatgccacggcaacagtgaggaagttcccctatatagtctaaaaaggggaggaaacctcagctctagaaattgcccatgatttctggaaaacgcatgaataatccaccccctgtttagcataacatcaagaaataactataagtatccttagtccagcagcccaagctgctgctctgcctgtggaatagccatttctaattctttactttcttcattaacttgttttcactttactttatggactcattccaaattctttcttgcaccagatcctggaaccctctcctggggtctggattaggacccctttccagtaacattaatattttattcattttctgcccatagccttgcacagtgtccggcacaagtaggcaatcaataaaaattttgttcaataaataagagctctgtgacatgagctcattatttgttcccttgtgtagatgaggtagacccacagccaggtttgacttcttgcactcttaccaagcaatcgaagggctcatttcctgatgtgcataaaagctagtaccacggcaccagcttttgagaaaagaaaagctttattggaagttaactagaaaggagaccaaaggaaatgctcaaatctgtctccttgagcttggggctgtggggttttataagcatagggtaataaggcaagatctgattgggtcttgcaatgacatgatgctgggaaggcatgatctgattggatcttgccatggagtgacacaagggctcaatctgattggatcttggatcctgtcatgtggtgtccgcttcttaattcagtcctgctaatctgtcaaaacacttaggttccgcctgtggttggatgcttggtccatctgcacacgcacagggtatgtgaccttcaacctgggggcagcccatggcaactgaaaaacaactgacaactttgttacataaaagccgagccagattggtctggtatagttacagcattacttaaagcatgtgtccaagcatgaggggttctgggtccctgttcagtgacaggtgacactgttgctccagtagcctcttcatttccttcctcctgtgtcttcacaataaaagacactgtgtattcattctaggcccatcgattctaacacaagttaatcttttcaatgccttgtgatcttaactctaagaaaagcatccataatctaaatacaaacaggtcccccgcctgctctgcacctgcaaaaactatcccaatggcatcacagctatcagaggaggtgggctttgccctgagcatagcacaaagagcctcttctatcatctcgtcggcctccatctcctcccttcccacaagcccttgaacccaaggctagccaggtccctggccaccactttacccgcagaaggtgagagggacaccagccaccaggtcccaatttagaaagagaaaggaaaggagtagaactgctctgcatacaaaagtagggcacatttgagattcttttgtggagagaaacaattaagaagctgcaaaatgggggagaggaggagagctgggagaaggtcacagggaggagagagaagcttgagaaaattgcactaggtaagccatggccgatgaacaattgggaatgatgcagggaatgcttttgaaagacagtcgtcttactatcccagccttatgccatagttagcactgtactcgaattccatgccgtgactgcaaatactccagcaagtggtacaatgcagcagcccaacattagtgcttcttatggggatgaggagacacaggggtcactgcctggcaaccttggcagggaaggaagacagctgccccaggagcaagggccaggagcagctgcattctgtgaacctgtaccaaactgcctttgtggttgaacaagaagacatggcattgagaaaccgtattctcaaaaattacagacctcctgacagtttcctcttcaaaatcctatcagtaagaatggaagatcccattcctacctgaaatatctggggtctctttgacacagagaagcagcctagatttccaaggcaggtgcagtgcttcagataaggagtttggaagcacaatattctacatttctcttaaccctgtagtttccaaggaaacggagccctgagtcagctccccagctcagcctgatgttaattacacacagccctgctttgcgctcatcaaaacactgcttcatttgaattttagctaaatcccatcgtttccccaaatcctagaataacctcctgcttgctttgtttgataaggccctctatggctttctgggggcacttgccctttttgcaacatggtattaataaactttggccgggtgcagtggctcatacctgtaatcccagcactttgggaggccgaggtgggtggatcacctgagatcaggagttcgagaccagcctggccaacatggtgaaaccccatctctactaaaaaaataaaataaattagctgggcgtggtcgtgcacaccagtaatcccagctacgctggaggctgatgcatgagaatcacttgaacctgggaggcggaggtttcagtgagccaagatcgcactgctgcactcagcctgagcgacagagcaagattccatcttaataataataataaacttcattctggaaagtgcatgtttatttctggtctctattatttcagatgggccaaggaatgtctgtcatccctgaacttgtgagatactgtggaaggtgagacatgatcccctaaattgtaagagttagagatctctgggcaatgtggagatctgaaaaatattaataatgcaaaggcaggtagcacagtaggaaagtaggaaacaaccaggagtttcagagtgagaaagtcccaggtaaaattccagctccctgacttactagtggggtgttacctaacctgtctacacttctgtcatctttatcctgggctgttgccaggattcgatgagataatgtgtgttaaatgcctttcattgtgcctgtcatatattaaccactccacattgttaattattactatttgtaaaatatgagtggagatgaataaggaatggaaagaattgtgaaaacattaagagacaaacatcagctctgctgatgttgtaggactgagtgattttctttggtatcctacaatattgctttcctttccgccctgtatttcctttttctcctgggcatgcagcgagaccacaggcctactgcttctcccagtttccctgtcttgggtaaatggcaactccattcttccaggtcctcagatcaaataacctggcatcagccttgatctcttatctcctatctcccatccaaaatatggtaaaccctgttggctcttccttcaacttatctccaaaattctaccccttgtcaccaccttcactgctacatcctcaaaccaagtttcaccttggttattgaaactgcatcctaactaggcttcctgattccaccattactgccttatattcaccctccactcagcagcaggaagatccttccaatatgtaaacaccctcttaggcttagtatcctccagtgactcccactaaatccttacaatagcttacgaggtcctacacaatctggcccagatcacctgtctgaactcatctctcccatctcctcttcctcatgaccctacaccagccatacctgcctcttggctattctggaaatgctaagaatgctctcacctcagggcttttgcacttgctgttccctctgcttggagcactcttcctccagatctccatatggcttctttcctcacttgcttcaagcctatgctcaagtgtcaccttgttggagataattccctgaccactatgcatgcacacatgcacgcacacacacacacacacacacatacacacacagagtaattccccccatagcatctattggccatggacatacaacacatttacacatttacttttctgtatgtttctttcttttctctgccaccagaaaaaaaaggttccacttgatcaggaacttactctgttttgttcactgctctgtctccagcacgtgaaacagagtggcataaagcagatgttcaattaacatgtatttaatgaactgaatgaagtcacaggttttaaggagtgttaattcccatgcacgcctgagtaagagaaacaatctcacttttccttttgatcacatgaaagaaacaatagaaaaacaataagtggtttccccccagctgtaacagcgccagggacttcccacctgctgcttctgcttagaaaagcagtggtgtttgaagaattcttggaggttatgagctcacgtgtctgtgttctgacacatacacccccacacgcccttgcacactgcagtacagaaggaaaccctactgagagaggtaggcagtctatgtccaggctgtagaaacagtggctgccatcactgctatgttacggaccctaaattagcttatttcatgaccccacagagttacactgattgttttcacacagtgtttctcaaagagtgggccagagcagcagcagcagcagcatctgcaaacttgctggacatttgaattcttcaacccatcccagatccactgaatagaagctttgcagggctcagcccagtgctctgtgttttaacgggtcctttgggtgttctgatgcagtgaagtttgagaacttctgcttcagtggacaaacaagaatgtctgggaggaagaaaaagtaccaaaaaaaactgacaaaattttttaaatgccatgtaaaggctgagtgcagtagctcatgcctgtaatcccagtactttgggaggaggaggcaagaggattgcttgagcccaggagtttgagaccagcctgggcaacatagggagagtctatctctacaaaacaattaaaaagttagccaggcatggtggcgtgtgtctgtagtcccagctacttgggaggctgaggtgggaggatcacttgagaccaggagatggaggctgcagtgagccatgatcctatcacagcactctagtctaggcaacagagcaagaccctgtctccaaaaataaataaataaataataaaatggccatgttaatcctaatactgagttctagctttacttatcaagctgtgtgaaactgaaataaggacatcagggtgagggaactggctctctcgggagaggggaaatcctatttcttcttcatcactgaccgcttgcttcagtcaggctgttcctgtcaggctggtgtgaaatgaattagcaatgtcaccagcttcccaaggaacaggtgtctctgccatacctccggcaaccaatatcacgactttcactaattgctctgcccttgtcaggccctttgaggactaagtgggccctggagatggagtgaccctttacctgctcagagctgcctttaatcccaaccacatgcccccaccccactggagccccggagcatgggaaatatggagcaccacagtagcaatgcagaagcatgagtcactgctgaagcttgtgggaggaaaaatagaattcaggccttctgctctaattacacttgattgttgcccgttgtgaacaaggacttttagggttgacggtatcctcaccatcggcccactctgttggcgggacccaggagctggtattgctggagaaattcacacagaaggggaatcacttcttcttaaaatgaaaatttgggccaggctcagtgtctcatgcctgtaatgagagcattttgggaggctgtggtgggtggatcacatgaggccaggagttcgagaccagcctggccaacatggtgaaaccccgtctctactaaaaaacaaaaattagctgggcacggtagtgcatgtctgtaatcccagccactggggaggctgaggcaggagaattgcttgaacccaggaggcagaagttgcagtgagccaagactgtgccactgtactccagcctgggcaacagagtgagactctgtctcaaaaaaaaaaagaaagaaagaaagaaagaaatataaagaaaattggctcatgtcactcctctgcttgactgacatctggattgattgacaatgcctttccattgagcttagaataaaatctcaaacccctcaatgacagtaaaaaaaaaaaaaaattttaattatgagcaagagacttgaatagacatttctcccaagaagacacacaaatacccattaagcacgtggagagaggctcaatatctctaaccattagagaaatgcaaatcaaaaccacagacttcacatccactgggatgctattatgaaacccacacattcagaaacttatgagtgttggcaaagatgtgaagaagctggaagacttgtgaacagctagtggaaatgtaaaatggtgcaatcactgtggaaaactgtatggcagttcctcaaaaactgaaacatacaattaccataggatccagcagttccattcctggatatagtcttaaatggaaagcaatgactcaaacaggtatttgtacacccatgttcattgcagcattattcacaatagccaagagatggaaacacctaaaatgtctatcactggatgaatcaaccccaaatgtcatatatccacacaatggagtattattcagcctaaaaaagaaaagaaaattctaacacatgctacaacagggatgaatcttgaagacattacgctaagtgaaataagccagacctaaaaggacaaaaattgtatgattcctcttttgaggttcgcagagtagccaaattcagagaaacagaaagtagaatagaggttaccaggggctgcagggagagaggaatggggagttagtgttttaatgggtacagagttgcagtttgagatgatgagaaagttatggagatagccggtggtgatggttgcactataatgttaacatacttagtgccacttaaacataattaagatggtaactttggtattatgtatatttttcaacaataagaagttttcaaatcccaaacccctctcttatatggccccttctcatttgtccaccactctctgacatttcttgatctcttgcttctgtgcttcagatatcctgtttttatttcagttcctcaaaaaggccaaactcgttctcaacctcagagcctttgcactatcacttcctctgtggggaacatttttctctctattctttacaaggataaatccttttgatgttttgtatgtgtggcagagactacctagacgctcacaccaagctgtttcctcttcctcctgggcatacgtgtctcactgggcatacctgttcttcctgggctacacctgacttcccagcctcccttgcagttaagtgtgtccagtgatggtgagaaagaaaatcaccagcatcactgcaggctttctacccattctggagaaaaccctgatgcagaagggcaaggggattatggaagggaaatgttaaaaactgaggagccacagatggctggggccagggtccctgaatcactgcatggaagagaggcacctgctgatcaagccatgttcattttggattgtatgtgggtggaaagaaaaaaacttgtctttgagccatgacacattttggggtgtttctattatgcttaaaacagctagtctttctgtaatacgaaccccaaagaggggtcttctctgaccatcaatgtcaaatatcttgcccctgtccatcattccctgcccctttatgttgtttcttatcctagcttcatagtttgtaacttgtttattcattttaatacattgattttggaacgttttcccctctagatggcaaccttctttgatacacaaactgtatatcttgtttgtcactgcatttccctaacatgcccaacacgagctcaataaacgtttattgcatgaaggaatcaagatctgaatttcagcctggtcgccagtggtgcttgtccattctgttagactctccactgcactcctgccatttcatataatatgcctttagtcacagtcccttcactgatggcctcagagctatttgaaacctgtgcacattctggttaaacctttcatcacagtatttggtgatgctgcaatgaatgcggaatgctggtctgtcccccacagactgagtctttctagggtgtattggcattcctagtgtctaacaggtagtaggctggcaaatgaatcaatgagccggtgaattaatgaatttatctcaagaatttgagactgatcctatctcaattcagaggcagagcacagaatgcaacatcatcaaagattgacacgttccttgtctagacaagtgctgcgagtcaccacagcctgcgcgtagtctggttgggaaagagccctggctgggctgcaggagatgtgaactcagagcctgcccagctcactgtgctctggcaagctacattctctttccctgactcaattatcttacccataaaacgtggcatttgggctaaacaatactgaaactgtgttaaccttacagtgacattacttaaaccctggcagtcaaagagaaagtagaaaacgatgctttatatctgtgttgtctcattcagaagccactaaccacatgtggctacctagcacttgaaaggtggcccgtccaaattcagatgtgttgtaagcacaaaacgcacactagacttcaaagatttagtataaaaaatgtacatttctcgttaaaaatttttatactgatttcatgtggaaataatattctggatatattaggttaaatgaaataccctattaatcatttcgcccatttctgtttacttttcttaaatgtgactactagaaattctaaaattacacatgtgagttgcattttggacagcaccattctatgctattattagtactgaaattcagctacatacttcagactataatgcataaatcattgattctacatcctttcctgagttatccaaactcattgtcaaatgaatccaaaaaaggttcactaaagtcgatctaactacaatgaaacttcactatgaatggatgcccatgtagacattatgcagttttgtttcataaccaatgggttttaggttaaaactatttctgagaaacaaaacaattccagcattggaaaatgataagcctaaaacaaactcagtagagaccagaaagacataaaaagaaaggggccaggcgtggtggctcacgcctgtaatcccagcactttgggaggctgaggcaagcggatcatgaagtcaggagatggacaccatcctggccaacatggtgaaaccctgtctctactaaaaatacaaaaattatctgggcgtggtggtgtgtgcctataatcccaggtacttgggaggccgaggcaggagaatcacttgaaccagggaggtggaggttgcagtgagctgagatcgcaccaccgcactccagcactccagcctggtgacagagcgagacagtgtctcagaaaaaaaaaaaaaagaaaggatttcttttctattatagatactgggtagccctacgtgctcctctaagccccagatataatatctgtgctatggggaaagcaaaaagcatatattttctttgcttcgttcattttgttttttaaattttatttatttatttttttgagatggagtctcagtctgtcatccaagctggagtgcagtgaagctatctcagctcactgcaacctccacctccagtgtttaagtgattctcgtgcctcagcctcctgagtagctaggattacaggagcccgccaccaggcctggctaatttttctatttttagtagagacaaggtttcaccatgttggccaggctggtctcaaactactgacctcaggtgatccacctgcctcggctgtggaggaaaagttaaatattagatttgaactcagttgaacatggacataaccaatggacaccaagtcccagaacaggttgtatgagccctttgaggctttcatccagcactgtttcagagaaatctttatttcaatctattcctatatgttagttagtgaaaaacaatagacaatcacaagaataagttgacctttttgtgttccttgaccacagcaatgaagagccctcgtgactggacctcatgccaaacaactcgctacaaaaagagctaggttcccagactgcgccgaagcttcatgagacctctcctcatctgtgcacagaggagtggccgactctggagcccaggcggtcgcttcccggtctggtgctgaatcctccatagtctggtgagtgcaagtatcttttcccttctccccttcccattgcaatttgcttattatatcacttgcttattatatcgtttgcttattatatggtttgcttattatatctgcattgtcatttacagggataaaagttgttcacccttaaaggtattgtgtgtgtgccttttcttctcctctcacgtgtttccagcacagaacatcggcctcccaaagtgctgggattacaggcatgagccaccgctcccggcctgtttcattcattttagaaatgaccaaattgtgagctgagatgaaggttggggtctggtagatttgtagaaaggagagagtgataacaagtgtgggtaaaaataagtgtccgtggaagaagtgagaaatttgagggaagcagagagaaaccaggagagagacctcggaggttgcttgcagggtcagcagcgtcaacatcacctgggaactggatggaaacacagattctggggcccatcccaaagggttaatatggcggcactcagctgctatccaggactttttcctgttcgtggagtcttggaagaacactcctctagggctggggtttccaaggtgtagatctctcaaagcttttcttgagaaatcctgaagccagttatcgtcctcaactctacatcaatgtcccacctccatagatcacctggaattattagattggtgcaaacgtaattgcggtttttgcatcgttggaatttgacatttgatattggatacattcttaaataaatgtggttatcttatacatcattttaatgggcatttcttgctttatgttttttggctaatgacttattacttgctgtttattttatgtttattttagactgtggaaataatgttagacaaaaagcaaattcaagtgcttttcttatccgagttcaaaatgggttgtaaagcagcggcgacaacttgcgacatcaacaatgtatttggcctactgtactaaaaaacatatagtgcagtggtggttcaagaagttttgcaaagacgaggagagccttgaagatgaggagtgtcgtggccagccatcggaagttgacaaagaccaattgagagcaatcgcagaagctgatcctcttacaactacatgagaagttgctgataactcaacgacaaccattctacagtcattgggcatttgaagcaaattggaaagatgaaaaagctcagtaagtgggtgcctcatgagctgagcaaaaatcaaaaaaattattgtttcaaagtgtcatcttttcttattctacacaacagcaaggagtcaattcttgatcagatttgtgacaggcaagaaaagtggatcttatatgacaaccagtgacaaccagctcagtggctggaccaagaagaagctgcaaagcacttcccaaaggcaatcttgcaccaaaacaaggtcgtggtcactgtttggtggtctactgctggcctgatccactacagctctctgaatcccagtgaaaccattatatctgagaaggatgcccagcaaatcaatgagatgcgctgaaaacctcaatgcctgcagccggcattggccaacagaaacagcccaattcttccccaggacaaagcccaaccacatgtcccacaaccagtgcttcaaaaattgaacaaattggactacaaagttttacctcatctgccatattcacacgacctctcacctaccaactaccacttcttcagacactttgacaactttttgcagggaaaacgcttccataaccagcaggatgcagaaaatgctttccaacagttcatcaaatcccaaagcatggatttttatgctacaggaataaacaaactcatttctcattggcaaaaatgtgttgattgtaatggtccctatttttattaataaagatgtttgtgaacctagttataatgatttaaaattcatggttcaaaaccgcaattacttttgcaccaacatggagggaaggtcctctattttggcctcagggcctattgtcagcagagtcttcctcccacaaacactacccatcctactcccttcccagcgacttcaccacctttgtggaaaaggctcatctgtagaactatgaatctagtactttccaaatgagttacacagacactgaaaacaggttaggagataactcatctctagatgttttgtggttccttggtttcaattatcaaagcactgaaatggaaaggaatagtcacacccaggcaaatttgctttgaaaagccacaagagttgttgttgctgacttaagtctcaatcatgcccttaatgaaagtggaatctagacataagagaggaataatgcctttaggttgaaagtttcctcctccaggaagccctccatctcaatcaagttctccagttttaatctttcattacactttcctttataacacttattgcaactggaaaatatgcgtgtacatatagttatttgcttaatttcagttctttcactcaaccgtatggtctgtggaggtaaaaaccttttgtatctttttcacctctgtatccttgggacctgccagtgtgcagtgcctattggacacttaggaaatatttgctggagggataagtatctaagaagtactttgtaattatgaaataactctgagactttgtacttccatatctttccgaaaagaaaactgggtctgtagaagagttgtggccaagagcagcaaacaggccagtgaaggggtcagggccctgagagctttgggctcattttatccatgacagctctcaacatggctcaaaaagcccgagggccaacattcacctggcatgaaagggaaggaaagtgattctgagggaagaaaccttctaggtgtggctgacccataaccaacaaggagatgagaaaaaactatagaagttgaattttttttaaaggctagtgtttatagtgagattttccaaagataaattaaggaactgatgtgttcctgaactaggtctaaccagggtcaattcccaaaagagtctcttaagtatttatttgatctcatttccacagttgagtggacaactcttgcccatcactcttccttctatgcagtgttgctaatgattcctcctactccacttcttcaagaaccttctcaacagaagacgccagaggagggggcctaagaagatacatagcaggaagtccccagcaaaccatttatctattttctccacagatctacaatcccaaattgttcagctggaaacactagtaggctacgtcgcttgccctaaataagctttgcagaaatgaacagatggaggaaaatttcaaagcagcatgtgggcgtttcaggcccaaatcccattaacagataacaggatttataacagcagttcccacgcaaagctttggaaattttgaatttgtgtgtaatagattgggctccctctcccctaaattatctgcacgttgttcctgcatctgggcagggcccctttctccaagctaaggagcccacattgtcagctaagaagtgtgtgtggtggctcacacctgtactcccagcactttgggaggtcaagacaggccgatcacttgaggtcagcagttcaagaccagcctggccaacatggtgaaaccccatctctactaaaaatacaaaaattagccgggtgtggtggcgcacacctgtaatcctagctacccaggaggctgaggcaggagaattgcttgaacctgggaggaggcggaggttgcaatgagctgagaaggtgccactgtactccagcctgggcgacagagtgagactctgcctccaaaaaaaaaaaaaaagaagcaggaatggggcacaggcccacaggtggcagcaccaagtggtcttgtttatatttctttttttttttttttttgaggagtcttgctctgcaatggcgcaatctcggctcatggcaacctctgcctcccaggttccagtgattctcctgcctcagcctcccgagtagctgggactacaggtgcgtgccaccacacctggctactttttaaatttttttttgtatttttagtagagacggggtttcaccatgttagccaggatggtctcgatctcctgacctcatgatccgcccatctcggcctcccaaatatattgcttcttaattctctccttctcccacagaagagttgcgacaagttctggaagggtggtggatgggttgtggcaaactggaattttgattcaaagcaaagacaactagattcattgctgtcaggaacccaaagcacatggctgcctgtctcaacaaaacaagagaacctagaccccaagttaatgtcagcaaattgggatgcacctcctggcactatcacaaaggtattgacacagtgactgaaacagggggatccctcagaagcagtctggaaagaacttctcatagctactcagaagtagatgtaagaaactccaagcattccttgatgagatggggaagatttgtgggttggactcccacagggagctattgactggatgccattgttagtgagatccatagttgctttatgttccccttcagtatgataggggtgtgaaaacccgaattaccctattaggactagagtagaaaggaaagttcttaataaggtcattgactaccctgaaactgttttaacacttaaggataaaaatccgtaaacagcagcagctcaaggttgaagaaagtctgtaagttttcccccgctccagcaactgacctgggtgcaggtctcctagtttcatgcatgtcccattgaatcactgtcctccagaaatgcagagacacatgaaacagctttatgaccaattcaagtggccacagaatacagtatcagtgagttggggtcccaggcacatcttataacccaggcaaaatagcatccacactatccagtgatatgcaaatacttccaacctatttctgctttgacttccacaaggaagccttcctgacttccctggctccctctcaaatgcgcccatgacatccagttcttctttactgcatttcccctgcctgtcattaggcatgtaatgagtttccattacatgcttaatgtctgtcttctttgctagattgtgagagtggaaaacatgtctatttgtctcaccattttaaccccagagcttagaaagtatatgttaactaactcctgactaatggcctagaatacttcgggcattatttaataaacaaagaactgagtgaataaatgactgaatcggttaatcaatagcattcaataaggtgggggggattttataacattccttcaaataggggagcatacggcatgaagagttataacacaaagtgctagtcatataccataagatcaaaatcactattaagagtacttggttgggctggatagggacgttgaccttcaaaagattcagtgagaacccttggttgaaggagataaactaaaacctcaacttcaatggttatcagatgcacatttctccaatctggtgtatttccagccacacccaggcaagcaaggagtatcttgatatatctgctttactaaaccagatcccctaagaaaattatggtatcatttatagagatgatcacttttgggtaaccagataggcattattcaagaactcagaatgtacactcaaaatcacgtacatgacactgaatcctagaggattcagtaccacaggaatcctagaggagtctttgctcactttacccacttctcttgaacatatacatatacatatacactatttactaggctatatttatgctgactatctagaacatggtagtcctaagtgtgtcaggtgattatagaaaatgccctatattcattacataactttggctgcctacttttatttatgtgaaatgaatcagactcctagttgaatacagatggactaatggcccaccacatatattaatcttattgagttcagtgaggcttttgtgtctgatttaagagggagtatatgcattttctcagtccctgaaatctgatcaacagcagtcataagaccagatatcaaagtgttgggttctggaagtatagcatgctcatgtaagcttaagaacaaagtttgacagacctcattttagactatgtgagctttctggttgtgatggttaattttttgtgtcaacttgactgggccaagggatgcccagatagctggtaaaattattattattatttctgcatgtatgttttcagaagaggttagcatttgaattggcaggctgagtaaagatcacctcaccaatgtgacaagcgtcatccaatctattgaggccagaagagaattttaaaaatggaggaaggacaaatttgcttttttttttttttttaagagatgaggtcttgctttgttgcccaggcaggctggtctggaaccaccggcctcaagtgatcctcctgcctcggattcccaaagtgctgggattataagtgtgagccactgtgcccagccatctctcaagctgaatgagacatgcatcttctcctgcccacagacattagagctcctggttctttggcctttggactctgaaatacaacatgagtggcctccagtttcttaggtctttggactcagactgacagttgcaccattggctgccctggttctcaagtcttcagactcggactgaatcaccccatcagctcctccgggtcttcagtttgaagacggcatatcatgggactttgtggcctccatcattatgtgaaggaactcccataatcaatctatctatctatctatctctctatctatctatctatctatctatctatctatctatctatctccttctcccctgccccttttccccacacccaaaggtgtcttcctttggctgaaggttgttgtacaattgtattctattgaccaccaaatatgagcactgcttaatttaacttttctcaattttttgagattaggaagtgcttagtcctgcactttgagtttctgtttttgttttttctgagatgaagtctcactctgttgtccaggctgaagggcagtgttgagatctcagctcattgcaacctctgcctcccaggttcaagccattctcgtgcctcagcctcctgagtagctgggattacaggcacgtggcaccactcccggatcagttttgtatttttagtagaaatgaagtttcaccatgttggccaggctggcctcaaactcctgacctcaagtgatccacccacctttgcctcccgaagtgttaggattagagcgtgagctactgcacccaaccactttgagttcttgaactcattttacaaacaaagtttattttatttcaagatttgaccctatcaaagccattataaccttattttttctagtttttactaagactactataatatgattctaagtttatcattttttattttcacaggggtcaaccaatcttaatttgggaaaataaaggaaacacagtaatatttatactccaagggctataggactatttatggctcttatttttaatataggtacaatattgtctttttaatgacttaaccctcttagcatgactttgtggaaagctcttgtattttcatatggtgttatgagagctgagacaagggaccgtggactatgaaatgctttgttggaatgggaggagtagggagagggcgaatgtattaggctatgcgtttaacatgcccctggaccttactcaatgcactgctgtgctataaggtacaggctgggttgttccctgtctctctatgagagcagaattctaaacatgactttgttcctatcactattaggttggtgccattacttctagtggcaaaaactgcaattacttttgcaccaacctaatatcatctacgatgtctagattttccatcattctgttccttaacagtgccatgcctaggaaaatgggtacagtgagcccccctttctttactctccccatctctgacagccccacagcccctctcctgattcatcccaccaattgttcagtgccttattctttcacttttttttttttttttttttttttttttttgagactgagccttgcttgctctgtcacgcaggctggagtgcaatggcatgatctcggctcactgcaatctccgcttcctgggttcaagcaattctccctctctcagcctcccaagtagctgcatttacaggtgcctgccatcatgcctggctaatttttgtatttttagtagtgttggagtttcactgtgttggccaggctggtctcaaactcctgacctcaggtgatccgccctcctcggcctcccaaagcgctggaattacaggaatgtacgcagccctttctttcactttttgagctctccaacaaaatctaacctcaggaagtgatctgacaaactcatgcacatttaggcatttatgtctgaaaagagaccaattggcgaccccttccaggaacacctgcttgccaataaaataacacgtttaagccagaagaattattttctgttggcaaaatttcaggactcattgacctagtggccatgaggggaatcacactttaggaggccccatattctacggcctttctgttgaatgcctggtatccatttcccccaccactccaggtcacagttttattagttgtttctgctctgaaattccctctctgatccagagcacaccaacttctggtatcataagaagaatagggtgtaaaagtcagctccaaacatttctgggactctaattacagtacagtcaggcccagaactgatggtatccatggtccatctaattctggaaaggagttaaaggcctgggtctgggggaaattgtgactgtaaaaagaaaagcatcagaagctcacaaaatgcgattgtcatcttaaaggttaggggccaaataaattaagacatctcatggggagttgtaatccccgtcaatatgacagtgattaaaaaaatggctgctactaaccacatgcagcgtggtttaaatctgactcatctgctaggcatcccatcctaatcaaaagctattcaggggctggaaggcaaccatcaagctccagcagcaacgtgccagggcccacagctgcacagctgaaaatgtcacgccaggggctggctgcctcccttgccctgaacattgcatcccgcctgctgagtgggggctggcggagcggcccagccagctgtgtctgatgtcgcagttgtccatgggtttcaccttcctttttccttgacccatggagtttggggaaaaaaaaaaaaaaaaaaaaagctgcaaagtcaaacaatgaagagaccagagaattgaagtccatttccttcccaaaccaaataatgtcctctcctgcagggattctagcaaaccttctggttcatttttctcaaggtgtgcaattgaaccttcttttctctatctaaggcattaagtcaaggttgctctgtttattagtactcggaagcaggtactataaagaagagaaaatcagtggtgaaacaaagggagtatatttaatttttaaaattttaaaacaaaccatctttgagggcaattgcattccttaagaacatgggaattcaaagtggcccctagcctctgcatgtctagaatttcataattaggaaaggggggttctgaagaaagcatcaatgatgtattgagcacctagcatgcccaagagaccagcgcaggtcttacgtctataaacagagacttgaggtgccctgagatttactcaaaatcacagagttaatcacttgtatcactaggtttacaacctaggttctcttactctcttttcaggattttctaccatatcacgttggcttttccaagaatttttagatctggcaaaaaggaaaagaaatacaaaaaaataaaaactaatgcatagtattacataaaatatgcctcgtggtctcagaaagacatacttcgggtgttcgtacttatttgtggaaacttcaaattaaaacagttgaactcatggagatagagagaatgatggttaccagaggctgggaaggttagtgaggtggtgggatagtaggtggagcatggttaataggtacaaataaatagttagaaataatgagtaatatctagtatttgatagaacaatagggtaactatagtcaatatgaatttaattgtactttttttttttttgagacagagtctcactctgttgtcacgctggagtgcagtggtgcaatctcagctcactgcaacctgtgcctcctggttcaagcaattctcatacctcagcctcccgagtagctgggactacaagtccccgccaccatgcccagctaattttttttgtatttttagtagagacagggtttcaccatgttggccgggatggtcttgacctcctgacctcatgatccacccgcctcagcctcccaaagtgctgggattagaggcaccagccaccacgtccggccaatttttcatttttaaatagctaaaagagtataattggattgtttataatacaaaggataaatgcctgaggctatggatctccattcaccctgatatgattattatgcattgcatgactgtatccaaatatctcaggtatcccagaaatatatacactgtgtacccacaaaattaatagtaaaaatattgaaaaataaaatatgctccatgaacagtatggttaataaaaaccaaagaaagtcactagaaaacaaaaagttggtgagaggctaaaatggtgggagaagaattcaaagaggatataggacataacttgtagcttgagaatatatggactaagtagagtggacaagaagaagtagataattccagtatataagaatatgattacagtggttttgagggggaaagaaatggtttgggtcattctggttgtaaaaggcaacttgcaggagaataacgtgagaaatcaaacagaagtcagataatagaggctagaaatgtagatttcaccgtgtagaaaatgggaagtcacaaagtgttttgtatgggagaaatgcatagaaactttcaggttgggagtggagactcatgtccataattccagcactttgggaggccaaggcaggaggatcgcttaagcccagaagtttgagaccagcctgggcaatatagtgagatcccatctctacaaaacttcattggcgtggtagcacatgcctgtagtcctagctacttgaaaggctgaggtggacaaaacttcgttggcgtgctagcacatgcctgtagtcctagctacttgaaagcctgaggtgggaggatcgctcgagcccaggaagttgaaatccattgaaagcctcattattcttctctagaaactccatgattctatggcctgtgaaacaaaattagggtagagaaaggactagaagtgtggctagcacctggacattccctccttaaatctagcacaaggtgatgaggttgtgagctaaggtggaggtggtggaaaggaaaggaagggttgagtgacaaagtgcattgagaaaagacagtcatcaggtttggtaaggctaaacatggatcatatctatcggtcgggtggttgatattaccattgccctcattccagtctctgccttgccactaattatctagtgcgactttgaattagtccattgagctccaagaaaaggttttatgagtcatcagtaatcattgagattcatgcattttttaaattccattaaatttcctaggagcaacatctcttcacccacaacatcttcacttagctaaacatgaaattgtcttggttgaaatgagaaaattaaagttattattaataactattagcatctataattggaggcactctcttacatttcacaatctaatcaattgctatgttcctctcttcagtccatcagcatctcctggtccctcctcctttctcaccagcctcaactccatggctgatcatctgagcttctctgcagtcttgcacccaattctcttgcacctagttcctcctgtccacttacctaccaagacctcattcttacattagtactatgttctaccttctctgcttctgaacacaaaagaaagaaagcttataatagggaaaattgcatagtgtgtctacaaagtcctagtctacatctgaaaaggattcttagtcttttactcactgctggccagctcccttttccctcaatgacaattccaaactatctctcttccactaacaaacttgacaatgtccactgccatcttcctcctgaaactgtccatttctgtgatgttgcctctcctggttctgccagactctcctctccatctatggctcctctgtctgcactagctccaaaatttggtgttttgtcctcaactcgttacccctgtcttgaatgagctcataatcccattgttttaaataccacatagatattgtgttgggcagaacagggtcccctcccaaaaatctgtgtccttcctggagcctcagaacgtgaactgatttgtaaatggggtctctcaagatataattcgttatggtgaggtcatgtggaatagcatgggccctaatccagtatgactagagtctccataagaggagaagagacacagggacagacatggggagaatgccttttgaagatagcggcagagatgggagtgataggtctacaagctagtggactccaaggactgtgggcagccatcagaagccaggagggaaacatggagcagattctccctagagcttcctgtgggaaccaactctgatgacaccttgatttcagacttctggcctccagaaacagtgacagaataaatttctattgctttaagtaacccagtctatggttctccgtaatagcagccactggaaaccaatacacatgctgatgacttgcaaatagataccaccagcttcgcctcctccccaagccccaaactcatgtttccaattcctgtttccacctggcctgtcttcctggatttcctcactgaggaccgcagcagaaatcgtgctcttcccttcaaactccgctcctccctgtacttaccaccactcttctatgctggagatatagaaggcattttttggtctctcctctctcacaatcccagtaactaagtccaggtcttgatcctctgttgactgagtttctgcaaaatcttccttcactgatctcctgctcgatttccaccctccagtctcttctacacaaccaagagtgtgtcttctaaaaggcaaatctctctataaatgcttaaaatacttacaaacactgaaaggttttctatccattaagagccatgctctgtgcttagcatggtgtacagggctcccagaatctgccctgcccagctctgtggactcatcacacagtccctcctccctctccatgctcagagaatcctgtgttgcctccaggaccccatatttgttgattgcccccatgcctgtgctcctgtggccagtcttcttttcctcttcctatcccctccctccatagcatctttcatgtatgacttgacttattctttcagatctgactcagtgtcacctccctcaggaagcctgccctgatacaccactcaccccctctctccctgcaccccaaccctaagcacgttgcatgcttcctctctgcacttctaatcctttgagaatagctcaaggttcatactcaccatattgtattgtatctttttttaaattttaaataaaaactttacttaaattctggtatacatgtgcagaacgtgcaggtttgttacataggtatacatgtgccatggtggtttgctgcacccatcaacccatcatgcactaggtatttgtcataatgctctccttccccttgtccccaaccccccgacaggccccagtgtatgatattcccctctctgtgtccatgtgttctcactgttcaactcccacttatgagtgagaacatgcagtgtttggttttctgttcctgtgttagtttgctgagaataatggtttccatcttcatccatgtccctgcaaagaacatgaacttgttctttttatggctgcatagtattccatggtgtctatgtgccacatttcctttatccgttctgccattgatgggcatttgggttggtttcaagtttttgatcaacatatgtgttcctccctagactattggctttatgaggacaggaaaaatgtcctggcatgtagtatatggtagcaccagggacaccacaggctctcgatcagtgtttgttgaatgaatgaatgaatgaatggagaatgaatgaatgagggtctaccttctttaccagtcacaatccatgtttctttttgatccgttgaatgataactctttctagtctcatttatctctttctaccacttgtgcccctctacgtaccagagaatagggcagcttaggaaaaagttcaaccaaagccaaatcgatggctttaattccttctacttttgttccatttccaatacccacctctcatctccataatggccagctgagatgtgttaaacggtggccccgagaaagatttgtccatgtcttagaactgtgaatgtgacctcatttggaaaaaaacatctttgcagatataactaagttaaggacctcaggaggagatcagagatgagatcctgcgttatctgggtgggtcctaaatccaatgataagtgtcctcacaagagagacacaggggagagacacatggagaagtggggaaggtcacatggagatggggacagagggtgggctgatgagggaataagacaagaagctggaggaggcaaagaaccatcctcctcttgactctttggaggggccatggcccaggtgacaccttgactttggactttttgcctcccaaactgtgcaagaataaatatctattgtttaaacccaccaatttgggggtaatttgttacaacaggcctaaaagataaataccctggctctcttagaactgcatgccattgcctgcaagaaaccaccattaaggacctaggaaatctctgagtgtctctattcctggataaacaattctgagcaaacattgggtcaataataaaaataggtaatttttattagtacaacaacaagaatagtttaggtgtactgagctcttaccaagtgccaggtagagtcctaatcatttcacatctagtaactcattaatcctcctgacaaccctaagagaccattactgctattatctccattttgcaaacaagcaaactgagctaggagaggttttatcactttcccaggctctcacagaaacgagcagcaggtaccactcagccacgtcttcgcataaggcacagttgagcgcagaagagtaagcacccgctctgagcctgaggccctgatgctagttccagatgtccttgggcgggttgcctgacctctctgagctggactgaagctctggctcatctccccagttctgtcattctggggtctctcaaatctgtcctagctctagactgccatgatttgcaaaccaggttattcctattaatggtggctttcttttacattcgcacagcgctctcctgccagaatctagacacctggtctgctttgccattcagtcagggaaaataaccagaaatgcaacagaatcagcagattcccagagccatactgaggggtggtgaggaatgtgcctcatattttaaaatgtcctcttcctcctgcagccaggcctcactgacaaagcaggcctcagggctgccagggaaccaagctgcctctcgttcttatatctaaatttaatttaaccatagtgttaccctacatgtcaacagttcaggacaaattgatggattccagtttaactatttagctgtgccagtggtaatgtgtgcaaccatgcattaaattaaaaatgacacttggaaatatgtatatccgggacctcagttccgtgcaccaaataggaaaaagatttaaaatgctgtctagtggaggattaccactgaagaagcatgaatctcattaccgcaggctgcacagaacacatttgcaaagctccgtttaaaagctctctgatggtagcagcctggttatctggctggataaacatgacatttcctttccataatagaaagcccagttgctgccaaagcaaagatgttgtcagggtcctcaatgtcctcacacccaccttgattcctgggcaccctcactcagcttatgtgtcacccatgccaactgtcttctcctaccaagaccgcagtcctacccttcacacagatgttcatgaacgtatccacagacaaatcactagaaaattatagtcgttatcatttattaagtacctactatgtgctagccatattgccagacacttcttacagtatctcatttaacagtcctatgaagtcactgttattaattcattttggcatatacagaaattgatgctcagagaggtgaagtacctttttcaagattgcacagcgatgcagggcagagccaaggcctgtctaattccaaagcttggtctctttaaccataggtagcagtgccactggaaccatcactcctaaaaatgcccagttaactgagcttctgttcatattttgcattcatccatgaaatcaaatgagcctaaggtacatcctaggtaagaactgcaaactaaagtgcatttgcttagaattatcctactcctatgccctttccctctggaggcaggcaagtccctctactatgaactctttatggtcagggatcaggcttatttgtctcatacacccaacactccgtcccatgcccagcctagagcaggtgcatgtgagcatttatccaggtgcagtgaactgggtgctggggaaaagatgggagagaagatgtaagggtgccagtgaggtccaggaagagcatggggagaggacatgcccattggagaaacacagtcatcaggaatgtaatggtgggagagggaaagctcatcaccctcgttctcacgctaacagaaaggcattttccccaggagccaagccaacgttatcacggaaatagcagccttcaaattctttcatcttcctgaaatgtaacttcagatcatttgactgtgaatcacaagagaaagcctaacagcaaatattctccatgctaagtacaaatttgggtaaataagaaagcagaatggaatgcggggaaaaaaaataaagacaaatgatctaaaaccgaactgcggtagtctggcgggtgcttgcacagcctggcactgtcttcccgtttctccacgtagatgggcactaccatcgcaacggcaaaatgcaaatcaaccttattgtttcataaaaaagtccaatcacataacccaattaagtccactgttcctgaaacaattggatcttctaggaaatgaacacagatcaagtcgaagacattttcctattcacccgactccaattctgctcatttgtctcctgttctccatgctctatcccacttccatctcccaatgataggctagcaatttcttttctaaacagaaactcaacagccacccagttttgcatttattcagcacattccctgctgagaaatgtccattagtgggagttttaccatgacctaaccttgcagagttctgggtcgagttggctggcacgggttggggagaggatgggagcaggaggcagctgaaattaacctgatttcagcagttggctcctgagtgtgtttgcgtctgttgtcttaatggactgtaagagatgccaggttgtctgccagaacctgctgtcaaggttgagggacacaggcaggcagcctgagggagcctacagcctgggtgcttggtgcggctactcttggtcagtcacctcacactgccaggttggtctacctggaagcctttggcttctcctgttgttgttgttgttttgaggcagagtctcactttgtcacccaggccagagtgcagtggcacaatcttggctcactgcaacccccacttccagggttcaagtgattctcatgcctcagcctcctcagtagctgttttattattttctaaaacacaacaagatattgtttgttggatacaaactgccttccaagctttatggtaaacaccttgaatagcctagttattgtccccacatcacagatgagaacactgaggtaaacagaggccatggactctggccagaagaggccttacagagctaggaagggggaacagggctgaaattcatgcccaagccattcgattccacattctatcattgttggtttctgtaaggggacaggttcttctcccaggaaccagataaagggatggagtctctagagaggaacgtgcttttctgaggctcattctgctctatttccatccttttccaatattaaaatccctttgtgctttttcttttctcttattttttatttttctttgagacggagtctcgctctgttgcccaggctggagtgcaatgacacgatcttagctcactgcaacctctgcctcccaggttcaagtgattctcctgcctcagcctcccaagtagttgggattacaggtgcccaccaccatgcctggctaatttttttatttttagtagagacagggtttctgccatgttggccaggctggtcttgaactcctgacctcatgtgatccacctgtctcggcctcccaaagtgctaggattacagacatgagccaccgcgcctggcctcctctgtgcttttcaaaacagtatcatgataatcactacaccttcagtccacattgaataaggcaagaggctactatgaatttaatgatgtttataaacaaatttgtatcttattcatgacaatcaaatccacaaacatttcatacgtggctaagtcatgttatccaggcgatgcacacttctcagagtacatggggattcttggattccatgaatcgatttagaaatccacagccagcattgatttctgtctctgctccttgtctcatgggtgggtgcccaaattagatgatgtaaagacggataagaattccggcttaaaaataacagcacaacaacgatagcaaacgaaatacatctaaatgcttcaatcaagcgggaatctaaggagatattggacttactgtcaatgttcttttactctagggtctgacaggaagtcagcctgaggacggattaaaggttgtttgcctaggaaaggaatgatccttgtaaagagagcttccagagccttgaagaaagggcctgattgaagtgaatttcttgtcatatgaggacaaaatgcccaggactgcccactcactgcctggggtctcaccaggattgtgtgttgtattattttattttgccagaatgccagcgtcttgtctctcctgtttgcttatgctaccacacagcaaaaaaacaccaaggcaatctgtcctttcctttggatctgatcaacaaaaaaagcaagggagcttcttccaaattgctatttactctctcgatggttatcagaggcatgtgaaccagagcaaccgcatcttgaataggagctgagcaaaatgaggctgaaacctattgggctgcattcccagacagttaaggcattctaagttacaggaggagataggcggtcggcacaagatacaggtcataaagaccttgctgatcaaataggttgcagtaaagaagccggtccaaatccaccaaaaccaagatggcgatgagagtgatctctggttgtcctccctgctacactcccaccggcaccaagacagtttacagatgccatggcaacgtcagaagttaccctatatggtctaaaaaggggaggcatgaataatccaccagttgtttaccatataatccagaaagaaccataaaaatgagcaaccagcagcccctggggctgctctgtctatggagtagccactctctaatcccttactttcctaataaacttgctttcactttatggactcaccttaaatttttttcttgtacaagatccaagaaccctctcttggggtctggatcgggaccccttttctgtaacagtgacctgatttctgagtttcttggtctcagatggctgcaggaaagctaggcaatctaccatcgcaatgctgcctgaccacaaagacaaaacaagatctggtgtccttaccattatcaaatagtttcacttctcttattcttaagatgaattttgaataattcctggcatcaaagcaataaccaccctcccagaattacagggaggctcttgatgctggatgtgtgtttattctgaaatcaatatgggaaagacagttcattctgaatgtatttgattagaggcctagactttaaatccatatgactgccattgccatttatcccaggcagaggaagctagcaaagggttacttgtatgtgtgatgtgagagctgtccctgtggagccccatcaattcctgcatctctgtttggatagggtttattcgacagggcctgacactctagtccacacatcacagtgctcactcaaagaactttgtctgtggagtaggcatctaggagagaatttctgactccagctcgtctcacctcagttcttacccagccaaagtgcaactcagattctgagctctgcctcagccagggaaccagagttcccatcaattcgtgatttgccaaggaattcatttgcaacaggaactggaagaccatggtacagtatgaccaggggaaggacactgattcttgctgattcttgagtggggttttgtggtttttatgttttaagagatggggtcttgctctgttggccagactggagtgcagtggcatgatcatagctcactgcagtctcaaattcctgggctcatgtaatcttcccaccttagtctcccaagtagctgggattacagtgcatgccaccaggaccagctaattttttatttttttaattttctgtagataagaggtctcactacgttgcccaggctggtcttgaacccctgggctcaagtgatcctcctgcttcagcttcccaaagtgctgggactataggtgtgaaccactgtgctcagcttccaaaggggttttatagcagccttgacttgccaatcttcaaaattatctgtgaggcaaaccacattttgatttcttttttcacttaggaaggtctgagacagagatcttaagctgtgtgaggtcaaagaagtcagtcagcaaagccatctgactggcattccattactcactttttctactaatatcactggggcacaaggaaaaaacttgtcatcgggcccccagattgaatgaacaaagaaattgacacgaaaccgaaagggtttttaggaagcaaggaaagcagtggctcacacctgtaatcccagcactttgagaagctgaggcaggtgaatcacttgaagtcatgagttcgagaacagcctggccaatgtggtgaaacctcattctctactaaaaatacaaaaattagccaggtgtggtggtgcatgcctgtaatcccaggtacttcaggaggctgaggcaggagagtcgcttgaacccgagaggcagaggttggagtgagctaagatcttgctactgcactctagactgggtgacacagtgaggatccatctgaggaaagaaaaaggaaaagaagttagagggagagggagaaggagagaaagaaaaagataaagagagaaagaaagaaagagaaacagagagaaaaaaagaaacagagagagaaagaaagagaaagaaagaaagaaacaaagaaagaaagaaaaaagagagaaagaaagaaaggagaaagaaagaaagaaagaaagagtgggaggaaggaagtgggggaggaaggaaggaaggaagtgggggaggaaggggagtttgtagtggtatcacactgtggttttaatttgcatcttaccagtgatgaatgatgttgcatgtcttttcatgtgcttgtttgccatctgtatatcttctttggtgaagtgtctgttcaactcttttgcaaagaagagaagagaacagaagagaaaggaaaagaaagccagaaagggaggaaggggaggacggaaaggaggaagggagggaaagagaaagagaaaataaaagaaaagaaaggaaagaagaaaggaaaggaaaagaaagagaggaaaggggaaaagggaaagggctcagaacataggcgagcctggcttttgatattggatatgggatactagctgtcagcacatggtcaactgtgcaaccatcgaagtatcagtttccttggctgtcaatgggattaaacagcagtcgccttatataggtgttacgaggatcagcgaagataacatatgtaaagcatggaacaaacaggtttttttcctccaacatgggtttagctcagggtggagctagtctcccacacattgcttttacaatccttatataaccctgagcctcacggtgtggttgtggatcagggtcacagcaaaagaacaacaatccagatggaaacttcaatcacagcttctcactcaaatgtttaaggcaggtcagaaactaagttcatgctaccggtattaagatctcctctcagcactctgggaggctgaggcaggtggatcacctgagttcaggagttcaagaccagcctggccaacatggtgaaaccctgtatctactaaatacacacaagcacacacaaaattatctgggtgtggtggcacacgcctgtaatcctggctactcaggaggctgaggctggagaatcacttgaacccgggaggcggaggttgcagtaagccgagatagctccactgcactccagcctgggtgacagagcaagaatctgtctcaaaaaaaaaaaaaaaaaaaaaagatatcctctcctttctatttctctggtccctccatctctcaatctcctgggacttgttcactctattgctcgaatcaaatgcctcatccactccatcctgattgcatctctgcccccagttcctttgcttctccatgcaacacactacatacaccttagcacattgcctcaactctctctacctccaagaaacgtatatttgtatttttataagaatctaatcatgtagtgtattccttttttcttccaagaaagcagggttggagacgatgccaagacaaagggaattgaggagctgtgaactcccacacataaataatttttataccatctcatagagttaaaacacaagattctttattttctcaagtagtatcctggtacatatagttttgaaatttcccaggagtttaaataaaacattttacatggtccataaattgtgatattagcccgtggatggcatgggaaatgctataattttttcctggccaacaaaattattactagcatcattgccaactcagtacagtttataaccctctgtggatttttttttcattccaatacttatttatattttaacaatcatttgaccaaagactcctttttttataaacttaactgaaaacatatttttcactcttgacatagcctcgttgaattctaaagtggagcctgtttccacacactattataaaataagaatatttactactgaatatatctactttgtagaggacaagcttgaagactataggaagtcacaggaaatttagatttgttcattataaatgctaattgatgggggagatgataatagaccgtctttggcgtatctaagttaaatagaagaaatagttcaataaaaaccaacaccctactactatttttaaattattaaactaaatggaagaaatgccttgacctgaatttcctggagctcagtaactctgatttggcttcttgatccttctgtttcagggtgtcagtcatttcctagatttctgccctctcatcacccctgtgaatgctggtcagccccccactcaccctgactgtggccttcaatctatctgacgtgcaatgggtgactctcttctttgttagcctctttagttcttgcctcctccaatggcccctacctcctgcacttgttactatgagaattaagcttaaatggatgctaaaagtgaagataaaaacactagttaccacttcacctagaactctttgcttatatcaccagagacttagaggagaggtgcccaggcagaaaacccattcatctgaggacctgtgacaaggaacaagaaagtggctgcttgagatgaagacaaagatcacaccaagttggggaagatgtcattgccaaaatttctggcatccaccaggagggcggagttgtccaaattacaaatcagaacaattgaaaatggaaagtctcaatcttgggctttaccccagctttgcccttgacttgtggtgtaactttacatggaacagcttatccctcactgatttagattggtaaatcccagtgcattgtattattcttatgtatagttggtaaatgagaagtcccaatgcattgtattattctcatttcttttcccaccatttggccaaaaatgttacaaccatcccaccttcagcaggaagactgttagaagtgactataaatcaggacagcctcctgactagcaatagtaaaagtcagttacacgaagcagaatcacacagtcactaatcggtgtcagaaaaacacagatgtccttggaaataaaaccatgaaaaacaaccaccacccatgagtctgtctgagtcacagcactatggacaattccatattcttgtttacttgaatttttctaatttttttctatagaaaccaatgttacttgaatagtaagaaaactggaaataattcttatagtttttatcttattttttggataaatttgtgattttttaatcactgttctattctaaactatatactattttatgtaaactactaacatcattgttacaactattgacagatgacctgctaagagctacttaatcttcagaaatccagtaggtgtgttatcgtgtaactcagaaatacaatcgtgatttttagttaagagtttttggagggccttcttgtttgctacaattaaaggcctgtgttgtgttacgacaatgattctctcttttcagcaattcaggtgtcaagcagggagctgagatgtaatggtttccttcagatttctcctaaatgacctgatttactcaaagaatgaagatatctgagaatccttgcctttccattgagaagcttttagttagaaattttttaaaaagtaatttcattgtttaaaaatcatcattgtaattaaaacaaatattaacaaaaggagtatatgatgagacagttgtcttagattttattagacaatgtacacattgacccaaaagtatcaccacaaatcaaattttatagtgacaatgaactgaaaaagctgttgactttactgctgtcagatttctgtgagtttcagctgtaacatgaagatttagagcactatgtgcaactctgctcacaacagccaagacgtggaaagagctaagcgtcagttgatgcgcgtgcacacacacacacaatattattcagcctttaaacagaaggaaatcctctcatttgcaacaacatggatggccctggaggacattatgctgagtgagataagccaggcacagaaagacaaatactgcatgacctcacttacatgtggaattttaagaagtgaaacttgtagaagaagagagcagattggtggttaccagtagccgaggagttggaaaatggggagatgttggtcaaaggacacaacgtttcagttctaagaggaagaagttttggatacctaaggtacagtatgctgactatggttcataatacggcgctgtatacttgagatttgttcaaagagcagatcttaaatgttccagaaagaaagaaagaagaaagggagggaaggaaggcaggaagatctggtacttgatagcacaacagggtgactatagtcaataataatttgtgcatttttaaataactaaaagactataactggattgcttgtaacacaaaggttattgcttgaggggacagattccccatttacactgacgtgattattacacattgtatgcctgtatcaacgtatcttatatacctcataaacatatatacctactatgtacccacaaaaataaaaattaaaaattgaaagaatgaaaaagaaaaaaaagagaagagaatgagaaaaagagagagagaggcaggaaggaaggaagggagggagggagggagggaaggagggaaaggagagagagagggagggagggagggagggagggagggaggaagactatgttaggtgatggataagttaattagctggtttgtggtaatcatttcacagtgtatatgtatatcaaatcatcacattgtacatcttgaatatatacaatttttatttgtcgattatacctcaataaagctaggaaacagattgggacgctatggaagctgctgcccacctaagactctgcactggaggtcgtaacagcacagcagattctcagttaatgtcttcagtaggttcttggaaactgcaactttaagcaaaacgatgtataatgaaaccaatttctttcctctatcaacaaaccaacgttgaaggagacagcattattccaggaccagctatacaccgtttcacttaaagtcactgtttcaaagaatctaccaagaatgttaaatgaggacctactgtacccatctcatagggtcacagggaagatcagctgcacaattatgcacataagagcctagaaaaatgatcgatatgccctacaaatgttatatgagtaatagtcattgtcctcttgggatcacaaaggtctgtgaacctatgtcctcatatcctcaacatcctctcctcaccctcccagctcaggtttaaaccctagaaatacgtgttacagtgaagctggataactctaacctcagaattatgcggccttaggcttactcatccatcctgaaatctgttagggcaatctggtccaagtttgaaccacagccttattgctttatatagcaagcctagtacatctgtaaaatgagcacagtccctggcctgcaagggtgctttaaggctccaagtcaatgtgtgtaaggattatagtgtaaaattcggtacatcacaggtgctccatgcatggtaaataacagcatttttttgttttttgtttgcttgtttgttttgagaaggagtctcactctgtcaccaggctggagtgcagtggcatgatctcagctcactgccacctccccctctcaggttcaagcaattctcctgcctcagcttcccaagtagctgggactacagctgcacgtcaccatacccagttaaacgcccagttaatttttgtatttttagtagagacggggtttcaccatgttgaccaggatggtctcgatctcttcacctcgtgatctgcccacctcagcctcccaaagtgctggaattataggcgtgagccaccatgcccagccaataatagcactgttattacgatttctaaaagctaaaggaggcactgagttaattgggggttcttttgtttcccagatttcctgcccttgatatagccatggagagaaagtgagaaaagggctctgaaaaccttccagttcttccctagaggaaatagccagtgaggacgtcagaggtatttgaaccacagcaactgcattttgaataggagctggataaaataagcctgaaacctactgggctgcattcccaggtgtttaaggcattctaagtcacaggataagataggaggtcagcacaagatacaggtcataaagaccttgctgatcaaacagtttgcagtgaggaagccggctaaaacccaccaaaaccaagatggtgacaagagtgacctctgttcatcctcaccactatgctcccaccagtgctatgccagtttacaaatgccatgacaacgtcaggaagttaccctatgtggcctaaaaaaggggaggcatgaataatccaccccttgtttagcatattaaaaaataaccataaaaatgggcaaccagcagccctcagggctgctctatggagtacccattcttttatttctctactttcttaataaacttgctttcactttattctatcaacttgccctgagttccttcttgtataagatccaagaaccctctcttggggtctggattgggacccctttccagtaacaaagtctcctcattgaaacagctaacactgtaggaatgtgaggcgtgtacgttggagtcagctttcttgtctgagtcctggcaggttcagagacaggaatgcccctggggaaagagcaactcgctacatgtgaccttttctctctagtggggaatcgagacaaatacccagttacaggctgtgatgtgtgtattactacgcattcccagatctcaaagctaccgctacaagctaaaccccagacttggagtctagcaaaataaattgtacccatcgaggtacccctaggaagttactttatatgcaatggtcagcctaccttgtctaggcttcatcggacttaattatttgatttatgaatggtcaatgttattgaccatccagctgcccataaactcttccacttaataaaacagtggcctattagcctacacgttcaatagacaagcatcgaagggaagcagaatccatggggacaaccaaaaagaggcagccactctcctggctctgtaaggaacctcccaaagagggtaaagatttcacttttatctatagatgccttgttggattttgcataaagaaattactagagtcactgaaccataacttagttcttctaaatagtggtgaatatttgaaagcttcaaggacactgctagaaactttaccaagtatatacatacctaggtaaaaagagcatattcatcctatagactacacagcatcccagccatactccaaatagtatacatactaatgaaaagagtcaaactctataaaatatttgaagaaatttattctgagccaaatatgactgaccatggcccatgacacagccctctggacggcttgagaacatgtgcccaaggtggttggggtgcagcttggcttcatacattttagggaggcatgagagatcaaagacatctgagaaatacactggtttggtcgagaaggctggacaattcaaagtaggaagcttccaggttataggtaaatttaaacattttctggttgacaatgggttaagtttatctaaagacctgggatcaatagaaaggaaatgttcaagttaagataaaggattgtggaggttcttttgaagtctcatagtggctgcccttagagaaaaaacatgacaaatgttttcccttcagactttcaaaaggtggtagacgctcggttaatctcttcaggattgggagggcctacaacaaaaagatctagctgtgttaataaagattcttcacagatgcaaattttcccccacaaaggatggctttgcagggccatttcaaaatatggcaaagaaacatgttttgggatgaaatattttcattttctcctttgtcacatgttgttatgccagagtcagattcgaaagtaaatcaatgatatacggggttatacaaaacacatctgatgagaatttatggtttgtaggccatgactccccagacccctcagatatttgggcaagatagaaaaaaaatcagagcttagttctcacaaaacaattaattaattcctgtgctgctggatttgctactcccattaaaaagaacatggttggaatggacgccttttgcaaggcaataatattcagtccattgcaaggaaactaggggttctttaagatggtaaccccagtatgagcacgaggtctctgtgtgtctactttctttgaagatttgctggatctcacatctgacaaaaagatacaaccctgggccatcatcataatgaagtgtccctctaggctggcaggtttctgcacactcatcccttccactataatcaaactgtaacctaggatttctccttttgagcacatacagccaagatcagagtttaatacttatctcttgctgtctctgaaaagattgtgagtttgttcttgcaatataagagcgcattaagaattccaggactcttacattcctcactggaagcaacgcttgagacttgctttacaaaccctacaacaacaggcaagcagaaatcccattccacctcactctgcatgtggttgtgaagaaagctctctacaaatggcagcctgagaatgttagaggtgtatgaaccagagtgactccatcttgaataagggctgggtaaaacaaggctgagacctattgggctgcattcccagatggttaaggtcttctaagtcacaggatgagataggaggttagcacaagataccttgctaataaaacataaataaacaccttgctaataaaacaggttgcagtaaagaagccaacccaaatccgccaaaaccaagatggtgatgagagtgacctctggttgtcctcactgctacactcccaccagcgctgccatgacagttgacaaatgacatggtaatgtcaggaagttaccctagatggtctaaaaaggaaaggcatgaatagcatataatcaagaaataaccgtaagaatgggcaaccagcagccctcagggctgctctgtctatggagtagccattcttttattcctttactttcctaataaacttgctttcactttaatctatgaacttgctctgaattctttctagcgcgagatccaagaaccctctcttggggtctggatcgggacccctttccagtaacaagagcattctactgcactatgttccagcacccatgttggtaagtattagctttgttccttaattcattcagacctctcatttaagcccccgcgtctacacaggtacgtatgagggttggaagaatctggaaggaaacagttattagcaaacaaatcctggagtgggccaggccatgattgctccagagtttgtgtgaccccaagccagggctgaactgatctttaaatgttataatcacctggaagaacttgatgatctgtaagccactgagacatataagagaactaaaaacttctgagaatgtttttttccattttgctaaatatttttaaaataattttattatttatgaattcaatactcttgggtcaataatattgactgtttggcatgaattatcatttaaacacataaataacttgtaccttagtttggtttgcctggcattgcatagttgttattcacagaaaaactgagaaaaaattataatgcatgcccactcaaatgtaaaacttctgtaacaaggagaggagggagaagccatcatacagatatgtgagtagcaacatctatgtgcttccatgttacaaaaagaaagattattaaaattgctagaaagtatagttttacatttagctatgcagctcttcgatttattaaaacataaattaaatcatcattctcagtaaactatcgcaagaacaaaaaaccaaacaccacatattctcactcataggtgggaattgaacaatgagaacacatggacacaggaaggagaacatcacactctggggactgttgtggcatggggggatgggggagggatagcattaggagatatacctaatgctaaatgacgagttaatgggtgcagcacaccagcatggcacaactatacatatgtaactaacctgcacattgtgcacatgtaccctaaaacttaaagtataataataataaaataaataaataaaaataaataaattagtaattataaaaaaacttagcttatgttaaaagttcatggcagaacgaaaaaaaaaaaataaatgaaatctcaagcaactagaaggttgctgcatttcacttttgaaaggtaaaggtaaatgaaaacaaagcaatcttatatcaaggactgattttttaacacttactgtaacatccagaagtatatgtagatgacacacattctgcatatatggaactctcagctatataagatggtcttcaaatattaaataacaactgacacagaccctttcagattcctgggagttccattaattttatgacaccttgccagagcattaggcaaggtgttgataccaacgaatgccatcagcacatgtgtgtctcaggtatgacccgctgagctctacagatcagtctggaaaggaataatcctgcatgtatttggttcaatagatgccatatgctatcatcaaaagctgtggaagaagatgcttcagtctatagccaataaaaatcaatcaacctaaaggcagaaattcatcaatgtatataaaaataagtaggtgaaattgtaataaagaactggatacttacataagtctcatggtgttgcccaaaaaattacttattcactccaaagggagcaatggtaactttaccatggagagagctggtagacatcattttaaccatgtgagcaaagctactatcaccaatattgggacaaatagacacatgctccctgatatgatgcatggagaaggacacaacatccgccttttctattcctaccataaatacagaacctaaatctacttaggaggatacatcagacaagacaaatagacattccacaaaataaatggcctctacttttcaaaaatgtcaagatcaagatgaagacaggctgaaaaacagttctagattaaaggaaaacaaactgtgacaaataaagacaatatgtgatcttggatcagatcatagactgaattaaaaaatgcctataaagaacactattgtcactattggaaaaaattgactatggttggattgtggattaaataatagtaccgtattgtatcaatgttaaatttcctgattttttatcatgacagcatgattgtataagagaacattcatgttttataaaaatatatgctgaagtatttagtggtaaaggggtatggcatctccaattatctcatataacccagaaaaaaattaaatgcatatgtacatataggtatgtatgtgtgagtatacacagacacatacacacgtagagtaggctaaaatgtaaacaattggtgatttgcggtaaaggttacccaggagttgcttgtaccaatcttgacacttttctgtaagtttaaaatttcatcaaaatgatatcaagaaaaaatcatttctggaaaaacttaatccacaaatatttatttgtatcacagtgtgtcagctgggcagaattttacagtttctctagtctgctctatctctttcaaaggatactggctgccatcttactacatttggacatagtcacttgagtggctactcttagccaagttaatgtagggtatagccttaaaagggtgcttttcttggaggtcccaacaaagacagacctcaagaaacatgaggaagtaaacagtttattgggagggaaggaccaataactattccagaaaggttatagaacatgaaacattttgttgtttgaattgtatgtcctatttcaatacatttggaaaattccctccaaaaaaatgcagcacattttttaataatgtgcatctgtgagctgccgtcaaatcattattgatttaaaaaatcagactagcttaaagcaagatagctcagtggtagcattaattttttttcagatatgtatatttttttcagatacagagagataaacgcttttcccaacatcaaaaagagcaaagctaaagcttagatttgtccactcctttattcactgagcatgttatgatcatttgctgggggctcagccgacaaggaaaaaaaaaaatcacacctggaaaaaattcttcaagcccttctatgtgccattactcggccttgaacatccagtaattggctctcaaaaaggcatgtgaaatccacatgcacagatcaaaatcttgattaattcccatgccctccccgcaagcctgctcctccctctgtctttcccatctcagaaaaatggtgacttcatttttctagttgttcaggcccaaaactctgtggacagtcttcattccattctttatcacacacccagcatctattttgagagcaaattgtctgttctaccttcaacatatatcccaaatctgaccatttcttaccacctctacttctaactctcagaactaagcaccatccaatctcacctggattatcaaaatcacctccgcctggtctcccagctgtgaccttacaccccacgcctttgctcacacagagactagatttattttcaaggggaggtcagtgcattagtgtgctagggatgccctcacaaagtactacagtctgggtggcttaaacaacagaaatttattttctcacagctctggaggctggaagtccaagataaaggtgtttacaaggttgattccattctgaagcttctgttccttggtgtatagatggccacattctccgtgagtcttcacctgatttttcctgtgtgtgtgcatacctacgtgtcctaatctccttttattagaaggacaccagtattattggattagagtccaccctcaggactttattttacctaaattacctctttaaaggtcctatctccaaatacagtcacattccaaagtactaggggataggacctcagcatataaactttggggagacatagttaaccctaaaacagaccacacactcctcttgacagctttcagtggttcctcttaacactcaaaaaaaaagccaaagttcctagagtgacctactaggtcctacctaatctaacctcccagaccactctgacctgtatcacattattctcctccttactccctcaactccatctatgcttgtctctttgctttcccaaaattgtgtgatacacatcccaggccaaggtttctgcactgctggctccttctgcctggatccctatttttcccagatattcacatgatttcgacttcatttcctcttggtctctgcacatattatggtaaggccctctccagtcactctctatataagaacaaacaagccccaatgcttctgagacagccaggttggaagggtttcctggcagaacctctgaccgacctgcgccctggggtggagcctttggaagttcttttgcagcagggaggagcccagcccctcctcttcctgggtggtacctggaattcaatctatgaggcaggaagcccattaacaggactctggctttgtggagggtccatgtttcccttttttccctttttgcccaataaattccatttattctcacccttcaaagcatctgcgagcctaatctattatggccatgtgacaagaacccagctcttagctgaactaaggaaaaactcataacactccctacctgtttcctagtttatgtttttccatggcacttaacactatctgacattacatacatttactcatttacttccttataatcgtcttcccccactcaaatgcaaatttgttctggcagaaaaatcggtcttttttgctgacaactttatccccaacacttagaactctgcttggctcagagtaggcacttggtaaacgtttattgtgagactaaataaatgtgtttattttattggcttgcactcccagctttgggatcaatataaaaataagtagcatatttctgccttcaagtagaagaggttttttttgtcctgagtattagttaccatggttttcttcttttaaagaaatgccaagaaataatggagaaaagcaaaattttatttagttctgcaaggtaaccaaagaatattttctagactattaattccctcaagataaggaacaagttctatgacagcacgtacctcttttttaaaaaaaaaaaaaaactttttaccaggtgcagtggctcacgcctgtaatcccagcactttgggaggccgaagtgggtggatcacctgaggtcgggagttcaagaccaacctgaccaacatggaaaaaccccatctctactaaaaatacaaaattagacaggcatggtggcgcacgcctgtaatcccagctacttgggaggctgaggcaggagaatcgcttgaacccaggaggcagaggttgtggtgagccaagatcacaccattgcactccagactgggcaacaagagcgaaactccgtctcaaaaagaaaaaactttttaaacataatttttaagttttttttaaaaataaagtacatgtatacataaagagtcaaataatttcacaaggttgttactacaatagcagtcccttaccaccctcaccacaccgtctatgtagcttctcagaggcagccattttgaactccttcaactgattggtattgaccgcatttcattaaatcaacaatgcctgtgattctacgatgcaacaaatgctgccagttaaactatggtacaccaagagttaggcatatcctgattatggagatgttgaaacgttaaaaaaaaaaaaaagtgtgtctcagaattgatgaaatgtggtattttcatttctttgaataacagacagcttatacttctttattataaagttcgtgagccatagagaagacattttaaaaataattatgcctggtaagtggtgtaattgtccctctctatagaactaaatcaaccacaaaatatgtcactgctctgagggtatttttaggtttccttttttagactatacatatacacaactcaaatggcctcctcccacttctgttaattctgcctggataatttctatttacactactggttccaaagttttcatctctcaaaagagacctctgtgggcccagagggaacagattgaaagaccctaataggttatatcacttcatttaatggtatttagtgacagcaaggactgaaagcctgaattggaaaggaaacccttaattctacccctaattatcatgattaagtagaagctctgacatttgattttcttcttttacttggaattcttgctgtctttcagcatccacagtcagcatgctcagaaggctttctgttgtaatgagctgaactcttggcctgacaaaagccattctctcagccacacattctacttgcagccaaaggaatccaggcatgattccccccagcacatcaggccattgaagcccctccacccccagcttttgcccagcatgtttccactacaatgaagcctcttacttgcatatctgcgtagctaactcaattcttatgacccagctccagcatcaccttcaaagtcttctttctttttgactccttttatctgtgagttgctactttcccaagcctcctacagcacttagctaatacctgaatattagtgttgatcactatattagtcagtttaggttttgctacagtaagaatcaacactccaaatcttaattattgtgtaaacaaaggcctgtttctatttcaagcgaagcctgctcaagtaagggtgattctctgggacaccatcctccacgcagacacggacattcagcctggtaagctgtagcctggaccattgggaatgtggggcccattcattcagaacagcagtgggggagaacgctagcctagaatttatgctgtcacttccatgcacagcccattggccagaaatagtcactttggtcatgcctaactgcaaggggaaatctatgcccaggaaatagcttaagatatgagtgagcggccgggcgcagtggctcacgcctgtaatcccagcactttgggaggccaaggtgggcggatcatgaggtcagcagatcgagaccatcctggctaacatggtgaaaccccatctctactaaaaatacaaaaaaattagccgggcgtggtggcgggcgcctgtagtcccagctactcgggaggctgaggcaggagaacggcgtgaacccgggaagcggagcttacagtgagccgagatcgggccactgcactccagcctgggcaacagagcgagactccgtctcaaaaaaaaaaaaaaaaaaaaagatataagtgagcattacaaatctgactgtaactaatccagtcaaaggcagtgtccccaaagagagggtgtgagcatcttaatcagtggaatcatggctattcatctcactgctgcatccctggttccagaaacaatgcctagaactgaaaacgtagccagtaaatattgcatggatgaattaatggtttaggttaattgagatcagctgcctgggactgagggcgagtctagcttctccaaaagtacgtggctgcccaataacagaaagaaatcaaggtttgttggaaaaataaaggagataaaatggctgctgagaaagtactggtgttggctgcagaggttcagagacctgttgattgagtgaagggatggatgggtggatgggtggatgggggctgtgggggatggtaggtacattatttccctgtccctattgccactgctcctgcccttgcaaagatcaccatcattatcacttgattattaaaatggctctacatgcatatcatcgtctaccaccatttttctccttctcaatatattatctacattgatgtgagaatcccttctaaaactcagattgaatcatggcatcagcctcttttaaaaaattattccataatttaaaaaaaacccaagtccttcatatgatagtcaagatccttcacaatttgattagaacgtgtccacctctaccttcctccacctacatggtcttcccaaacacacccaattagctttagctatgctatacaattaaagagtgtatatctccacacttgtggtcctctgcttagtcttccctttttgtttctatcagctatctaggtcaactattgcttcctccctgaagccttcctagaactcttcagacagaatttgtcactcccttttctagttctccaattatacctggtgtatacttctgaaaaaaagaaaaaaaaaaacttcccttaggataatctgctttatatttgtatttaaactattagagctgggaaaaggattcgctaggtttgtatatgcatctgttgtattgtggttttatcagaggcatttgaaccaaagcaactccatcttgaatcggggctgggtaaaatgaggctgaatcctgctgggctgcattcccagatgattaaggcatactaagttacaggatgagacaggaggtgagcacaagatacaggtcataaagaccttgctgataaaacaggtatcagtaaacctacccaaacctaccaaaaccaagatggccagaagagtgtcctctggtcatcctcactgctatactcccaccagcgccatgacagtttacagatgccatggcaacatcaagaagtcaccctatatggtctagaaaggagaggcatgaataatccaccccttgtttagcatttaacaagaaataaccataaaaatgggcaaccagcagcctgggcactgctctgcctatggagtagccgttcttttattcctttactttcctaattagcttgttttcactttactctctggactctccctgaattatttcttgcgtgagatccaagaaccctctcttggggtctggatccagaccactttcctaaaacactttattgagaccgacagccatatttgactctcttgattagaataatgcattgcatattataagcagtcattcatgctttcattcaacaaatgctgtggagtgccaaatatgtgccagaccatggacaagacaattaacattcatagaaatgaattaaatcctaagtagagttccattcacccacagcccattgtcattttcacagagtacataacgccatgtgatgattaattcattaattaagctggtttcctaacttagtgtgaacttcattatcttgtccaaatgcctatagcactcttgatacacagtcttagaacaaaacagagaccctcactgtgaaatacttcccagataatagctcatattcatttcttaagagattaggttgccactctctgaattatatgaaacttttcattggcccacctgaccttttggagacacacttgtattggtgacaagatgcagaagttgggctccctgcgtttattgctgcttatatctcattattcaacacgaaatgtttgtgatgtttttaagatgatccttaatcttttcaatggccacacaaaactgttcttgtgtacactggggcttccttttacttctttgtaaggcactgatagagaaaaatgtacgtgttttcaaacagctcctattttcttcacagagcagaggtagggcatcgaaatgtacgctgcatttcctttctatggttttaagagcgcagagctagccctccacggtaagccatcaatcctatttcagatccagcccctgaacctccgttaaagctaatggagacaattatgtccataaaccaaagagaaaagaaaccccttcatttgtaaattagcccaattccagtagattctctacgtcaagccaggaaagaataacatgaaaacatgtcaatcatgagtccctctatttaattgcctgaaataagtgttgatctgggaagcttaccactgccactgattccctctcagaagaaaaagaatagcgaactctcaacagttccttgggacactggtctgcaagctctccctattttcttcctaaatctttttggtaaatgctaaatgaccagtctggtgattgcttttggtgcccccataaatcctcgtagaccaagtctcactttccggaacccattccttatggagatagattggctttctttccattgtgcccattgtttattagaatgaatgagagtagacatctctgtaagatggtaaaatactgaaaagtacttttctcctttctatgaatgactgcacctaagaacaactgcatctgaatttggttctcatttaagaaagtcgtacgttgactacctatgataggactgaaatctccaagagcactggcccagaaaagtatttggaatttacagttatcttaggaatttcttcctttcggggggcggggtgggggggaagacactcagcaagcatcccattgtcattgagatgtgggtactacagagaagcttctgacacaacagccaagattcacctcctacttctcctttaggagaaaacctgtgtatttcaaaaatgaaatgaggtgcggagatttatttccacctacagaagctgtcatccatgcagcattcccctatgacattccatcttcatcttcttgcaaccttctttgactattctcctcttgcaccacagtgactaagaatataactcacaacaagaacatccattcttttcagtctggacactttgccttcaccacggatgtgctgctcctggttaataattgtgctgtagctaaggctgcttggtcctgacagccagagatcccaggagattaagagaggaacagttgccttcccttgttctcattaattctgtctacattcaaagtcaagccctttatgcttcaaaaaaattatttcaaacccaatattaaagctatagaaagataatatacatggatatttacaagatattttatgaagatacacaattaggacaaaactgaaggaaattaagactgtcaaaatgttaataaggatggttgcagcattattgataataatgagaaattatttctgttgtattcactactgagtagccagtgcctgtacactgcctgtacactgattgcttattatagagcaatcattaaatacttgttaaactgatgaatgataaataacttattagactttcctagtttaaaacttcaattccttttaggtcagaaatataattatccaatgatgctaccagtcagaaccaaacaatacctgcaggtattgggtagggtagggacaactccatgggatactgcaggtattgatgtgggtagtggttgcatgaaaatacacacacacacacacacacacacactcactcactcacgtactcatccagatgaacatttatgattagtgcattttatatactttattgtttctatgtagcctcaatttttttagaaagtaggtaactatggtatgatgcttctaatctatgtgaaaatctgttttgttctccactgagaaggccctttctctacttttgctttttgaggatcttttattcctgggcctatttgtctgctatttgattagcatatacctattggccctattttccattagctctttcttaaatggcttatagtcccagataattgtctgaattcattttgcttttctgaaaaacaaaacccacaaaacttgaaaccataaaacaaaaacctaaaaaaaaaatacaaaaattgtcaaacacatttggacacactagaatatgattttacaaaaataatgtaaagctgatcactattcagcattcttagaatcctaagacttctaattaaggaagcacccaaaataacatggaaacaacctctacagcttgcaatgattggggctctctcaccaaacaactttctactctacttagagagcacctaacaacttcagaccacagtcactggtgaatgtgctattatgaatggagacccccttacaatgtgactttgaactggccctatagcccctttatccaggcttcaatctccccaaaacacaagaggctgcaattagatctaaggtcacagtcaatgctatctttctctgtttcaataaaagttgagtattagttatattagcagtacttctgaggtcttcaagttgattgaataactagatattgtaccactatttaaaacagccaaagtatggaatcaatccaagtgcccatcaaaggatgaacagatgaataaaatgtcgaatactgttcagccataaaaaaaatgaaatcctgccatttgcagcagtatggatgaaactggaggtcattaagtgaaataagccaagcacagatagacaaatatcacatgttctcactcatcaatgggagctaaaaaagtggatttcatcaatatacagagtagattgatggttaccagaggccaggaaggggtggggaaaggagatgatgaagagaagttggttaatgggtacaaatatatcattggctagaagaaataagacctagtgttagatagatcagtagagtgactatagtttacaatatgctattatatatttcaaaatagctggaagataagaattcaaatagttctagcataaagaaaagacaaatatttaaggtgacaggtatcccaggtacactgatttgatccttacaaattatatgaatgtattaaatcatcacatgaaattatatacatcttctatgcatcagtttataagaaaaataactataatttattttctttcactgtctacataaaaataatttaggttttatttcccaagtcaataatgcaaatgattgttgtctcatgtaataaaagtttaacaaatactagttagaggcaaggaacttgattctttgttacagggcaccaaattgagtatacttcattgtctctccataaatattaattaatgactttgtagctattaaaattattatcttcagtgccccagagttaatacactactactaagtaagcagctcatctccattttagaagtctggactatctttagaattttcctagagtttataatcagaccacccttgatgttataagtattaatattttgaccaaactgggtgaaaaccaggaaaagtcaaaaataaaggttaaaactcagctttgtacttgttctgtgaacataaaaggccagaaatgaatgaggcatatcacattaagcttctctgcacttctgtactaatctgctggccggattagtttggttgttttaaaggaataatgagcccaagttattgtcttaaccttgagctggaatttctgaatattgatttagtttcaccatgaactaagtggacgtgtactgctaaactgaagatatctattatttcttcgtcatcgctatcccttgttcaagaatctgcctcacccacagctcagaaggggcaagcccacctatgacagctgctaggattggggaaggtggcacccaacctagaccggcccatgagatcctcccacacaggaatttgaaagtgagaaacaaactgtgaattcatcagatggtgttgaattgaaagcagggccatataaagttaggcaccacttggcatgtagaaaccaaatacaaggtaaagtcatggtgatcaggaaccaggaagctggctgagaaagctggtaactgagtggggaatatcacagatcacagaggaaagatttaacccaaaaagaacgggttagagataatgcatgccttatggcatcctggtcactgtgatacactgctatactcctggccattgggtttgtgtgtgttttagtacatttaaagttgacacatattatacatatttatggagtatagtgtgatatatcaatgcatatctgcattgcctagtgaatgctactgggttttaaaagattacctgtagtcttaatcaatctccactttgctgtgccattgtaaaagtgataaatatgagtatttatagcctcatcctgtctctcacattcatccacattcacatttacacacactcatataattggtacatacagccagtacagaattaaagaaggcagaatgattagacttgatgtgtattagaaaagaaaactactcaaggtgggagcctgcgctggagaaatatacccaggatagactggggagaagtttgagatcttttgagagaattaaataagactaaaggctgttaggataatgaatgagacattagaaaagagtttaaaaagtttttaccatttgtttaagtggaactcttttttggaacccttcaggttgttttggtaaagattttattttccaaagtgttcttaggaaatcgtcttgcatttctttcttaatgagagcctggctgagactggacagaaggtgacccagtgttatttgggttatggcaaaccccaatctctttcagacatgagtgtttctcaacagaattctaaaagcatttttagtgggacaattcttcattgtgcaggaccatccattagcttgaagtacgttagcattactagcccctgggcactaaatgacagagcacttctcagtcactgtgacaaccaaatacattctgcacccatttccaaatgcccccagggtaggagaatactgcctgtggtggaacaccacggatctagacattaataagttggtttccattcattgcaatgaaacaattccagatgaagacagtggctcataaataagcatatgagaatcatttaattcttccctaaagcactcaactcaaatatacatgggatcctagatagcaaacatgatgctatttgcttcatcatgaacaaggattgcaaatgcagcataagatattatcctcctagtctaacacaaaatcctgaaactgaaagtgggtaatgacaactaacgtcaatgggaagatagcagagtaggcctttcacaaaaaaaacatggcagacagcaagaagaaaatgggcctcagtctggagatgaggttaagaaagtttgtgacctcagaaagataaaatcagagtaaatccatatgctattgtttagatgtttgtcccatcaaaatttgtgcagaaatttgatccctggtcttggaggtaggggcctaatgggaagtgcttgggtcatgggggtggattccttataaatagattaatgccttccctataggggagagtcatttccacaagaactggttattataaagagcttggtgcctccctctctctctctctcgctttctctctcactgtgtgatctctgcacacgttggctccccttcaccttccaccacaagtggtaacagcctgaggatctcactagaagcagacgctgggaccatgcttcctgtacagcctgcagaaccaggagccagataaaccccttttctctataaattacccagctgcaagtatttccttatagcaacacaaaatggactaaaacaacatacctttgtatcaaatcccataatactgaggctaaaagcatgaacagaagttaacaatttgagcacaccttgtactaggcactagttagaaaatgctaccattcttagacaaataaaggcaagtgctgcttcataagatgaggttcttaaaaactgtggttcagcaaaagtacattttaaaaataagatttgtgcactggtttctccgtctaccctctacaatgttcttctcccagataatcacgtgagccacttgcccaccattttcatggctgtgtgaaaatatcagcttctcagtgaggttacctgaccacccagtttgaaacagcagcttccactctgagctcatcactgtctgtttctcttatctgttcttttccacagctcttctcaccattcaatacactgtgcattcacttttttttttttttaaatctaggtggaaggcagtccgttcactgggatgtaatggattttttaaagtctagattgaaggcagtatcccttcatcgtgatggaaggaatttaaaactttctagttgggaagacaaatgaaaagcctcataatgaggttaaagtcaaggatgcaaaagaaacctacccccacaaccacataaatggcatgataatgtgtatgtgttgcctcagacaccacagtgactatctttgtatgaagtataaagcagaccaattcagacaaaaatgaaaatgtaccagaaaaaaataatttggaccctgttgaaaatgaaatctatttcaaaagcttcaatcctctctttactgcgattgtctataagtgactatgaatttaagaagttgtgtttcattgttaattgcaatatttttcaaagctattatactctaggtctggagaccacagttgatctaggtttggtggtctgctacagagggagatttcttttttgaagggtttttttttttttttggcggggagcagggtgggatgagggcaaaagggggttaaaataggtggcaaatgatagctttcatccttagtgaaaagccatggcttctagaaatgtctaccatctgatagtcattcgacaaatgtctattgagcacccatatatgccaggtactgttctggacccttgggatacatcaacaatcaaaacagagaagcagcctgtcctcctgcagcttcctttctggagaaaattctaaaatatgactaggtggtcttcgattaattggctatttttctttagcagaaaattttgtgacagcattgagggttaggaaagagttttcaggccaggtgcggaggctcacacctataatcccagcacttcgggagacggaggcggggagattacctgaggtcaggagttcgagacgagcctggtcaacatggcgaaaccctatttctactaaaaatacaaaaaaattagccaggcgtgatggcgcatgcctgtgatcccaactacttgggaggctgaggcaggagaatcgcttgaacccaggaagtggaggttgcagtgagcagagattgtgccactgcactccagcctgggcaacagcgagattctgtctcaaaaaaaaaaaaaaaaagaaatttaaaaaaagaagaaaaaagaaaagaattttgaaaaattttctggtgctcccttagaaaccatcactaaaaatttcatctttgcttctgcttatggtattgaaagctttttgttcatatcagaaatatatatgcagagttttctgtggtaaggaattgtgctaagaagcaggaggggatataaacatatgtgagacgtatctgtcaacttatcctttgatgggttccacccataccacggtttcaaaggaaaatactatcatctctgtgttgcaatggccgggcaacatcattctgcccatggtacctccagtaaatacagaacagagctggaactctgcctttcactcaattaaagccccttgtggttcagatgtttacacaatggaaactaacaaagaaaccaaaggccaaacagagtggttggggcagaagggtcttttaatcctgggtctgaggaccaatgtcctaaagggataaaagcccacccaatgtcaccagaggcagaaataggatgcatgctgcctgtcacccgatgatcagagaccatatattattctctctgttcagatccatcattgaggtttttatgagagaaggctgtcttgaaggaatgctttatctcggtttgcacatactgcaagtcaaccagagttagagggagctgccatgtttgtgctggaagtgatagagctgggctgcaggggggtggaggatgggggaggtaggagagcagacgtctattgatttggtgttttagctaatcgacctatggtttgggactcaggatgtggtcaagtgttgttaaggcatgttcaggaacaatacttgaccacattttgaattccaaaccatattctacaactttttccacatatttggtgtaatcctccattttctatttttgagttcgacaaaaaggggtcaagaaaatataaatgcatttcgagagttttttagacctccaaaggtcttgaagaataatattttgaggagttaggtataaataattcagaaacatatggatagaatttacttctacatatcagaatgtaacacaaagtaaggagaaatatttgactgtactctgcttggtagggtcccagtgtttgaaagaagtgcagccgcatgaaccattctgggctgcttcctgtcccgcttttgtacgcatctctctctctcttgctttcaagctgcatgaacatgtacttagacctcaggtatattttaaggaataacagctggtagtttgagggacccatacatccctcacgtacggccatagatgctatgttcagcaaatatgaacaaacacagcaaaaatctatgctgtgctctccgccacatcgatgctggcttttctagcattccatccaattccagctttctgcttgtctcagaaatggatgggggtcaggggtgtgacaggaatagcttcataacttgaggaacccagtacaaaatgaaaatgtgggccccttgttcaataagtattaagaatgttaggatggcaacagcagaacgttcgaagaaggctggggagtttggcctaggaagctggccctgcgtggtgatgccctaaggcattttttcccctctaacatttcttctttttctttctttcttttctttccttccttctttctttctttctttctctttctttcttgagatggagtctcactgtgttgcccaggctgcagtgcagtggtgtgatctcaactcactgcaacctctgcctccctggttcaagtgattctcctgcctcagtggctgggattacgggcgtctgccaccaccgcctggctaatgtttgtatttttagtagaaacagggtttcgccacgttgcttaggctggtcttgaactcctgacctcaagtgaccttcccaccttggcctcccagactactgggattacaggcatgaggcagcgtacctggccgcccttcaacatttattttggcaaataaaaacaagatgatggcagaataataaatgtgaacaccgatttaaaaggtagtatggcctgagaatgtaatggaaggatttggatttcccaagcactgctaactaaaatcaagagacaggaccagatatcagcaaacatttcaaaaggaatcaccgtatggtgaaaagaaatgaagctgtagacggaaccagttgagttctaattagcaaagaggtaagcaattcagaagagtggtgaggctacagttcttgaggctattgtgctatttgttttttttaatagagactctaaggaaagccattaatgcaaagaaaggaattctatttaaacctgatggtgctgtgttgcattaggttggtacaaaagtaattgcagtttttgccattaaaagtaataataatttggcctgtaatcccagcactttgggaggccaaggtgggcagatcacctaaggtcaggagtttcagaccagcctcatgcttggcaatgagccaagatcgtgacactgcactccagcctgggtgacagggtgagactccatctcaaaaaaaaaaaagtaatcataataacaccaagaaagttttaaaataaacattgaatcacttttgggatgtttaatatgtgggcaagtctctgcttttgcaattttttattttttattattttgagacagagtcttattctgtcgcccaggctggagcacagtggcactatctcagctcactgcaacctctgcctcctgggttcaagtgattctcctgcctcagcctcccaagtagctgggattacaggcatgcaccactatgcctggctaatatatatattttttttttttttttttttttagtggagacggggtttcaccatgttggccatgctggtctcgaacacctggcctcaagtgatccacgcgcctcagcctcccaaagtgctgagattacagacatgagccaccacacccagatgcttctgcaattttttatttgaccacatgctttactcagtgttgcctaaatagagatctctacttcttccctcacagttgccagagatgaataaacgtgtaaagcaacaactcttgcactctgaagtcaccttacaacaatgtcttttacgatgagtcttgagaatgagaccaccgaatctaaatgtaggcattgcccataacatttgtttctagaaatgttgtacatggcctgctcttatgtatttatttttaaaagaaatattttttctgctgataaaaatttaagcgatgatacagaagtgtgcagagtacaaaactgaaatctcttgtttatttccatctcttttgtgagaagcctgttaatatcctttgaaattcttctgcaagctttgtcatattatattataaagagcactttataagttcagtattttttacagtttctcattcatcttttttgtttgtttgcctgtggggtcgattaagacttgcttttagaaaaaaacaaggagacgaaaacagagtgtgggtcacattctttacacagagttcactctcatttttaaagaagaattgattctattttttagctgatcagcataaagtgctttattaagcataaacttgtaccatgtactttatcttatttatttaagatggatgaatctgttttatgcatatattaaaaagttatcaaaaaagcaacacccagtgcttcatatattacagaaaataagtgttaattcaataaacaaactagaaattcttcagtatgccaaagacttggctttagatgaactatcaatttaattccattcagcaaacatctgttaagcatctgctggtgctgcctttactgaatgagctgcttcctgcagatcgaaggatgagctggactaggttctgacccagggcaagtctgctccatctgacttcttataggtggtaaaatgcacaaatactacaggctaaacgaagtactacaatgaaagaagtctttcctggcaaagtggaccacgggacttaataagtctttcatttcaaatctatgtcatctcataaatagcagagcaatgtgtgacaacacaaagactttattcccttcatagactccactaggggacacttcccagaagactggaaagtatttcaaacaacataatctacacttctcagactgagttagcaaagggcatctgaggacacatttattttccctgagcttcttttctggagctttttcaattccctgcaaattttcaagatttggtaattggtggctgatcccagagcaacagcaatgaatcaggcgggtgtgatagcaaggaccactgggacactctgtgtacaccgaaaccatcctaagcaagccaagctgaggaaattgaggctgtctatgaattcccactgagctgggcgtggtggctcacacctgtaattccagcactttgggagaccgaggcaggtggatcacttgaggtcgggagtttgagaattcctgcagagaaaaaattaaattggaaagaatagttctgtctgagctgatcctcatttctttatattttaataagttgaggtgacatgaatggaagaggcttcctttctcaccactgaatctattgcatttgaaggtgtgcttgcacagctggaaatgtgcatgggtgtatgtgtgcatgtgtctatctgtcttcaggaaaaggagatgatgacaagttagggtgagagaggcggcaccacatggccctgtagaagcaaggtggaagagatggggatgtctacaggaagccaggctgcaaattgcttcggccctaggtattactctttcctgctcaagctgtctgatgcctccttcctttggccttgcctttgctgtgccagggagggcagccccagggcagacactgtggtctggggaggatggagtagagtgaatggagcagagggcacttgactctaccccttcttcccaggtattcccccatcttcctcaggccactgaagcctcctgaccacctagatttaactggacacatattatcaacctcacccttccactaggcaccagccttcccctgactacctctaagacacttccagatactataggttgatgcaaaggtaattgcgacttttgccatgaaaagtaatggcacctttgcaccaacctaacagagaagccagcttaggctagtgtcatcaaaaacggaggattaggagatatacctaatgtaaatggttaatgggtgcagcacaccaacatggcacgtgtatacatatgtaacaagcctgcacattgtgcacacgtaccctagaacttaaagtataataagaaaatatatatatattctaaaacaaataataaataaaacaaaaaaggtggaaaggagaatttattagaagactacgggtgtatctcatgggacaggaatgcattcattcattcactcattcattcattcactcaaaaaaataagtactgagtaaccagtatgtgccgggtagagagacagacgctgtggattcattagtgaaagagatagacatgctctctgcttctaccttgttaaagagacagacagtaaagaaatcatcatacaaatatgcatatcattataaattgtgttgcgtgctctagggaaaagccataggatatcttagaaagtataacagggggacttaactcagatgtagattgttgtttccggaaagactttgctgaggagtggtaggtggcttcagggatgaattctgccaagcaattaagagagaaattttaccgccgggtgtggtggttcatgcctgtaatcccagcacttcgggaggccaaggcaggcagatcacttgagatcaggagttcaagaccacccagcccaacatggtaaaactctgtctctactaaaaaatacaaaaattagccaggcgtggtggtgcaggcctgtagtcccaggcactcaggaggctgaggcaggagaactgcttgaatcggggtggtggagatagcagtgagaattgcttgaacctgggaggaggagattgagatcgcaccactgcactcctgcctgggcgacagagcgagactccatctcaaacaacaacaaaatgaaacaaaaaacaaacaaacaaaccaaaaagcagaaattataccagttcaacatacacactttgagaaaataggagaccaattctcaactggttttatgaagtcagcactaccatgataccaaaactatgtaaaaccttacaagaaaagacaagtagagagctcatgaacatatatggtaggtagaataaatgtccctctgcccctcagtatgtctgcattctaattggcggaacctgtaaatgttacgttaatccttatattgcagatgtgattaaagtaaggattttgaggtgggttatccagttacaactgatgaaaccacagcagttcttgtaagtgggaagcaggaggtaattagaagataaggtaatgtgatggcaaaagcagagattagagggacatgctttgaggatggaggaaggggccacaagacttgaaaagttaaagaaatagtttcccctctgagctccagaagaaccagcctggtcaataccttgactttatcccactgaaatggcatttggacttctgacctccagaactataagagaaaacaactgtactgtttcaagccactcaatgcactatggtaacttgttacaggaggaacagaagaccaatgcagcataattgtatgagtctgcaacaaaattttagcaaaccatgccaagcaatttacaaaaaatataatatatcatcaataagtgagatagtcccaagagttgaagattggtttaacatttttgaaaaaaaatctataattgaccatattaacaagtttaaaaagaaaagccatttgatcatctcaaatagatacagaataagcatttgacaaaatttagcacctgttcacggaaagaaaaccacaaacctctgccaaataggaaaagaaggaaatttcttcaccttaataaaatatatctactaaaaatctacagcttacattataactcactataaaagaaggaatgtgttttagaaataacatgtctatacttaccacctctattcaatattgtacctagccagtgtaacaaaacaagaaaaaaaaaggaatagacttggagaaaaagaaagaaagctcttcttttcacaaatggcatgatctaattctaaaaaaccatttttaaaaaggctactagaacaaataagggagtttatagcaaggccacaatatacaagatcaacatagaaaaattcagtgtacttatatatagtcgcaataaaaaattgaaaattgggaagtgaattatactaaaatctgaaacattttgctgagaaaaaaatttaaaaaaacataaataagtggagagatgtatcatttcatggatggaaagacaatgtggttaaaatcctagcagacatttttggtagaaattttcaagttgattctgaaagttacaaggaaatgtggagatctactatagctaaaataactttgagaagaaaaaaatgttagagggcttaatattatttcaaaacttactataaagctatggtaattaaactttctgtccacccaaacagaatatacatattgatcaataaaacagaatagaaatagacccatgcatatatgatcaattagttttcaacaaagaaactgaagtcgttcaatgggggaaaaaatgttttttcaacaaatggaactcaaacaatgggacattcatatgagaaaaaagtgaatctcaacctcaacctcataccctattaaaaaaataattcaagatggatcatatatatacacacatatacatgtatgagatatactagtatatatacatatattatataatatataggatgtcatatattatgatatataatatatatttctatgtatataaggcatcaggtgtcttatatatacatatatgattaatacagattataatatatgacatcgtatatattatatgtcatatattatgatatatatctcatatatatatatcagagcacggaaacataaaccgtcaaagggaaatttgataatttgatttgataaatcaaaagatttcattttgtccttgaaaaacattgttgaaaaataagggccaggtgcagtggctcatgcctgtaatcccagctcattaggatgccgatgtgggaggatcacttgaggtcaggagtttgagaccagcctgggcaatatggtgagaccatgtctctacaaaaacactttaaaaagaaaaaattattcagtttctgcaccagatgacaaaaaaagagagagggaaaagaaaaacagaaaaaattatccaagcatggtggtggatgcctgaagtcctagttactcaggagactgaggtgagaggatttcttgagctcaggaagccaaggctgtagtgagctgtgattgcaccactgcactccagcctgggtgacagagcaaaaccctgtctctaaaataaataaaaataggcaagtcatatattttgagaaaatatttacaaaacatatatctgattaaagatttttagcagaatatatatgaacatttataatttattaagaaaaaagaaaagcaactggtaaaaacccaaatggccaaagatgtaaacaaacaccttacaaccgtaagtatggccaacacaggctatgaaaaaatattcaacattagcagccatcaaggaaacgcaaattaaaactgtaaaaagatatgacacaccactagaatcaaaaaaattacaaagattgaaaatacttccattggtgagggtgaagagaaactggaatcctcattctttgctatacattatataactgctttgtaaaacatgttgatgattttaaataaagttaaatctattcttattttactactagaaattcccctcgttctagtagccttttttaaaatgattttttagaattagatcatgccatttgtgaaaagaagagctttctttcttctcccccaagtctattcctttttttttttttcttgttttgttacactggctaggtactatattgattagaggaggtaagaatagacattcttatgttattttaaaacacattccttcttttataatgaactataagtgaatggatttttattatatgtaaatcatggctcaataaaactgattttatatgtataaatatttgtatgtacgtgtgtgtatgtaaagaacacataccaaataaagcaaaagaatacacattagatactttaggaagattgcctattggaagcagaggaaaattgtgttgggaaatggaaataaaaggaagaaggaataaaggaaggttagaagagagaagataactgaggtgcttgcatgagacaaaaataatcagcgccattaactgagttccatgatgattaacttcaccctctgcacctgggtgtgaaggggaaaaaaatctttaatataaaagcaagcccagacataatattgcagacaccaggagagaatggactattcaaaaactgatgatgaaacacctgttattcatccgaggaataacatttgacttatacttcacaatatacacaaaaattgattcccagtggaattaagaattagctgaaaaaagcaaaattttagaatttttatatgccagtatcttcatagcttggggtgagaaaggcattctggcacaaaaatgcatgaagaatgagctataaagtaaacactgaggatttcagcattataactaagaactttctttcactaaacaatctaaagatgttaaaaaccaagccccaaaccagaagacatgtaacatatataccagaaaaagatgagcacccagcatattaagaaagtgataactaatagaaaaatggacaaaaaaagatgagaagacattttcctcgaaatgaaatcacaagtggggaatagctgatgacaaaagatattcagtttcaatcgtggggcactaaatgctaacaccacaacatgagagagacaaaaaatttttaagttaaaaagatactaagtgttggtgaggttgtggcacaaggggagctcttacacactcagttgagagcataaagtgttacaaccattttggaaagtaatttgacatgatctagttaagtcatagatgcacatctccgtgactctgcagttccgctcccagggaacaccctcaaaaaaatcttgcactagagcaccagggagcatcctcaagaatgttcatgaccacattatttataatgccaaaaaaaaaaaaaaaaaaagacaccagtaagtctatagactattgcagaacaattaaaagtcactaattacaattacatacactaatagattttattaagcatacatttcttaaacatgaatttttttcttttatgtatgtatttatttatttatttatttttgagatggagtcttgctctgtcacacagcctggagtgcagtggtgcaatcttggctcactgcaacctctacctcctgggttcaagcaattctcctgcctcagcctctcaagtagctgggactacaggtgtgtgccaccacacctggctaattttttttgtatttttagttgagacggggtttcaccatgttggccaggatggtctccatctcttgacctcgtgatccacctgcctcagcctcccaaactgctgggattacaggcgtgacccactgcacccagccaaaacatgaaattttttttaaaagtcacagaataaaagcagtatactattaatataagcatcaaaaataaacaaaaattaaactacctaaggatttatacttatactattaaaataagcataaaaaatacacaaaaactaaactatctaagaatatatacttatgtactaaaactataataaaaagcaagggaatgataagcataaaaattagaatattgtttatctctggggataaaggaagagaatatgaacataaagtactagcaatatccttaaacggaatagtaagtatatggctgtcaatcattcttcacaccttaaatataaatatataatataaatcttttttacatacaaattaggtcataatcatttttaaatttagaaagaaaaatacaaaaaatgaagaaatgaatagccagggaatttaggtacatgcatcaacaatttttacttctgtgaaaaatataccagaaaatgttgtgttataaagtgataggaggcttgggggctttttctgtgcaccacttttaatttctcattgtatcaacctttgctttagggctcctggctgcagtcaagaagaaagctcagtatttccccttgttgacattttcttttaatcaaagtatatcttttacgtcttcttacaagagtggacactgtttgggcaccgctttgggttagaaaggcaatttatttctcagtggtaaacaaatttgtcaggcaatctggcagcacaaaatgtcaaagtgcccatgtggaaaggaagagggagagaggaggctgctgcaatatttattccatgatgccgtttaattattgatatgtgggaggcccaaatgtacacgggctttttaaagataatatggctgtgctagagacaaacgtgttctgggagctaggctattactacgcagaaatcagccatttagaagcgctttgcttctttcttccaaaaactaaacactgttttgtccattgttactgtaactgtgagaaagaagaaatgagtatataataactcattgtttttcaaattattctgaatatataaatagatacctaggcaagctgttaatcattgttacccttcttccccagataaaatacgtgaggcagtaataaggaattgatttgccacaggttagactttgaaccggggttagaaaatcacattcaccgcctgcctaatcagaggctgattcagtaggacagtgggtttttcattgttttagccatcaaactctttgcataataaagtctcacaaattgttaactaataaaatgattagaagttgagtaactctggcctgaacatgaggatctggggacagtcagctcagtcccttgcctggcaagtggggacaggtggccacatctaaagccctggcagcccaaaaaccactcctgaccttgaagctgctgaaggtcagagggagggagccaggagctttccaagtaatcggtctggaccccaaatggtacggtcttttgttggcccccaacatgaagtcactttctccaaggccagttggcaatgcccaggtggctcagtcagggggagtcaagggtccccagcagctagaacggctcctgccacccagtcggcacccagggaccatctgtcgtgaataagcaaatgaacaagggcatgcacactgaaggagcaatgttggctgactccatcacccattatggcatccgagcccgaggccctcttctgccagtctgtcctgttactgctgaaagaagggacatcagaactcgatgccctaccggactctctcacactgtggtattgaagcaggtgtcctctcatttgtccccaccgtggtctgctgctgcaggcgacaccttcagggaggtccaagtccaccatagcagcagggcctggctgggcaagcccctgcccacagctgtcctcaacaggtccccagtccctgtgcttggcccatggtgccatgttgcaggtgctcctgcagggccttctctgacacccaccctccctgctcttccccgtgaggacactgcaggtgctcgttgtcttgtatcaccatttgtcacccactttcttctgtgcatttggctttcagcaacaggtcctagaagcaagagagggaaggggatcagggaggcctggggttccctactgggtttcacgttctctacaaaggaaataggatgtgagctgagcacagggtggggacgtataacagaagctggctttaaagccaggaacagttagctacaaagaaatccagtcgcagccaaggcgggagaagggaaggacagtgagagaaagcagcaccggcaaggaaggaggagagggagggaggagagggagacaggaagaaaggagagggacgatcagctggaggagaggggcaggaagggcaggggaggtggctctctccttttgatggctgagagccatctgggtggtggtgcaaatgctgggatgtgaaaggatcatgacaccagcttttaactcagtcccagctgtgggagctgcctcactcaggaagtccatgtttctcttctgcctttaaactctccacatttgctggttaccttccccttccaccctaacatgccacctccaacatgcacatacatgtgcatatacataaaaccacacacacatacacacgtgcacacaatagacacatgcacgcatatacccatgtgggcacatatacaaccatatatatacagaaccacccatacacacgtgcacacaatagacacctgcacacacatacacatgtgggcacacatgcaaccatgtacacaaccacacatacgttcacacaatatacacatacatgcacatgtgggcacccatacaaccatgtacacacacagccacacgtacacacgtgcaaacaatagacacatgcacattcatacacatgtgggcacacatacaaccacatacacaaccacacatacacagacaatatacacatgcacatacatgtgtgtacacatacaattacaaccacacacatgtgcacacaatacacatgtacatgcatgcacacaaacacctacacatgtgcacacacataaacacacacatagttgcatacaacattctcgtgtacatgcatgcatgcatacacatgcatacacacatgtgcacacaaccatgtgcacactcacacatgtgcacacacaatatacacatatacatgcataagcacacacataaacacacacatacatacacacatacacttgtatacaatatacacatgtacatgcatgcacatgcaaatacacatatgtacacacaacacatgcacacacaggtaaaacatgtgaatgcatgttcatgcacagatacacataaacacacacatgcacagtacacacacatgcagacatacacgaatacacacacatatacatccacatatacatatgcacaaatacatacatacacacacaccatgacatttaacgatcaaatggtcacacttcattcccgtaaaggaagagaaaagaaagtcgaattcagaggtgtttctggatatggcattctgaccacgtgaacagaaatgggtccctctgattcagctgaggcctccctggaagagctgagtggaaattcttcagaaaggaatgagactttccactctccagcaagcagagccactctcctgcctggcagtatggtcagcgcttctccctcagccagggctggccctgcccaccatgcagaaggatcacagaggtcctcaggtcctgctggcactgtcagggtcacaagtcaagggcctgacaaactcttttccttccatgcctttctaggctgacagagggcagctggcagggccccaggccagcttggcattttaaagtacagtctacttttggttatcagcagtacttacgttctacaaagtcactgcaactgctgaattagtgaagaatgaatcactgcttctaggccaggcatgcagatgccgcatgtttaccacttgaaattctaaaggaaactgatgccaggagatgctgcccgaggcctcacagggagttggtggctctgctgggacaaacacaaggcccctcagccttgtgtacttctactctgctcaggtacttctactctgctgagctactttctgtgtcacgtggtgagaggaaagtgaacttcaatcaaggcactgagttcccctgtctgggctctgccgcatcctctgctgggtgaccttgacaaagcccttgctttgtaaatcactcatctattaaaggtcaaatcttcaggctggggcctcctgggaaagatggccacagtgacttcagaatcagcggaagtcgtcccgccactatgtttcccaatgagctggagaggtaacctgaagaggaggcaaccgtgtgcccaggactttctaaactactcccagtatgaatgaaggtccatgtctagagtgcctccctgtttttgcctccttcacaatagaaatgctctttggatatacatggccaacaagtatatgaaaaaaacgctcaacatcactgatcattagagaaatacaaaccaaaaccacaataagacactgtctgacaccagtcagaatggcaattatgaaaaagtcaaaaaataacagatgttggaaaggttgtggagaaagcacagtctcttcaaaaaatgatgctgggaaaactggatattcacatacagaagaatgaaactaaatccctacctctcaacatatacaagcaacaaatcaaaatggactaatgacttaaatgcaagcacaaaaactataagattactacaagaaaacagaagaaaaagctttttgacttcagccttggcaataatttttttggatatggcaccaaaaacacgggcaacaaaagcacaaatagagaactgaggctacatcaaatgagaacacttctgcacagcaaaggaaaccatcaacagagtgaaaaggcaacctacagaatgggagagaatatttgcaaaccacgtatctgataaggggttgatatggtttggctgtgtccccatcaaaatcctcacttgaattgtatctcccaaaattcccacatgttgtgagagggacccaagggggaggtaaatgaatcatagaggccggcctttcctgtgctattctcatgatagtggatacgtctcatgagatctgatgggtttatcaggggtttctgcttttgcctcctctcctcctctttctgtcttgccaccaccatgtaagaagtgccttctgccttcggccgtgattctgacgcctccccagccatgtggaactgtaagtccaattaaacctctttttcttcccagtctcaggtatgtctttatcagcagtgtgaaaacagattaatataggggttaatatttaaaatataaggctccctggaagagctgcatggaaattcttacacaactcaattgaaaaaattctcatacaactcaaattctcatacaactcaatggcaagaaaaaaaaaaaaatcccacaaatagccaaattaaaaaaatgaacgaagttcctctaaaaactaaaaaaagagttaccatatgatccagcaatcccactatggagtatatacccaaaagaaaggaaatcaatatataaaagagatctctgcactcctgtgtttgttgaagctctattgacaatcgccaagatttggaagcaaccattattgattcatctagtaacagatgaataaataaagaaactgtgggtccttatacacaatggagtactattcaaccataaaaaagaatgagattcagtcatttgcaacgacatgaatggaaccagaggtcatgatgttaagtgaagcaggccaggcacagaaagacaaacatcgcacgttctcacttatttgtggaatttaaaaataaaaacaattgaacacatggagatagagagtacaaggatggttaccatgggctgggaagggtaatggggatgggggaggtggggatgcttaatgggtacaaaaaaaaaatagaatcaataagacctagtatttgacagcacaacagggtgactatagtcaataataagttaattgtacattttattaaaataactaaaagagtgtaattggattatctgtaataaacaaaggacaaatgcttgagggaaggaacacccaccctccatgacatgattattatgcattgcatgcctgtatcaaaacatctcacacacctcataaatatatacacctactatgcacccaaaaaaattaaagattagaaatttttttaaaagcccatcaatgatagactggataaagaaaatgtgacatatatataccatggaatactatgcagccataaaaaataatgagttcatgtcctttgcaaggacatggatgtagctggaaaccatcattctcagcaaactaacacaggaacagaaaaccaaacaccacgtgttctcactcataagtgggagttgaacaatgagaacacacggacacagggagggggacaacacacaccggagttgggggcaaggcaagggagagcattaggacaaatacctaatgcatgtggggcttaaaacctagatgacaggttgataggtgcagcaaaccactatggcacatgtatacctatgtaacaaacctgcatattctgcacatgtatcccagaacttaaagtaaaataaaatttaaaaaaaaagaagaaaagtgaaaaaaaaaatgagtaaaggaccagacatttctgaaaaggaggcaaacggccgagagagtagcttcattttggcaaggtcttcttccttctcacagataacagattacctcttctgtttcggaggtgcagctggaagagaagtaaggacgtccttctttcgtgagctgggatccagtgactgttcagggaaatgggtgggtggcagataggccccactgcagagcacagagtggccaacgtgccccagtcccacaaggagagagcagactgcagccattagctggcctgggcctgggggcatgatcgtgacaaatcgtcccactagatccactcaaaaactacttccttaagtttccaacccacaggtgtttgaaagattccttgtctcacacctgcagcctgaccccgtgcctggcatatcatgggcaggtgacaagcatttgttaaataaatgtaataaagaaaagataggatttctgttaccagttctcctgagaagcagtagccctgaggaatgtatggtccttagctccaaactgactcccaaagcagagtgaatgtatccaaggacaaagtcacagttgatttgaaaactccctttctgggtctgaaattccacccctccctacttcggattctgtaagtgtctcagaccgataagcagcagctggggagaggcgaaacctggaagccgtaacccacctgtgcctggaaagtaagctacccaaaagacacttgcttttaaaattacatttgaatcctccttgcatagttaattggagccaattatttctctgtccagaagactgaatgcattctctgaaacccttcggaggaaaagtattcatgtcatgccctttcgtttccaacaaaagataatttgcacatgctctttccacaggagcgtgtcatttcaactaaaatcagcttcctttaaaaaaatcagaaaaggaaaatgaaaggaaaaaaattaatgagatattcagaaaaaaaaaaaaacctcatcacccagaaaatttaccaatccatgtcaaaatgaccatatccatgggaactctgcacagaggatcattactgtactcccctcgcccatcactcttacatcttagaagacttcataaaaatcactcatcagacgctcgtagtaatcaccacgggctgagtttacatccacatttgagtctcagatgggacacagtcctgtaagcctacagcggcatgttggtttatttatggcgccgggcttcttaatggaatggattatttccttggcgtgattatgatcagaggcctctggcaccgcatttattcggtccacacagcctgactatgaaagagaatctcctagagactacgtttcctccctacttcaatatccgaattgttaaaagaaaattgctgactttatgggtgtaaagacttggcctaagtgaaaaatgaatatgggatatcaaaagtcagctttcatgaaactgtaacacgaaagcaaaatgacatcctttctccttgctgcagaaagcgaagagtaagaaccggcacatcagtatcctcatagcaagaagtaatgctaatgccgccaccgacatggtgagacggatttgcccccttcaaagccttccgcagctccacttccaacacctggcccaagccgccatctctctcacctgggctgctacagaggctgttcaagaacctcccctcccctgcaggccagagctagtaaggtgctcacctcacaggcaaaatatgaaaggttgcaaaaccactcagcaatcgacataaataatattttaatgcaatagttttttttaaaatctaagttagcacaaatatatccgtgataaacaaaacaaaaattttacataaagacaggacacaacagtgccatgccaagttacgatgtttgcagaggctaaaggaaaactgtgcacgtctgtttacaggcttttttcctttttttttttttttttttttttttttgagacagaccctcgctctgtcccccgggctggagtgcagtggcatgatctcagctcattgcaaactccacctcccaggatcaagcgattctcccacctcagcctcccaagaagctgggattacaggcttgcgccaccaggcctggctaatttttttatttttagtggagacggggtttcgccatgttggccagtctggttttgaactcctggcctcaggtaattcacttgctttggcctcccaaagtgctggattacaggtgtgagtcactgtgcccagcctatatacgggcttttaacatataatttaaacatgtttttcatagcataaaaataattcaaaatattgaaacaattgaacaaggtattaaaaatcacaatgttattttaagtgtaaatattttatttatacccccaaaagaatttgctataattttactttcctggatataatgaaagcaaacacattaacaacatattcaaaatctacttctttgcttatcttctttttaattgaaagttgtaagttgtaacacagaatacaaagtaattgaaagtgtgtttgatggatgttaattctgagaagagaaatggatacgttttctgagtattttgatgtaaaataattacatgagttttaatacacctaccttcccatttccccaaatttttcagttactttaatgttctaaaaaaattgaccattaaaaatatataaaaacaagtataacagggcacccatcttccttcgtgtgtcaggcctcagtgtggctcagtacggcactgtcagatcttgtttttatttaaaattttgatatttggctcatcgggaattttttattgcattaatcttatttctaaaattttacattaaagtattatcaattttgatgacccagctttttgtgttgccttgagtttttcagctgcttcatcctgattctggccttcctcccactctgactctactcgccaaagagcagaaagatgggttctctacggattaaataagctcacagcactcctgcacttaaaaccctccaggggtgtcctgtgaacttgggatgcaatccagacttagggtcctgacaagtaagtcctgtgtgagccagctcctggctctctctccaaccccatttcttctctctcactgtagtccagacacacaacttcaagttctctgcctccactcccaggggacttctccctctgtcccatggctggctccttctcatccttttaatccccctataaacatccccttccacagagacctcctgcacccaccttgtctatagttaagaccctgtgattgagagaggagaccactcctcatattgtcttatacttaatttcttgtttgctgaaaaggtagaagttaaaagaataggcagaagtgaaattcacagtcagacagcccagcaccacatttcagacctggtcattaaaagtcaacccctgccctcaccgcttgtggtatctatagattctagacactgcatgaggaagcattgtgaaattctctgttcttttctgtttcgttctgattactggtacatgcagcccccagtcacgtacccctcgcttgctcaatcgaccatgacccccacttcatgcagcccctttaaacttgtgagcccttaaaagggacaggaattacttattcaagaagcttggtttctaggacatgaatctgccgatgctcccaggtgaataaagctctttccttcctcaatccagtgtctgaaggattttgtctatgactcctcctgctgcatgatgattattaactttatacatcaacctggttaggctgtggcacccaggtttcagtcacataccagtcaagatgttgctatgaaggtgtttttagatatgaagaatacaatcagtgaaccttgagtaaagcagaaaaatcaccctctaaatgtgggtgggcctcatccaatcagttgaagaccttctaaaaagtctgagttttccagaaaaagaagaaattctgccacgagactgtagcatccaatcctgcctgagtttctgctggtctgcccggcagattttggacttgccagcttccagagccatataacctcattccttaaaataagtcactctctcttcctctcccacctctccctctttattttaaccttctttggtccttcacagaacctaaaagtaatgccattaaatgtaatggcaaaaactacaattacttttgcaccaacctaatacataggatgtaattaaggtattcaatggttttagctggggggtgtgggttagtttcatggctattttaatgttctatatccccctgctagactgtcagccctctgaggacaggaactgtgtttgtcctgtccatctctgaaccccagctcctggcacagagcctggctcagaagcagggaaaatgctgacctctgaagcaacccaggtaacagtgccacagccacaggcctgggctctggggacaggtaagaaaggaagcagtggggctccaggcaccttggcaaaaaaggttgttcaggcacagagctcaaggtggagacagtctccagaatgcagagaataaaagataggcagcatttggacaagaaactatagtcaccaggatgaacatggcatcactagctgctgttcctcagaaagttacagctacccaactattgagctaatcctctaacttgtctccctgctgctgtctttccctggctagtatcttctccagccagcagtcacacagagcccattaaaacactattaggtcccagcattcccttgccctgacaccctccaatggtgtttccatctggagcagtaagactcaaattccttacaacgtccctcaaggcaccacactctactatctgtgatatggtttgattgtgtccccacccaaatctcatcttgaattgtagctcccacaattcccacatgtggtgggagggtccccgtgggaggcaatgaatcacaggggtggatatttcctgtgttgttctcatgatagtgaataagtctcatgagatctgatggttttatatgcggggggttccctgcacaagctctctctctttgcctgccgccatccatgtaagatgtgacttgctcctccttgcctcccaccaggattgtgaggcctccccagccatatgggactgtaagtccattaaacctctttttcttccctgtattgggtatgtcttaattggcagcatgaaaatggactaataccatctgtctcccttaagcttttcctctccctcccctcatcttgctccaggcccaccagctacccttcaggacctctccaagcatgcccctgactcaggcctcacctggaacactctccctgctgatacacctgtactgccttcctcacttccacccagtctttgttcacatgtggctgtatcagagagctcttccctaaccacccgtctaaaatgccaattcgccattgctccctctcgccataagtctaccatgtatttaaagagcattgaccaccttccttcacatgcatttttttagccagtctctcctacttaaagctaaattccatgaagcagggagtgttttgcccacttctgcatctccaacaggtagcactgtgccggacacattgtaggtgctccgtggatgtttattgaatgaagaaaggaaaaattggtcccagtacctggtgtgaggctgtgcctgacttccaggcagatagtggaagctggggagtagatagaagatgacattggcagcatacctgtcctgggaacagattacacttgagtcaactaacaattagagaacaacatgcaaaccgccaagacatggaagcagtactgaggtcctgggcctggatgtggaggaacaggcactggggcagtgttggaaaagctccccagtggtctctacttccatcaccatgtcattaaggctggctccactctgcagtgtacccacaccgaaaactaccctccaatccggcacacaggcaagcaagcactcgccaatccacagagagcaaagtgtggtccggagcaatgtaaccctccaaacctcctcacactgcacttccccaggcatggctaagcctctgcatccatgctctatactctcagctttcacttggtcatttctagctgaatatatatcatcttttataaaaagaaaaaatgcaattgcacttcttttttgagacaggttctcgttctgttgcccaggctggagtgcagtggtactattatagctcactatattcttgaactcctgggctcaggcaatcctcctgtctcagtctcctgagtagctgagactacaggtgcacaccactatattaggctaattttttatttttatttttgtagagatggggcctccctgtgtttcctaggctggtttcaaacttctggcctcaagtgatcctccttcctcagtctcccaaagcactgggattacaggcctgagccactgcatccagccccactgtaactttcattttcttcctttcatttccattgacatttttgtcaacctggtattttatcaaacacaagtgaaaaaaagaagtcaggctgtctagcctaaattcaaatacagttctgccctctagggcactcacatttgtgaattcatggctaagatatcaccagtgtggttttctgggacatgccctgtgctgcccccgggaacaaaaagcaacaatgaaacttgagctcccatggttccttcctggagcacgtgcttcctttctccatcaatgtgaaggtcatacttggctggtgtacatggaggaaaataaagcagtggtattttaaggatctgaagcaaatcagaactgagatcagccaggattgtaactagctttgatcctggaagtggtggtttggacttcaccctttctgctttgtgttatcctaggttgttacctggtattctttccttaataaatatgagaacagagaaggacacagccagaaattttctccaccacttaaagcagatctggcaaagatagatgcatcaagatactgccatcgagaatggcatggcactgggtttgattttaaggcagaaaataaataaaagttgaaggccgggcatggtggcttacacctgtaatcccagtactttgggaggctgaggcagatggataacctcagatcaggagtttgagaccagcctggccaacatgccaaaaccccatctctactaaaaatacaaaaatgagccaggtgtggtgctgggcacctgtaatctcagctactcaggaagccgaggcaggagaatgattgaacccaggaggtggaggttgcggtgagccaagatcatgccatggcactccagcctgggcaacaagagtgaaactctgtctcaaaaaaaaaaaaagagacaaaatgttaaagactaggagtggttcaagaagcagcaacaccagcagagaggaattttgtgcttgttaaagcaaagtaaggaaagagatgaatggaaggagcagtggatgatgtcattattttagacacacacctggaataaaactctgaacaggtggatcattggtcaccttatgaaatattgtttcaagcaagtggtagaaacagatccagagttgagtgggttaggaggaaataggtgttcaaaaatcggggggagtatccataggtgtgttgcctctagataagacataaaagctcacattggatcaacacacctcctaaagtgactgggagaaaatagatacgttaaaatatcacttatttttaaaagaccttggacttctatggatgcaaagaggtctaaagggactaaatgttgggcgcttcctgggtgaccagagaccagcagctactttctcccctagggcatctgctaagtctagaaatcggcagatagaggatctgggaggacagagttaaaaactttgttggcaaatggagaaaacagaggagctttgaatagcccccaggaagtggcaagatagattggaatctgtaggaaagctaattctctccactcactattctcccccacgggatgttttgtggattacacagcagcagccattgtagctgcatgttagggtgtgaacgatgctaagaaacagaaagatctccacagcttcactgtgcctagacaagaatcctgctaaaggaaaggacctataattcaagcaggatatactacactcaagatgtttgggaaacagactcagaggtaaattaaacctagccaaagctgcaacccagccctggcccagctagttcctggataggcctcaaggaaggctaggcatcgcagaaaaaagaatcagtaaacctgaaggtcaacagaaattgtctgaactaaaacacagagatgagatcaaaaacatgaaagagatagaaaggactaagagagacatgtgggataacgtcaaagggtctaagatacaggtaattggcattccagaaggagccggacaatagggcataataaatgcttgaagaggtaatggcttagaagtttcccaaactggtgaaagacataagcaacagattcaagaagctcagatgatcccagccgagataaatacaaagaaaaccataccaaggcacattgtagtcaaattgctgaaagccaatgacaaaaagacaggaagcatcgattcattgttttaaaagtgtattattgaaaggaaagtgaaatcaaaggggtggagtttgtttaaatacattgttttagttttttctttaagacggggaaatactgagggtgtacatacgcaaagggaaagaagaaagtagaagaggaaatacttaagcagtatggtatggaagttaggatctgtggggttggagcattgtattagtctgttctcaaactgctaataaagacatacctgaaactgggtaatttataaagaaaaaataggtgtaatggactcacagcttcacgtggatggggagaccccacaatcatggcagcaggcaaagggggagcaaagtcacgtcttacgtggcagcaggcaagagagagaacatgtgtagaggaactctcctttataaaactataagatctcgtgggacttattcactatcacgagaacagcacgagaaagacctgccctcatgacttaattactttctgccaggtccctcccatgacacgtgagaattatgggagctacaatttgagatctggatggagacacagccaaatcatatcaagtgagatcagcgtgggtatgaatctctactccgatttatcgctaactatgtaacccttggcagataacaccaactctaacaatctgttttatcagttttaaatggggctggtgatgatagtaactacctcttacagttgttgtgaggcttaatttaaataattcatatattgtgattgcagagcatctagttcatagaaggtatattagtctgttctcacactgctataaagaaatacctgagactgggtaatttataaagaaaagaggtctaattggctcatggctctgcaggctatgcaggaagcatagcagcttctgcttctggagaggcctcaggaaacttacaaccatggtggaaggcaaaggggaagcaggcatgttttacatggccagagcaggagcaagagagagatggatgggggaggtactgcctacttttaaacaactagatcttgcgataactcactcagtattagaagaacggcacaacgaagatggtgctaaaccattcatgaggcatccacccccatgatcaaatcgtctcccaccatgccccacctccaacactggggattacaatttgacatgagatttgggtggggacacagatccaaaccatatcagaaggtattcagtaaatgctagccagcagcgctgctagcagaagtagcacttatctaagtacaatttgccaagctgcaggagaggagaagcggaagcattaacaaaggaaggtcttacaggaggcaggaaaagatagaggaataccatggatgaagaaaccaatcttgaaaagttactaatattaaggcaaaatcatggcaaactaagtaattcagaccaactttctcaatgaagatacctagaaaatccgaacaaaatataaaagtctttgcaacaggtagacaagatagtgaagaatttactgggcaaggatatacagaggtctggggaagtcagctggtatttaggactgatttcccctaaaagtgtttgccaatttctaaagccagctaagacactgactgctgcttctgacagagcaataggtttagagtccagagttaagaaggcggaagtcctgtgaatgctcctttctttgggttagggcattaaagtgctgcatcctaggagtaaagtaatgggagacatatctagatactgccacttggctgaacgattttttttttttttttgaaatgtagtttcactcttgttgcccaggctgaagtgcaatggtgtgatctcggttcaccgcaacctccacttcccaggttcaagtgattctcctgcc

SEQ ID NO: 211 - DNA, 121340 bp, Homo sapiens
  source 1..121340: mol_type = genomic DNA
attaacttgttgcttcctatttcagataagaaccagcccttttgttatattttaatttcaaatatccactctccttatcagctggcccaccactgtcctctgaggctccagctcaatcatttgtggtggctgagcttccttatgtacagccaggaaaatggagctgggacacaataggaggaaagttaaggagtgggtttcaattatacttgaaacttctcaaactgttgtctcgttaagtttcagtggaccttgaaactgtgtttatgtgaaagtttttggaacattcagcatttttaaatatacactgtaagtactttaacagaatgttgggtggttacagacctgcccagaatttaacctcccttcctcccagtgtgacagtttctgttgcccttactttttctgtgtcctcatcaatatgttctgaccctgcctggtgaccaggtcagcttctggtggctccttgcattaacagtgagactttcctgatgctggtctatactcagccacagcagtccaacaagatgggccctatgacaggacaccaagactcttctctgcagtacatccagcagaggggcaggtaggagcaggcaaaacaggaatcagcactagacattcagacccccaaaagagagagacctgaggagagagatgcacactcctgtacataggaggcagaacagatgggtgctcgacaggtgggccgtggagtggggaaccgatcaggtttgaattctagttctgtcacttacttattggataaccttgggaaagccccaaatgtgtcatgtgtgaaatgggggtgatgacagtccccatgttgtaggtcgttgtcatggtgcaagggccatggtaagtgttctgtgaaaatggccattacaatgacgcatgacccccaaagaagatgcaggggaaactgggcaatgcccacagaccatcccccacccccagttgaagtggcttgatagcactgagccctgctctggtcagagctcagccccagtccacccagccagagtgatacccacctgagggcaccgtattccagggccacaggctcctccaggtcttcccattcactcccactctctggggactcttctggaggcaaagactctgggacagtgccccaagagcagaactgtggcaagggaatggtcccagaatctgcctccaaacattcttcacagggtagctggccttggcatgtagagttgatggtaagatactcttcatcctccgaggtgggagaaggggctccacatggatggtacatgtcaccttccccatcctccccatccaattcaggactagaatacagaagcccatgtttcttccagccttgataaaaaaaattcctcaccccaccttccccttgccttttagaatactctgcacgacacaggcccgtgagactcagccagtgttcaaacagctcatgccagaggctgctctgggcaccaggaagcaagaaacttataaggcaccaaccctggctttgaggagcccccaatttaatgagaagttggagcagtaaagaaatgttacagtccatgtaggaagtgctatgatagaagcagctggagcaccttaccgagctcaggagaccggggggatgggggggcttgccagagggcacagcattgcaagcagggcaatgacccagttctaagacagactcgtcacatggcaagcagagtcggtcagactttggacaagtttattgacttctttggaacctcagttttctcatttgacaaaactagatggtcaagaagcgtctaggattattgggacacgtaaattacataattctgacacagcccccccaactctgggttcctggtatggggtaagtttttagtaaatgtgagatgctgtgattagtactgtgaatatgatggctatttcaacagaagaattataaagaaagggcttcaggaagggattgggagtgactcaagcaggcaaccatcaaagcactttgtgcaaagatcaggtccttttctgagcactgaaaatttgcctatttagagatgcggcaagctgaagtgacatttactccccgcggaaggacacaggaggcagacgagtggtgaagctcattatctggtgatgcagccgcagacgtaatggtcaaagaacaagacttccaggggctgccccaagttcgccacacacgcctcttgattagaaagaatagtccatgcaaaggtagggcattttacacagcactgcagacatgcagagaaggtgctcagaaaatatctgtcgaaagtctggttagaggagatgagaaggaatatctaagagaaaagcacaaagatttagcaaatacatggatcctcatttctcagcctccttacccccacccaaatcaatgggttggctttattatgtgctgctgctctccttctcctttcctgcattgcctctttctcttaaaattggctctggtgcaccccaatagctacaaacccttagatacccagagagcacgtcctcctccccagtagagccggaagcatctgtcccaaactgagcttcactgtgaaagagacattatttccactcatgagagctacaaggtatgtgaaatagtgaatttcatgtaaatatatgcacactcaagtgtataaaaaagaaattattctacaaagactgaagaggaacactcactgtcaaaagacatttttaattcttgagcatttgcagggaaaattgactttaagcttggctaaatcatgtagaaactgtgttttcttataaacatgggaaagaaacattcaagaagttttatcaaagaatgggaaatctagcctattgcccaggcctaggctcaccactgtccccaccacctcaagcagcacccccttccctccgttctgagctcactaagccttgttgaggagtggaagatggcagctgtgtgtgtccattggccactgcagctgcctcagtgtccacacctcacctcccacccgtagactccctccacctcttctaataagctccttgccctctggttttgattcggagctccagctactggctctgcctggacagagacctagggaagccatcagcctgagaggcaagaggcaaggcttcatctgaggttcaaccaaagaaaaagcgatttgctccccacttgtccagggggacttggtggtcccaagggtgaaatcttggccatcatcccaccacaagttgggagaacgactgcctttccttctatccttttgcacgtgccatcaggctgcccttggagatttgacctggggctcaactgtggacatagggaaagggtgaatagggaataaagaggcaccagaagcctgtatgcctatttcacggaaagggcaagacttggaaatttggagaatttcattaagatagagacattctttcacagcaagcctcatgttttgcatgtggacatgatgggtaaagaggtggagttcttcacccagggttcaaggccggccagctcatggctaatgtagcaggactttcagcaagaccctgatgctgtcggagtacacggggctctctgctcaccccctgattctgtgtaatgatctcagcttcttcctgccctcactctctgcccaccaagctgtccaacagaaggaggcttttatagacagatgataactagaggagaatctggagatttcacgtgggcttcctggccagccatgtctcccatacaaaccagcaggaccccagaaccagggtccccaccaagtcctgaaactcttcagtgggtatttttaagaggaatcccagttcagctctgaagtcagtgaaaccattctgaaggctctgcttgctacagaatgtttactgagaaaagacactgtgcccaacttttctggacagctgtcctttaaagacttgggccaccaaattcatctctgcctttcaggaggaaattcatagaagcagattgggcatttcaggcttgaaatatgaaggtattataattgtcctatttacttacggttaaactcacaacaaagtttggggtttgtgtcccttcatgtctccagttctccaacatcaggccccatattgaggtctccattagccctgatgacacagctgggagccccaggtctctgctcctgacaactgcatttagttttggcaggttggatttacagtatctctaagacatcaaagtaaacaagttcaacggactgccagatttgaagctcagatgataaatctgagctgaagtacaatacttaggatttgtcacagtagtgtggacagatacccctgggtatctggggatacccaaggatagccctgggagcctgtaaggtgtaaagagaatcctgctagaggcagcacccaggatccagcccaggctctgctgcctccctcactcccctcagccacactccaacccaagagcaggcatgacatctccctcacctggcaactgcatccctccctaactactctgacatcacacctggcctggcccctgcagttgagtgagatctctggcctcctaattatcttttgctattccaggcagtgcccttccccagaaggtatatcataactttaggttcatttccaggagtcctgctttattttgctttcttaaataaatgaccatcaagatttataccatcactttcacaaagtgatgcttgttgaacttacgtgcattttacttacatgagtttaatgatatgtgctaggcaaaaagagaaagagaaagataaccttaaacattctgcaaagaccaactttccaaccgataagtgtaagccttgaagtgcacatgagtgggagaactaaatctttcatcctctcaatctgtctctgtttctattgggccagcatttaaagacaaacattttgcatacagcatggcccataaatgcaagcctcctaacttcatctgaggctcgaccaaacaaaaagtgatttgctcccacaccaaggggcaaataacatcactccttccaaagtgatgtttcaagggtaatgagacttgatgtgattgttgccttctgcctacctttaggaactaaccttataaaaaacatgactccagccaagctttccctctgataggcacgtaatccaactctccttcataaaaatgtactgtactgctttattacaagatatttttataaagatctactactagacggtaaaatctctagatatagagtgtgagaaaagagaacagggaaagaaagtgaaatcgaatcttgtccatgaacactttggatttgctgtggtgctggcagccatctggctgtaggaagttgccacctggcagatggtaagttccggcaatttgctgggaatttcaattgaagggacctgttctttagctggaaatagctcaggaaagggaaggaaaacagacttgcattgagttcttgccgcatgccaggcactgtgacagcaccctgagcgtgctatttcttttgacctgcacagtaccctgtggaactgtcatggtccccatttacatttgggaagcctccagcttagggaaggcaatgctccaggcatactagtaagtggcaacgctgaaaccacataataggatacagaaatccatgctctttttgttgaagagtttaactcacagatgccagacacttaagaggcagtggcctgcgacagtcacctcagaactgagctgcaaacacttctaaggcttctgcagagtcacaatcccactttggaatcctgattcagaccctatccaggagctgggggaactgtgtccaggggtcgctgggcatgcgcccctcttttcttcctgtagggggcagccactatgtgtgcattaaatgcaaactgacgtcctattggaggagaggtggacttggtttgagttctttcagaggggaggaaaggttcctaagtgagggagggaaaacgaagtaaaaataaagccaggaaatgtgatgaggcagaaagcattcatcaacagaactaccacagggaggcaagagaaaaagggggtgcggttggccattgagagagccaggatactgagaacagtaaagctgcctgcccacagttcatccatgggtacatggaccatgtgggcccggcagtgagtatgatggttgatgggcgttcacaacagactgaagataggagactcccctggaatgctctggacaagcccttgggactctcgtgtggctctaaaaggagcagtccctccaagaatgacagattttggacatctggtatacccttgcaaatagggccactaagccaaatttaatttggttcagaaaaacagaataatgtgatgtttgatgcaaaaaaaaaacagcaaatgctaacagataggcagaaataggtatccggacttggaagtagaagacataaagaggcataaagatgtggaagatgtgggagcaaatcactttttctttggttgagcttcagatgaagttaggaggcttgaatttatgagccatgctgtatgcaaaatgtgtaactttaaatgctggccccataagaacagcataacagcataaagatttcaccttaatataaggaagaaccttctgatcagtaactagatgatgataaaatgggtcattcaagaggtagcaagttctgcatccctgcagatattcaagcaaaagctgggaccccttcttcaggaatgttatggagcagattccagcatggagtttgaggctagactagatcatttttatattgaacaggctgattttctgtcgtttaatgaatgaaacagtgactgcctatactaatagtttaaaataccattttaaataactattggctatattaaattaaaggcacttggcaagtcaaattcccagcttgtacctatacccagggtcactttataattcagctctcagggtccctgttcattatcccaagctatctggcagcaaaacctttcaatatccaaacaagtgcctcctccctacaggaaagtaccattcctttaatatgtcctttaagatcatggtagtagttgtccttggacaagtctctgtaggttactttctttattattttatcaagtatgtcaattactgcctagactgcaattgtaaagaactataaatacacttatgttatacattatcagacaacgaaagtgaatatcattgatgaatgtgcttgttcaccctgttctactttgcaaaccagttagcttttgtttggctgacacagcattcttcaaaaaattgtagcagggtacttttagggaatgcatgcctggctcctgcttgtcacagctctcatcgggtccaacggtattacacgactgcttcacacttcacagagactatcatttcctatggatctacctttgacagtcgtctaggatggctaccaaatgagagccatttaatctcagtgggtttatagagtgtcaaacacaaacaattgccccttgttatttacctgctttgtgcccatgcctctggctggcaaatgctagaagcaggtcttaccctacatgtgcagccctctgtctgctcccaacaggtttccaagcaccttgtgtaataagtacttgtcaaactgaatcaaagactatgtgttccctcagcataggactgagaatcggaaatacttacagatggatggacacaaaaatgcagactaaatttaaaatgactgtgaaaatgaatgttgcagggtggtcttgaagatatagatgtgttcagaaaacaaaagctggtgtagccaggcatgatggctggtgcctgtagacccagctattgaccggctgaggtgggaggatcacttgagcccaggattttgaattcagcctgggcaacatagtaagaccccatctttaaaaaaaaaaaaaaaaaaaaaagctgatgttgataataaagcattatactagcaatagaaacgaggatgcatgtaggaacttccttcttactacaaagctttaacaggccatggaagatacaagagaaaggtttgtgtgccaggagaaaacctgaggcctgccacctatagcttccaagacatattggggacaattgtggtctgggtagggtttgctttcccaaaagctcacaggtggtcacagcagcaccagactttatgcttctcttgttgcaacctctcttctaaatgcctggaacagtgctgggcacaaaatcatccaagcatagttattgatggcttgattacaatttcctagcaatgagatgcacacagtttacaaaatgtctgcaaatgtggtgattcttaccttccaagtctcatgatatcacaaactgaatagcagttttgcctcacatccttttccaaagaggtcgccaatgttgattcatccctttcttggtgaagtttgcataaatgagggtgggactcaggagaatgtgtcaaggaactggcccaaggtctctctctgttttggccccattgtgcctctctgatggccttttgggaagactctggcctgagacccaggccttcccctgcatctggggaggcactgtccctccagctgtcctcttgatccaggatggggctggtacatgagtcagtacatgttgccctggtgaattctttgtcagctgagagttcaggtgtctattaaaagaaatgctactgattactggctgcgggatgcacattgtttttttaaaaatacaaagcttttttcccccatgtgattatagatcagagtagttacaagatgggctttgaggtctgtctatcaccatagcatcccagctcctccacatgctcccggctggacactgggcaacacactcaggcaccttggctttggaagctctccataaatgtgagccttatttttaaataaaaaatatttgcaaaatttagacaaagataaaaatggaagataaatatgcaaaacaatgactctattccactctccgataagaaatgttttctttttaagtttttcatcttcatctgtcatctcagggcttgtctccctgtctccacccccatcaaggtgatgttctttcctgggtctcctcctcactttcccagacatgacttgcttcgtctcaactgctcacctccctgtcagccttttaggttctggttttgatgatgtgctatgtcttgctgccactgcttgaccttctacagaaaaacaatctgtgtttcagtagaaaactgtttttatctacagcagaacctgctgggttctctgattctggctgtctccactgtctttgagctattttacaactctataaataaacaggtcctttgaaatctcttttgagccagttttaacatctgcctggttccctcactgaatgagttaaataaaatctttaacatgtgttcatttttatatctgtaggaatcatgattttaccttttcctgaaaattatcttccagcacttccaccccatgatctccatacctgatgtaatagagcccatgcctgggttcccacccctgccctcacctacaaaagaagaaccaccccaatgagtggtctccccacatttctgattgtacatccctaacaatgagagggatacacctccaaatgtgcacatttatttaattataaatcataaacatttactactcttctgataggctggacattataaaggatacaccaaaaatcaaaattttaagaagaccatattttgtcacattttcatactctttggagagacctccaaaatctgttttctaacctatcctctccttctagctcattatccctggacatgctctccagcaatccttccccactccaagacctccagtctgtggagctgctgcttttcatcattacccccactccccttccctgtcacacatgtcctcggtgtgcctcttattctgcttagattccatggctctgcccctagatgctcacttacagacaaggaagaccctgagctcccacctccttgcccctctcttcctccatcacgtgtcacttgcagattctgagtttccattttaattcctactcaaactgtgtgaacctcacccctgcttctgagcctctgactagattagcttcaagtgtgtgactgcagatgtcaaatgggcagtcaagacttccacataatctttctctgtgtccttaatccattcagttttctacctctgctctctaaattatttctcatcttgtctctctcttcaagtttctaacaactccaccctgaacttgcctgtgacctcacagtgagaatggacacgttcagatgagaactcttcatcttcccacagcaaattccactgagcagcctgtgcccctaccccaacttcagcttccacctctcgccacccatttctgtgctctacttcatggcagcctcttagatgagtgtctcttctcaccgtttccacgcctccctccttctttcttgcacccactagcaccagccttctgtccttaccacccaagggaaggagcccacatcagggtccccagcgacctctatctttctaaagctgaagaacaatattttgtcctttcactctctctctcagcaacgttcaacaaagtgtgtccctccctccttcctgagagcttccttgctcattagccctacttacatggagttgaccatgagccccacccttgcttggtttttccaccaattcccaggccccatcttaatctcatatgttgtcccatctctgtaccaggcctctcaatgttgttatgctctgtgctgacttctcagtcctctccttgaacttatctgcactctttcccaaggtgatctcaaccatttcatggctttacacgacctctatatatgctgacaactcccaaattcacttttcccagccctgatctcatgcctattctccacaactgcctaatagactcttcactggatagcctataaacatctcagttttaaatgataccaagaactattgtttctcttccatgcaccccagatggccttccccagcccctgtaagcagtccctctcttgggaactggtaccaagagagatgaagtggaaaataggatctatgattaccctcctaaagcatgaaataggtatatgtgatctagtgcaaagaagagaggtattggaatcaggaaaatcaggctttttaccttcttacccctccttcaccctgcattggtggtaccaccatttccccaaggcttcctcatgccaaagcttgattgctctctttcctcatgcctgtttctaatcccaaagtagtctcctgaactccgcctcccagatgtatcccaaatctggctgcttcttaacacttcagctacagcctgagtccaagccacatcatgtttgacctgaatgactgctgcttgacctcctttagtccctgtgcaccagtaacccgagtggcccctctgaagaacggaggagggcatttcctgcttaaccctccgtgccagcccagtggcttcccactgcatgcaggatggtggcatcatgctcctctgatccccaaggccctccagggtccctgccacctccacaacttcctccacttctgcttcattaacgatggcccaagcacacttgtatttttgtccctcaaacatccaagtgggttcccatctcagggcctttgttcatgctgttccttctgcctggaatgcccttaccccaaatgtgggcatggctgcctccttctcagaggtgctttactttatggactaaatgcttgctccccagagctgctgacccttgttctgcaatctgaccactggagccacccaagcaaatcacaatcctcccacttggccttcgggtatgaggagggaaagctcacccccacacctcacctggacccttcctgctagatctttatgggctctcctgggaggagctattctccaggatggaagtaccacttttttccctgggatttcctagatatttcaacaaaaacacagggtcccagcaccttggcctgaatttgtgtgtgtgaaatttggccctctctcacctggttcggtttcttaacacaattgctgctgtctaccttcttttccaacccagcaacttttggatatctttcccatagctcttccctccctagaggctatgtcaaatgacctcttggagtctaagcatcaacaggatctgggacatcaagtcctttatgttgtcctagtgatggtgtcaccctcaggcacaataagtgatcacttttatccacatcctagagatgaggaatcatggggcctagagaggacaggcaactgcccaaggcccatgcagcacagcaggtacaggtgatccaggtacccgcccagatccccctccaggactgagattcgcatcctactgcctcatctcccctcccctggggcagcccacaccccagcgctggttagggcaacaagcaaaggcacaggttctcttgtcccaattcatggcagctccaaggggccatctctgctccagggctccctccagaatcagctgaggccctgtttatagctgcacattgatctctccttctgccccaccccacctcagtcaccctcacaggggatgttctcaagcgcaggccccataaaacctcccacgctcacatctctgctgcaaaatctgtttcctaggaaccccacagaaggcatggcaatgggtaattgtatctgtcaacttggctaggccatggtacacagataggcggtcacataccatctagatgtcactgtgaaggtatttttttttagatgtgatttgacatttaaatcagcaaactttgagtaaaacagattgtcttccataatgtagtgggcctcatgctgtcagctgaagcccttaagaggaaagactgacctctctgaggaggagggagttctgcctccagaccacctttgggcttgatctccatcaattattctctgggtctccagcctgctggcctcccctgtagaattggactggccagccctcaaaatcacatgaaccaattcctataataaatctctttctctcactctcttcatatataaacacacacataaacacacacacacacacactcattctatctgttctatttctctgagaacctgactaatatatgtgtcaaggtaaaaatccctattttcctgattccaatggctctcttctttgaaccagactgcacgtgcctatttcatgctttaggagggtaatcatatatcctattttccacatcatctctcagaatggaaattcttattggaaattcccttggtctgcttctgtgtctactctccttcttcccaggcttccctctctgatgcctgagcttccagagagcctggccctaaaagtttcacagccaaagtctaaacatgtaaacatctacaagaagacccaaatgtcagaagaggcagaatcagggagaggaaggagacctactgaggtttgggggccagctattttcctacccctgtgaaaggaggtggcactgaacctatctacaaccctcttaggaccctagagtctggaaaaggggggcccaaccagagccaggtagagagagtagaagacactgcagcctacctgccattcctgctccagctcaggcagcgcacctggagggggtcggcaaaggaggagcgtgacttcctgtggggcccctctcagtaaatgcagcacctcctgcgaaaaaccaagattcactgttagatttgggcttgcattgctggggatgcagtgatgttctccccactgcgtcccaggcactagctcctcctccctgcaccttgatctatttctcactccagagaactccggagaaccctgctgtgggcctgacttttcaaagtgcaaggaaccaaggtcagtggcctgcagcttccacaaagttgatgcaagatgctgggctgtgcatcacctttgtgcagcttgggttctgggaacctctcatctgtaatattgcagtaacctcctctccgctccctgccttcaccagtgtcacccacctgcctccttccacattgctcaagggaatggcaatatctgccaataccaatgccttttcttcagagagagaaagaatgactccaacaaatagctgttcatctcaattgccctttcctcccaacctgccctcatcttgggccagcaattttgcagcctccaccatctgaatctctaaagcctgacccttggctctgagcttcctatcagggctcggcttgggctctgggaacctctcacctgtagtattgcagtgacctcctcactgcttgctgccttctccagtgtcacccacctgcctccctctgcaatgctcaagggtagttttccacagtgcagatataactgagtccttcccccactgcacaccctggctgactcacttttccctcaatgtaagctccaaggcatagcacatagaccccgtttctgcctgcctctgcctctcaccacagttccctctctcccatctactcccctctgcacccacgtcctaagcccctgccatgctgaatctgttgctccaagccaccctctcaatgtccagggttcaaggttgcctcgatagctcctatttcctatttagaccaggatttctcaaactcttggcactgttgacctctcaggctggacaattccttatgcgaatgcctgtcctgtgcattgtaggttgtttagcagcatctctgatctctactcactagatgccagaagcactcatcagttgtgacaatcacaaatgtctctggacttaatcaaatatcccatgagaaggaaataatctctgcttaagaactgctgatcaagacactccccagtccctgcttcagccacacaggacttccaaggggtgcacttctttcctggctcactggtgtgagcactgcagcatgggctttcatctctcaggatacatatctcctgccatcaccgctgttttctgtccatgagctctgaaactgcatgagctgtcttcctctgtgtcttcagtctctcatagagttgccagcccagcagtggttctcagagaagggttcttggatcaggagatggatggatgaaggcatgccctcccacccaagcatatggtgttctagagacctccccccagccctgcccagagccactgtccccctttgtccatcttgctttgtgtttctggagctgacttataaaggctgcatgaggcttcctgttgggctcagctaggggaacacggcaagagaccagagacagggaggagcggaggtcattgctccttccaaattcctcccttcaggttgccatgggacgactacaacctcagccaaggtgagagctcatgccagcgagtcccctccaacagctctccattcctggggtggaataactgctctttcccttcccctttggcctcaggataggggtaactgcatcccactcttcctagccctaggccacaacatgctcccttgagcttcctaacaacctgcccacacctttattaaatgttcctcaaatgactccattttcttccaggactctgtctaatatatacagtatttcattactctctcttcttaaattgcattttttatcatagacaggacaatcagtgtaataatgtatgaaaagctgtaaatgtgttgagaaatgggaaggagagcagaaagggacccactctagtcccttcagccccatgcccacctcccaggatgtgtgtgaagagacgtcagccagcacaaaggccagggctttatcttcagcttctctcatgaacccagtgagaagcaaggctgactcaaggtcagatatttaaaaacagagattttaaattaaatgtgagcatgtaccactaattactctctttgtgtgattaaaatccgggctgctggtatgatttttgagagcccagagttttccccacggcagcaggctagtaagaggcaaagctggggccagcctgcacagagagctgcattgcccatgacccccggcacctggaagatgaggccttccgtggaccttccattcacggccaggataatgtcaccagctgcaatggccccattctcctcagctggctgccccggaaagagcctcttaatcctcacaagatcacttttgagatggctgcagctctctttctccatctgcacgaaactgaatcccaaaccattggcattcttttttagtttgacttcaaacttaggacctgtagtgtgggatgttgataaaaataaattcttcagtagattacaagtgaaattgaccagtctcaaaatgcaaattgtcaagtagatgaattatttcttttacgttcaaataattcctttgctaattttatgacagagtacattatgtatgttatagattagtgctgtccaataaaatataatgtgagctataaatacaaaccacaaatgtcattttgaagttttcaaatagctacattaaaataaaaggaaaaagcaaacaaaaaataaataaaacaatttaaaaagtaaaaggaaacaggttaaatacgctataatcgtacatctaatttaatcccatatatctaaaatattaccacttcaacatgtcatcaatatgaaaaaattattaacgagatattttttattcttcttacgaactaagctttcaaaatccaatacatattttatccatttagattggtcacatttcaagtcctcaataaccacatgtggcaagtggctaccatattgaatagcacaattatagataactcaactatgtttatacataaagatatagctgctaggcatacacaacatgctcttggcatttaataaaacttgtatcacatacattcctattactcctttagaactctagtcatttgtagtatacttgaaactaaattttgcataattagaccatggagaaaattatggccaattctatggacaatgctttagctgccattttgtttacccatgtaggctgaccataagacaaaacagttgcctctgggcaccaaggatgaacagagctggcaacctacatggtctgtccaccaaagaggcctctgggctgccccgctggcatcaatgcacagagggacagagcacagcttgcaaacttcaccagggcaagaatggaagcatgtgaagcaattatgtgaagcaattatgtgaaggtgtgtcacacgaccagttctaccatcgccctaaggcctcctccactctttggagtccatttctcaaaggccccaagggagtgagcaaaggggtgaggacagaggagacttgatttaaacagaagcatgcccctttgccccacccctaccctatggctggcttgagtcttctgcagcaaaatcagaaaatctctatgaagggactaaaacatggctaaggtccaaatcgttcttactgaggaaatcagcgtgttcctggcaaataccaaaatcacaagggaattgcagaggggcagcccatcggaaaacgtgcagttttgtccctctaaacgatctttcgtttgccttttaaaatgatgctaataacaaggctagattcctgaaccttctctcccaacctgcctagtcattcctcaaataactttgttacaaatgacttggctggactgtgaagccaaatgtatctgaaagtgtatgaccctttcagtcaatttcatcctaaatattcacacaaacattaacattctggcagctgatcaaaggactgaggaaggctgggggcagaaagatgcctagaaataatttggggaaaatgcatttgtttccagaaacctattccatgagatgggcttccatggcatgaaaaagcagatctcagcatgatcactatggctcgctttcttttcaggacccagaggaagccttcctgcctttcccttttgacttgacaattcaaaagcggcacacaataacatgacaatagtaacactcaattctctcccctctcaccatctgtcactgagacacagctcgaaggcctgccaggcaaggctgttaccaaggaaacagccgtgcgttcatctcccatgctgtcattagcagaaggacactgctgtgtactcctggggactcttctctctaagaccagtcttgcaacctagaaggaaaggtgaacaaactcagtttacacttcatatggcaaccaggaggcactcccttgactctgcaaatgcttcttaattttcgaatccttcctataagcagactcatttgaatctctcaactagcctatatattgggatctagacccagatttctcagtgcttattagacaagtgcacctgaaagcaacacatgtacctccacttcacacatgcagtgccacactcatcttcctcccctcactcaccctcacttcccctcctcgttcttcctaaaacactcctcccctcgcattggctcaccccaccattaacctgccaagggccacatttggagtggtccagctctcccccatctggtttctaagatgtgaacattccccatcaagaacagctcctcagtgccccctcccctccacctcctctctcactgccagtgacccgctgggccgtggcaagctctggttaccttggctcactggaccctgtctgcacccttcttggtccaccccatcatggctgccagtgaattggtctaagacaaaaactgaacatgcaacattcttgatttaaagtctccaatgcttcccatcacctaagacccaaacccatggcaccccaggtctgtaccacctgccctcccctttctttccaatgtgatttcccacatttctccccacaacaccatatacccttgtcgccctaagtgtgattcaagaaccagcagatagacatcacctggaagcttctcagaaatgccaagctcccattcagggcatgtggccctgccttcatcttcctgttgcacctgtcactcagcacctggcccaggatcccagagggacaattcctacctgcttaagctgccaggaggccagccaagtaccctctctacccatgctcattagcaaaggtctaaatatcagaaggtgccaataaattatggctctgttctcaagataggtcaaccaaagtcactaatataagcaaatttcaccagacaccagaaaaccgctttgggaaagaaagcgaaaagtggccagaacattgccccaagcttgctggaagggccttcaggaatccctcctgtctctgttgactttttagttgccaaaagagggtgatgccagctctgtggctcaggacacagaggcagttagaggctcctaacctcaggcagaggactcggcacagtgggataacatcgagtcactgcggggcagggaataaaggggacataaaggatgaatggctctgctcttggcaccctgaattcctacctcattgtgaggaaaagaatcccaggacactctgacccacgccctggtgggtacaacacagggtgagggggaatggcatgaacagggaacggagtggggtcatcctatgcaaacgtagggaggtaagaaggcccatggacacagggccagcggggctggggcagccagagccaggctagagcagtctcttcactccatcttctccattccgctgtctgattccagaattcaggcaagccaccagtaagtttctaaggctatctatggggggtgagattttttttactcagaaacatctatctgctatctcctgggtttcacatccccatagaaaagtgagggtaagaagaaatggaagagaaaaaaaaaactaacaaagaaaaagtcttgtttcttgcctgcctccctcccacccagaggcgatttcagcttctgatgttgttcaggaaagttccggaaggaggggaagctggtcagcaacagtccactcacctgcccaggacccgtcaggcactgcacagcctgcttgtgggtgaggccgcacagaatcactccatccacctgcaggagtcggtcacctgggaaagggatagatgtcatgtcatgacctggtgcttgaggctgcaggaggttcccttccaggaggcccctgcccggcacccctccatgcagcctggagaagtgggaaaggaagctgaggtgccaggtgtccccctggagtcagcaggaatcctgcctctctgagcagtctcactcccttcttctcaggcacatcacagatcagggatataaaagcctttctattattggctcacagaatggttgagccagctctgttcaaccttatccttcctcctgttttcctgtgaaaccatttttggaagtattttcaagtcacttagatatttatatctccagcatgtattttttttatttcaaaaaaaggtcagggaggcatggttgacgctggggacaccagaattctaggggaaatggagataagtaagatcctaggttccccttttggctcaattctggcagttttggagaccagtaaaaatcacccccttccatcagagaagtgggagctgagcaagggcaaacagaaggctcaggtgtcctccccggatgtgcgagtgagtttaccgaggcccacttgtcctccaagggaagcagtatgttttcccatggaggccaaagagcaacacaagtcttttaagtcttctactatttttctatcacctatgcttcccagtgtgccactgcagaccccccaacctatcaaatgggcagggcaggttctatcacctcctttccaggtgagaaaagtatgacctggggaggcaatcatttgcatgagttttcagaatgggagcagggcaaggcctagaggctgcccctcccagtgcagggctctttacaccatggagcacagagttcccaatgaggacccatccccatctctcaccctgtaggatctgcccttccttggcagctggtcctccaggaacaatggatttcacatagataccaccatatggcacactggtgttaatgccaccctgaaaaacacaacaaaaaactcaccacccatctttcctcctccaggaagcctccccaacctccccagctaagggaatccccacctgcccaccactctatcccatgaccttacctccgactggcactgtcttctgtattcacctgttcgtttagattgtattctccactgagcaataagattaggtgttcataagcttaacaatagcaactatgtgagagatctgggcatgtccccagcccaagcactggtacaaggcgggtgctcagcaactgctcacgtgggatgcaccactatctctatataggtagtgaccagcgtaggtggatatggctgtgggcctgaaggcttgtgcctggcacgtcttgtgtgctttgatgggccaaaggatatgtgcatttttcattataatacatgttgccagattgcatccctatgtgaatatggatatacttattcacatttctaccagctttgtatgacagtaccatttttctacattccaccagctatatttggccaagctggtagacataaagtttaaaattttattttaatttaatttgtattcctgtggcttttcacgggtttgagtgtttttcatgtgtttaatggccatttggatttgagtgagacatttcaagaattatttttgaaattaaatatctgcaaagaaaatccaagtttttgccagccaaaggaaatcatcaacctcttctcagcaaatatatatttgtgaataacccaaaatttagtcagtttttcagatgaaaaatagctatgtttggtgtctgataaggctgttaccccaagccaagaataaatggaccatatttggtatcagcctgttcactccatgtggattcatgagccttattgcttggtttcttacttggtcccttaaaatcatctactgatgacaaattcattgcaggcttagggtccaagaaaacacatattcttgctctaggtacatagcattatcacaggggaaagcaaagaatgccctccattcacatatctcttgaatttcctctgaaaattttcatcagccatagagtgtccttactttggtgggagatgtcattctatttcccatcaacagttaaatccaacaatgacattcctgaaatccagacccattccagggtctgaaggtaatggatcacttttttttttttttttttgagacagagtctcactctgtcgcccaggctggagtgcagtgttgtgatctcggctcactgcaaactccccctcccaggttcacgccattctcctgcctcagcctcccgagtagctgggactacaggtgcccgctatcacatccagctaatttttttttttattttttagtagagatggggtttcaccatgttagccaggatagtctcaatctcctgaccttgcgatccacccgcctcggcctcccaaagttctgggattacagtcatgagccaccgagcccagcctgtaatggatcactttcaatactcagtaataaaagcagcaccttccaacctctgacctctggattttcaccagctttgtgtgtgccattccccaaccccttgggtaaacacagttatatgggtaatctcctttcacaagggtctaccaggcagagctcagaaaccaaatggaaagtgtcagtcctgatggaggcctggccctgggatgtctgagcaagaggctccacactgattctatgctggatgacagtggactgccccacccatccttggccagatgacagtggactgcccttcttacctttagcttgtgtccctgaagccccaatgtgcttctctctctctgcagtccagcttgacctcagagtcaggacacatcagccaactctgcccacactgcctcctcatgagtttggagtcccctagtgcatgccctgctcatcctgaggttccccagtacctctgtttgtctctgaactcatcccccagtgcaggcccccactggcttttttatttaccccttacatttgtgcaaactaagcacactgtcagaggttgccatctgggtggaatggccaccaggttctagacggacatcttgttaactgcttttcaagctctcctaaaaactcttacagttacactgaatccaagtgtcccatcttctttaaccagttccacaaagtagatttcaccagcactgatttctggaggtgatggaggacaagaagaaccagcaccctgccataaacaaacaaacaaaaataaagatgggatgaaggaagatgtcacctcttagctcatactgctctcaggagcaggcagcattgcacctcagaaagatcatgagctttggattgggccagcaggggattcatttccagctttatcaggccttctgcatgtgacctcagacaaagcaggaggaagatgagggagtgatgggctgggctgatgccacttctaggcagagaatgcttgggtcactgttcatgttctgctgtccctctgcctagaagatggggtcttttgtcctgtctgccccctttacttagtgctttctaatcaccatgaatgttagaaaattctaacgacacgcaggaaaatagacaagctggaggaagctgaacaacgaagcctcaactgctgaggttgagacctgaagtgagaatctaaagtccaccataccacagaggatcatctggccacaaagttggccaagagacccagaagagcctgcagcatctgggttgggtcctacagcctgcaccatggtcaacgtggccttagagctcccttgctcccctcaacggcccccagccccaggaaaccaactctcaggtttgccaccaaagaagccccagcgtgaaggcctctctgctctgcttcctgccagagaggacctaccagaggaaggcctggggtgaaggtttctgctctggaggccaatccgaatcccagctctgtcccctgctccctgagagagcttgggtgtgctcctttgctctttctgtctcagataccccacccataaaaggggttgataataggaatgatctcattgggttaccatggagcttccatgagctaatacatataaagtgctcaggacactgcctggcacacaggtaagcactcaattaatggcagctactatcgttgttcttccactggcctcctgcatccagttcctcatgggatgttctgtccaggtgagcaccatggccaattaggaaggcactgtcattcatggagccctattgcatgccagatccttgtgacagaggtcaagacacactaccccaaaatagggcaccttggcacattggaggaattggagaaacagcacatgagggaaggtttctctgaccttcccctgcccttctcttctgaagcaggccctaaaacctaggaaggattttctaatcttcccccgaagcagggcacaagaccctcaagtgagaatgccctccctatatctggaaaaatggagcatcttatgtgggaagacacagggactgagagaggaatctgaacaagcaggccttgctgagttcctcccaccttacatactcctgctttttgtcttatctcatttctccatgactctccattcttcatcaaatatactcagggagaactgtttcttcaggtcatttccataagaaggctcacatgtcacataaaacttatagtaaatacacgtggatgcttttctctcattaatctgtctttagttacaggggtcccagctgatgaagctaagatgagtagaagaaagatacgggttttatccccgacactgggcatagtaccttagtttccacggctgtggacagacatcattatctccatcataaaaagagaaacgaggttgaaagaggtgcaataacctgcctgtttcaaccagcaagttgtcccagcaagaatgagaagggcatacactcagcctgagtaagggaggataggtcgtgggagacctgttttcaaaggtcttgccagcctttggagaaaccagtaatatcagttcagcacctggggctggaaacactgggtgctgtgaccacccctgagcctgaagggcgagagaagggagtggtcgatggaccctgataggagctgtgctctttgtagaggggcacaggcaacctgtgtcagcacagggaaagagtggaatgaagggtgtgcaactgagactccagcactgccaccctgtcctcactcatcccacaactgcgggctcctgctgaggcttcgactgggcagaaccaagcagaacacagcaaggtgactcagtccatgagcaccagctgtgcagggcccagagcagaatggagaggctggggcatgggtctggcggggcctgagaagacaacaccactgggaatccaaagagacggcagaggacagcagagctgggactgaagcacacagccctccatacacctactccagatcccatcttcttcctccatggggtatggtcaagagcaaagccactgagttcccagcttgaggaccaattcaaggacaagaataggaggtgcctggttgcccacgccttgccattggcagcaatcaatttcctcatggtgctattatcacaacaattataattagtgactaaagactccagaggcacccacactgagcctgtgcccagacactgtcctagaactctgccttcttctatgcgtttttctcaacaaccatgccatgcaggcatttgcttctgtatgcaaatgaggaagctgtggctcaaaggggctaagtaacttccatccacctgacatggaaaacagagaacaggaagggcctaggggccaggctgttgggcttcacagtctgttctctttcatccagatctagaaagtaaaccaagggatgattacctttaacggcagaaaggaaagctgatgtctcagcctgggcactaagctctgcaccccagccatgtctagttcttcagtatttctgtcctggtcttgtgtgtgtgacaacaaacttccctggtacccgaagctcaggatgtctgtagaggagaccccagaattggctgtgctattcttttcttcatctgggttatttccaccaacacctataaaaacaagccaagaaaaagtcaacagcttaaaaaggccggtttcttggtggcatctctatgtgggcacagcgttttcctccagtgacagagtgatcgtttatagctgctcgggtacaatatgaatttagctcctcctgaaagatgttacatttagattagagaaagggaagattctacatgggatttagaaacctagatagagcttacgtgacccaactatgaatgcgtaggctcaaaagaagttcataaggccagctatcccttattaagctctagccatgtgatgggcaccttagatatacatataggaagatatggacatcttcccatcttctcagcaaacccaccaggaaggtgtaatcccagttcaaacatgagaaaacagagtcaaagctattaagtgtcctgccccaaatgctacagccagcatgtgggaactgtcttaaacccagcctctcctggacaccccactgagcacatctgcagccaccatgtgatccaaaaaccaacgtatcaggtccttttgggaggcttggtaataaccaaactgcaggcccctgtgagtgaaagctaggccactgattcctgctcaccctgtgtctgactcgtgacctggcatagaacaaagaaaagaacgtgaggttgtgaatcagtagaaaaaccttgggcaaggtgcttaacataactgaacctaaattttcctgtatctaaagtagagataatatcaatatcaataatattgtagagttggtgaggcttagagattatacgtacagaaaagattttacatatgttaagaaagataaaaatatatatgtatatatgaaagaatatatattccctcatatatatatatatatatatggctctcatacacacacacacacacacacacacagacacgcacagcttagtacatggtagagcctcaataaatgtatctactgttaacatgttattattagctgctccacaaatatatgtgggaggaatgaataacagttagattttctttagacctggatacaagtagatttactacttttgatacagactcattaacactcagggaagtgcccaaactcacatgctgaatgaattcaatttaaataaatctgatttaatgaatttgatttgaagttattcaaatctaaaggtatccagcagggagtggcagggccactgtttcataatgctgtatttctggccctttcattcacagattctgtcatcattgtccttctggcagtgtcataagcatcggctcattctcttccacatcctccatgagaggtgaggatgggacttacgattgaaatgaaaagtcaaaccatgctgcaactggtgtcctgcctagtagacatatgagctgggagaccttttttggtaaaggaaactcaatttattgtagaccatgacagatgctcatgatggacattttatctgtctgatcctgatctccaatctagcccagctgccttaacagcagcctaaagagatagaagaaagtcatggtagtcaagtctctgccacggagacccagccagcatcaccaaggaaacatcttcctctggcagtggcccagctatgaggaaaccccaccatgatgaaggcagcattgccaaaaggtggctggggtgccacagtgaaaggacattttattcccagccattgtgggaaactcattgtctggaattctaatgtgaggttgtggtttgagaatagcagacctcgagtactgctttttgacaacctccatcacagcaggccatccttggactatgctgaattgtgatttggtcacctgcattgtgtttcctgacaacacatgggatggtttgactgctcctgtcagtggaggatgtggaagaaaacacagggattgctgaaccactgcagaaaggagagcagtggtgctgggaaatccaacagacagcaagccagagactggcattggagatgtactgaggccagtccctgagaaggcttcaaccccaggatgaagggtgtggggctgagaccccagcatggccaccttccaccacccatagcttctggacaggggagctgcatggcactgtgtacaggtacaagagtgagagagcatgcatgcagaagtgttcagaaggcaaggcaaatgcagtgcctgcatttagtacctagaaaatgctggctggtgtgacaggaagttctcctgtatacaagggaaaactgtacaacacccctcaagtgtgaagaagcaatcatgagcctgaatttgcaggcggtctgctgttagtttacaggatcacccaaccaaaaagcagcattggtctcaggaaactagggagaagggatgttagcctactcccattacttcctccaggctcctcaagcttggtcccgataaaaacaatagtattttcctttaatataggcagttgttgctctctcattcttatctaaaggatgaagaaaagcatcatcaaaaagtactttactctttaggttgatcaggaacatgcacatcaagtaagaagagcgagcttgccacgaaaattcagctttaagaaaaggccaggtgcagtggctcatgcctgtaatcccagcactttgggaggctgaggcgggcagatcacttgagttcaggagttccagaccagcctggccaacatattgaaaccccgtctctactaaaaaatacaaaaattagccgggtgtggcagcgcgtgcctgtaatcccagctactcaggaggctgaggcaggagaattgcttgaacccaggaggtggagcctgcagaaagccaagatcgtgccattgcactccatcctgggtgaaagagtgagactccatctcaaaaaaaaaaaaggaaaatcaaataccgcatgttctcatttacaagtgggagctaaataatgagaacccatgatcacaaagaggggaacaacacacaccagagcctacttgagggaggaggatgggaggagagagaggatcaggaaaaataactattgggcactatgctgagcacctaggtgatgaaatggtctgtatagcaacccctgtgacacgagtttgcctgtaataacaaacctacacatgtagccctaaacccaaaacaaaagattaacaaagaacagtgcttgtctcctccccagctgattgctatacctatacaaaatatagaaattttgtataggattctatacaaaatatagaaatcctggagccgaccctatcaacaaggactttgggtggcaataaaaaggtcctccctgccatgcaaggagagttgacagaaaaaaaaagactggttgtatccagccgtgtctaacaaaattagagtaggttactccctttcagcaagacaagcatggtaacgcccattctgcccctgaaattgcaaagcttattaatttgtgccactacactgcttctttgcaagccaacaccatgaggaaagcaatatagaagacctacgtggacttcaaggtctagtacctcacagtaatcatgtactcctgaaaacaggggagcctcttaagctcccaagagtgggttaaaacataccttttgactgagaaataattaattctatgttgtcaggggaattctggatcatcctaacagccatgttgaatgtgaagccctccagactgatgtgattcagggctagtatctgccctcctagaaaaataaaacatctcaataatccttcaaggaaataaaaaagagtggtttcttaaaacagcatctctagtaatttaaaaagatgtacctggtttgatcgtttttgctttttctgctggtcctccaggtataatagaagatataaaaatgccagggtcagcttggcctgaatactctccctcattaatgacaaaccctgtaatccaagatgatagtccatgataagatgatacttagtgattttgctgttcagagaggttaggttatttccctcatatcacacagctaccaagtggcattagctgatagttacagtcaggtcttctgatcctcaaatagaggatcttttctactttaccatgatacttggagaaaggtggattgttccccattagtaagcacagctaaagctaggaatacaaaccaccaatatgcactggattttgctccagtagataatgagacataggaaagaaatgatttttaatcaagtaccttgtctccgtaccttgtttcttctacagtttttcgggtcttagaaagtggtcactagtaagaggtgagataaattgactcttcttccccatagctgactagaggaatgttgttacatggtattaggggaaaaaatctttttctgcattgtacttagatgcaccccaaaaagaaaaacttggaaacaaaagtcccattgctctttaggaacaattaaagggagaaaaaaaacagaagtgattaccagaaaaggcagactgggagaggagggataggaaaggggagtaggcaagttgaaagggaaaacagtacccacctccccactttgcccagcagtagagactgggcctcacctacagggagccctcttaccaaaaccacgatgtgggtcacgtttcagtgtcacacgtacaatttctcggcccggttcagctataaagctcttcctcctattattctttgagcctagaggtagaatcagagcaccacattgtgcttttcccccaaattatttgggagctaatacaaaaggagtaaacagcatttcacacacatgcgcgcacacacattcacacgcacacaatcctgaaaacaaaagtagctcatatttaatctcccagcagtgctgggaatggacacctgaacacacactcacatgagcctctctggagtgtcactcagtgttgctcaagttccagcttaaagagcagaggcaagaacaggatgggctatggtgcttgttttctgtatgacttactgtagctatttttttccgcattggttttgggacaagacagaggatgagcagagatgtattaataattgctgagagtcaaaacaaaaacaaaagctaaaacagaggtgagacagtaaagccttcccatcccaggcctcaaataaccaggggtgacaaggtgccagcagcccagcctgtgtgacctgtggtcttcccctggcttggatcatggaggagccccaggcagagccctgaagctgttcctggagagctggagtcctggagtggggcacttcagtgtgtgccacagtgtacttgggaaaatccccaaatggtgacccaccacttcagtccttccatgtctctccctcccccagggaccttggcagaaattggcagacaagttacttgtaaagagttgcctggcagttttcctgattgatatggtttggctgtgtccccacccaaatctcaacttgaattgtatctcccagaattcctgcatgctgtgggagggacccagggggaagtaactgaatcacgggggctggtctttcccatgctattctcgtgatagtgaataagtctcacgagatctgatgggtttatccggggtttccgcttttgtttcttcctcatttttctcttgctgccatcatgtaagaagtgcctttcacctcccaccgtgattctgaggcctccccagccatgtggaactgtaagtccaattaaacctctttttcttcccagtcttgggtatgtctttatcagcagcgtgaaaacgcactaatacactgatccaaccctcaggcttaatgctcactgagtagagatatttttccaagtgtcggatctctttgtcctcacattcaacagggaactggccaggaggatgcatggctgaagggactgccatctactctgtgtatgttttctggtgaatactgggaggtgatgttctggcctgcataaagaagcatatctacagtgaatggtgcctttttctgaacacaccctccatagcaggtattcttccttctggacaagagtgctgggattgtcttcgccagagctgacacatttcagatcctcatacccagccaaagctaaacgcctcttcccaatcacaagtagtttaaaaagaaaacaattcaaaaaacaagaaggttacaaacattgtgtgggaagcaaaaataagtggtggtaaaagactcaaagcaagcttcctgcgtaggggttcctccacccaagacctggtcgtggcctggcccatacctgcatgcatgctctgaacaggtggtccagagagagagtcccaggtcattggcttctggatcacacaggcactcttcagctgctcccggccagtgcaggggctgccgggaaaagaaaatgaggttagataaggtggcccacggggaaggacagtgaggttagataaggtggctcagggaggcaacttcttggcatttctgagtatggatgatggcccggggagggcagccttgtgtccagtcatccagcagctcctcagagggaccccatcgagggctgatctagttattaggaggacactgggaaaaatggctgtaggatctttatgtctcagaggggacactgaggtaactctggcttcatatgagcctcctactatgtgcaagatacgtgatcctgtaaacctccattttttcaaccataaaataagaataacattcctacttcccaggcttctaagggaactgaaatgagatagtaagtgtcaaacaccagcactcttagtggatactgatgttttgtcatttgctcctgttttcagctggaggccttcaggcaggccaggcaccctccacaccccacctaccacatgctcgagagctgcacagggtcactgacctgcttgatcattgtacatgttgtgttgggtgccgcctgatcataccatgctgtgaacaagaagcattcatgcaggcattcaactggccctgacggaatatgcctcatgctagtaaataatgtactagagcctagcagaataatgagtcaagggagatgttgccacagccccggggtcagttctgcacagagataagctacattcagaggtgagcaaagtctagattgagagggaacaattgatgtaaagctgtgggtctcagagccctggaaaaagccagctctgggactcctggacagccaaacatctgagcagattccgcttccctggttacccagactgacccccacccctcagagccccacagcaatctcacagcttcaagcagctggactatagcaggggtcgctggcatggacagttacccatggatccaccccctgtacccttggagctgtgacaccagggctctctctgcagggagcttggcactgtgcaaagaggctgcagccagaaagggaagaacaggggcggtggggggaggagaagtccagcctcacagtgaggtgcagcacagagtagctttggagactggcgacagatgaggcctcactctgacttggctcatgtttgtgcttgccttgcagcacgatcgacccacagtgactgagaaccccaggtgtcaggcctgagctccaaggcactgagggtaaagggtgggtcaggcatgggccctgtcctctgagagtccccagcctgctgtgggatgcagggtggatgactttcatgcctcctagagccaaccaaggtgcccagggagaggctgcgacagggcgctcgtgtgctcaatggatggagaaatccccacagtctgggaggagccgagagaggcgatgatgctgaggtggccttcaggtggcctttacggaaaaggaagggcttttctgggcctgggtttttatgacccatgtgatctgggccacacatgcaaccctttactgcttaaaagccaatcactgccagtcacaaaaggatgaaatgtgaatgattccactcatctgaggaacctggagcagtcacattcatagaccaggaggagcacggcagcggccaggggctaggtgggtggaatgggagttgtgtcgaatgggtgcagtttcaatttgggaagacggacagagctctggggatggactttcgtgatggtagcacaacatcatgaatggactgcgtgctactgaactgacaagtggttaggatggtaggtgttatattatgtgtattttaccaccatttaaaaacattttaaacgtgaactttaaaaaaatccatttactgaaagctttccctgccagcctcagagccaaggatataccaggcacattgctgttcttgagaagttccatgtttcacagcacagacaggagcatgtgggtgtcagggtggaggggacagagggtactgccctaactggagccagcgatgtggaggagccacaccttcacctgaggcagtggcgaaaggcttcagaaaagcagtgatgtgaagtcagaggccacctctcaggagtgggagggcaggcaggagctgtacctcacggcaggcagccactggcaccacgtgctgtgtaaacaactgctcaggaatgccactggcgatggggtcctgcctccacatgtcagccttccctcctgtggtcatatgcccaggcttaggccagcggcatgacccacatctttccacacagaccccatgtgggccacctctccgctggcctgtgagctcatgaggtggggaccacatctgtcatgctcaccaccgaatcctccacacctggcccagggctggcacacattaggtgctcaatccatttttctagtaagactaaggaggcccttgctcatggcattccttctcttcctctcacggtgcccagatcctattcatcagtcaagacctgatgccacatctcccaagcagccgtccctggtgcccttgcttggaaattgctgcgccgttcatggagcctaacactgtgttcgagaccagcatcagggcagtcaccacagaccaacccatattcagcttttataacatgatttaattcccacagccacccagtggggagggatgactattactaccactggatgaatgaggaaactgaggcctggggtgttgaataacttcattgaggtcacacagcactagaccacggagcaagtattggcaaaggacttccatgatgcggggcttgatccagaaccctgtcagaaggggcccccggcagaatggcctctgtaccatgacagaaactctaaatgtctcaactgcatcactgtcatggactttggcccacctcagacttcaactgcagtggtggggggcagttccatgagagctcaggctcagctgagctgacagcatcctggctcaggtgtggccctctttctgctctagagattcttgtccatcttgggagccgtctcctccacccccactattcccaccttacccaaaagcatgggagagtccaggcctcccatcctttgaccaaagggaagtaggagccattacatggtgtttgcctcctgtcctgcagttctaggaggcctctgcacacctctgtggagctgagccctggttgccctcaacagctacctggtgacccctacccctgtgaccacactttgcctgcttccccaactccctctctctctcactccttcttggcatcacctccacaaaaacatacccgcacccaaaccagtgtctcaagctgtgcttcttggaggtggggtgaggggaatcttccaagaactcaaaagcctagtaattaggtttcccttttcacccacgggttactggtaacttctgatgtgagttattaagggtcatgaaaatttggcatttgtaaaccaagattagagttataccgaatattacggagggcgccaattcagctttgtatcaagaaggccagcaaccatgcaacactgaaaagcccctactgtgcgtgaccactggccagtcgctggaagggccaccattctcagaaaggatgctttgcgggcaacacatcctcaagatggccttgagtcagtcatggcttcttctgccttttaaacaatgaagtgctataaggtaccattagttgggtgacaaatgaaagatgttcacaaggtcttggacgctcctacatcaagaagtggagactatttctgctccctttgaatctgtgctgacctgtgactattttaaccagcagtatggcaggactgacaccaggctagcttcaggcttagacttgaagagaactgacagcttctttttgggatcttggagccctcctgccttgcagaaccttgctggagaccccacatgaagaggagtcaagactactcacggagagagaggggctccgtgagcactgcctcccaaccatccaaggaagcagcctgtgaacaaagtcgtcttgcgtcctctagactagtccagcatctgctggaccccagacaataccacatgaaacccagaagaatccctcaactcagtcctgcctgaatttctaacccagttcactgtgaaatttctaatccagttcattgtgaaatggaataacacaatggtcattgttttaagccactgtgctttggggtcgtttgttacacagcaatagatgctcgaaaccgttttgccataccactgttgatttagtttgtggtgcacggcaatgtacatttgcatcaacagaattgggggcaataattatggatatagatataggtatagatatagatacacacatagactttcagttcaaatgaatcatccataccctcttgctgaagtagctggaaaactcatcccaaaaaaacagctcctgcagcaaccttcattggtcatatgctgcctgggaatctgtgctatttctataaattgcagtgtaaatgtaatccaagtcctaggctatttttaaatttatgaatcgttttgtcatgtgaagttgcatttataagcccactatttttacatataaatttaaatgataagaaactcatcaataggaaaggtagcgtggtgtagaggttaggagctggactctaaggccagctgcttgtgttcaaatcctaacccctgggtttcctctctgtgatgtgatgagaacaacggaaacacttaacagagtcataagacttaaattagttgatatgtacacgtgctcagaacagcacctggctgataataaggccaaataggcttattgcaacttgtttatttgtcctctccaatttcatattgtcatctagttctttcttcaccaaaagacgggagcatcatagaaggaggaatgagaggttggccctagagtgtttaacatagacttagcccatagatggccttctgtaaatctctgtggaattgattgacagttacccaataaatatacacttttcctagacatctaacatcgtttaaacaatttcttggccaggcttggtggctcatgcctgtaatcctagcactttgggaggccgaggagggtggatcacctgaggtctggacctcaggttgagaccagcctgaccaacatggagaatccctgtctctactaaaaatataaaaattagcagggtgtggcagtgcatgcctgtaatcccagctactcaggaggctgaggcaggagaatcgcttgaacctggaaggctgaggttgcggtgagccaagatcacgccactgcactcctccagcctgggcaacaagagcaaaactcagtctcaaaaaaaaaataaaataaatcttcagtacagatcactgcaaaccatcaagcacatggtggtttgggcccagagaacaaatgtgtcacacccacctgcgcccgatgccttctgctccagcctccttgctgccgtccacgttgaagttatccattgatgtactcagcaggcctcctgcagcaccctgaagcctggatacaaacaactcgttttctgagcatgacaatctctgaatccaaatgagaggcttagaccgggcctggtgtgcaggactcaaattggccatttgcacaaacttatcatggtctgaatttggggagaaaaacatagacatacacacacacaagaatgatgctggatccattgctctggtggttgtaacatatcactgggcccccgctctcctcctcctttctttttctgctgctattttgtctcctgtgattatccctgggaatgcaaggtctcctaattagcacttgctaatgaaagaaacctcagaaacagaagaaggaagagacgagatgctctctctccccttgcagctgacaggacgcagagccaaagagcctgtttaaatgggtgctaaccctagagtatttgcgggtgtgtcgggctccggccgagcctcctgcgaaatcagctgccccatccccttctgctttctgcttttacagatctgtcctcccaaacattcttgtagcaaatgtgcctccaaatctcctgggatcccaagattaggctctgctctgtggagtataacctttaatctctacacagcgtagtttgccctggtaatcatatttaatacaaggtcctatttcctgaaatataatatgagatgtgttgggttccccccagctttgacacttgcctttctccttccatgcagaaatgtttaataaataactttgatgaagtcttgaacttaagaccatggatgtgattaactccccacttcactattcacattgatcataaaaaaaatgggatttgaaaaatagagcttttaagttaatgaggctttacataaagccaagttagtattttaagacaggaaaatgatgactacattctgaccatctgcgccttgctaaaaccaagaaggaaagaacggtcagacacatggtagtggtgtggctcctggtttctctgtgtgtgtatgtgtgtgtgtgtgtgcacatgcacttctagagcctggtgaagtgcctccatttcaaggatatccatgggcatatatttcttcaaacagacccccctctcttctctacaatggtgtctggttccctgccagggctgtgcttactgaaaaagccagccttttaaaaaaaaactttttgagaattttctgcatgcatgaggcactatggtaccatcactcacatacagtaggcaaaaagcaatgaaggaatataagtaaattaaatgtgacctgcagcttttgcacaaattgcatagtatcttactccatacagagcttgggcttgctcagaaacagcaacaacagcagtaatgtcaacatcaactactaatatttgctgaatgcttactatgtgccaggcgtggtgggaagcacattatctgcattgtctcatttaatcctcacaataaccctatggggtagatattattatacccaatttaaagatcatggaacttggggctaagagtgtgttaattatttgctcatggtcccaaagccagtaagtggtagggcagactcacactcaaatctgcagactccacagtccacgctggaaaatggggatgctgaggacacaaagacaatgacagcagcaggggagatttatctgagacacacccagccttctgtttaccggggcccaaagggagagtgaccttagacttaatcatgatggatattaatacccacaggcggatattctaggcagagacagtggaggcaaggtcgcagctcagaaaggtttagcgagtttgaagcaagactgtacagagactgtgattacaggaaggagccatcccttagaggcaggggactcacaaaagttagcagaggagagagagctcaagggcctgtgagatgctggagagtgcctggagcctgaggaggaagctcagttagcaggagaggggctgcttagtgaggtcaggaaatgagaccctgggtgtcaagcactcagcatcagggactcagcctacagctgtgggctggtggggctgctggtgagtgccagtgtcatcgccacgcctcagcttcatggggctgactgggtggacaaacagtggaggggggatttgttggaaggtggtagagccaaaagtagacagcctttcaagaatggaaggaagcattgccacgaatgtcccaaagccactagcaagctgaggacagtggacagtttctattccctgctgtgggtgactcatagcataattgtggcactagggaaataaggctgaatccatctggatgtcaagggcaaagtccaagtcacttacagtgtcataaggacacaggatatactctgagccaagggccacaaggaaaagacacccaggacaagattctgggcagctcactgcaaatctgcagtcttgcagccttcttgtggaagggctgagaccaaccctgtagcccccagaccacccatgagaaacagctgagcaaaggcccatgggccccactccacagggctgacagatcctgcctatttagtcctgaaattatgcatttgtaaaagctcagtgatctatcttttccccctacagaaccaaatataactataaagtaatatgcttattgagataattcacagaagaatgactaagaagcacttggaaagtgctcaactgctcaagaatcaaaggactgcaaaataaagccacagcgagaaatcacttttaccttcaaatgaacaaagataaacacgatgatatttattccaacaaggatgcaacaaaacaggcaagacaatactgggcttgagattggcacttgggaaaacagcagtagtcttagaaaaatgcccagcactggtacccaacaattacacttctgagatctagctaaaagaaatgatataaaatatagaaaaatatttcttccagtgatatttatcatattatttgtaatacttaaaaacaaaaagtaaactaaatatcaaaaatgggaagggttcagtaaattattgtaattccacacaaatcatccattcgttcatcaaaaaacatgtattaaccacttcccatttgacacaccacacctctgttctgtgctggagctgctcttgtggaactcccagtccactgctgactgcaggcaggcatatccacaaataaaagtggcagaataatacaggtgagaagacagaggtctgcacagcagagggagtggtccatccacctaggaagagccacctgggggcagtcaatcaggaaagccttcaaggatgaggttacccttaagcttatttacagaggatcggacttatcttggtggtctgagccaggaaggagttaggaacgtgctgcaggcagagggtatgctgggcacaaaagccctggaagctgagccatcctggtgtgctgaacagcctgcaagctggcatgaaaaacagccagagaccagagaggaggagtcagggcaaagaatatggcaggactggggactgagtgggaagtgtctggcatgccattctagaagaagtttgagcttgtccttgcagacaacagagagccattaacaagttttcagcatggaagaaaatgacaggattggtccttttgaaaggtcactctgaaggctgagaaggacaattatccaggacaagagtaccagcagcaagtccattatgtgacgtgcctccatttcaaggatatgagatgtgttgggttcccccagctttgacatctctctctgtctgtttttggtgacaagtggggtgggaagagagggtgcaggcccagacactcccagtttcctgcagggaggctgggtgaccacctttgtacaagacatatcatggcaaagagaggtgtgtgagaggaagagatcaattacggatgccctgagcttgaggggtgtgtgggaccatcagctggaggcggtcagttctcggctgcatgtaatcgctgaaaagggttacatgaatctgcagagagagtttctaaaatgaagaaatattttaaaaagcaagggaactttgtctaaactcatcctttcaatgcaaataaatgttagattcctaaaaactcctaagacagtagaatgtgcagtttgagaaaacagcctattacaagccaaataggcctgaaaggactaattttacaagtgagctcatgaaatatttataaatattttacagtcactgaaatcaggcaataaaagcaatatcaatggtgtttcacacactgttctcagcaatagcaggtaagtcaggtataattaatttacatttgtcatctccagctccctggaaatatcctggaaccaccagcctgtggtttcaatgaaatgtttatatgttcatctggttctgctgcaaataataaaataagctaccattattttctgcatttggttctgcatctgaaagttcagcaattttgtttcccagttgaccccaactcctgggccagccccaggacccaatgacacagctcccatatgaattggctggcactgaacaaaacccccgtgagcaggagccaccattactactctcacactgagcacagaacaccagacactgagctagaaatgttacacgcacacaccttcccactcgagcacaatacaaacctacagtacggtctgtgtgctccaatgaggacactccagctctgaaaggggaagtgagctgcccaaagtcacacagctagaaagtggcactcccctgagtctactggactccacaggccacattccaagttagtgtttctgaagcttatatgtacatttaaatcacttgggttctttttaaaaggcagattcagattcagatggtctggagtggggactgagattctgcatcctttgcaagctcccagatgacatgcatgctgcagctccaggaaccacgctctgaacatgaagggtgtaaaccactatattatattgctcccttttatggccaaagaagaactaatgcctagacattgacagcagctgtggtaaagccagtgcgcagaaccaagtctctctagcactgaattccatgctctggctggttatgaaaggccatagtacaggcactgggccccaacagccacaggttcaaaccttggctaggcccaccaccaagcagccagcacattacttaacttttccaagcctcagtttgctcctccccataatgctggtacctgcctcctggggctgcttgaccagggcagtttgagaaaacagtaaattatgaacataagggaggtaattagtgtaagtacttagcataacaccaggaaaaattagtaataacaatagtaaatagctccatagcacttcgtaaatgctccataaatattaacttgtcttatgtgatgtgtgccccattttaaccaatagtcttactcttagttataacaataatacacattcattgttgtaagtttaataaatatcaaaaaagtatcacagagaaaacagtcgtgcctgcatgcctaactcccaaaggtaataacagtaacattttggtgcagttcatttctgtattcttccttatcttaaaacacaatattaaccaaattagtgttgtgtgtctatctataactatgctattcaatacagtaggcacatgtggccatttaaatttaaatataaatggaagaaaattaaataacattgaaaatttaatcccccagttctttttgccacctttgaagtgcccaatagtgtgaacaaatgtgaacctgaaagagccagtccctcaagatggattctgagcagctaactgggcccaaatttaaaatagattgctttggctattcaggctctttttaggtcccatatgaattttagaatagtttttttttctaattctgtgaagaatgacattggtagtttgataggaatagcattgaatctgtaaattgctttgggcaatatggttatttttacaacattgattcttccaatccataagcatagaatgtttttccatttatttgtgtcatctctgatttctttcagtagtgttttgtagttctctttgtagagattgttcaccttcctgattagctgtattcctgggtatttcattttctttgtggctattgtttaagtgggattgtgttcttgatttcactctcagcctgagatgctgttggtgtatagagatgctactgatgtttgtacattgattttgtatacagtaacatggattgagctggaagccataatcctaagcaaattaacgcaggaacagaaaatcaaatactgcatgttcttccttataagcaggagctaaacattgatcagacatagacataaatatgggaacaatagacactgtggactactagagggtggaggaaggtgagatgggttagaaaactacctatcaggtactatgctcactaccagtgtgaccggatccatactccaaacctctcagcatcacataatattcccatttaacaaatctgcacatgtaccccctgcatctaaaataaaagttgaaatttttctgaaaaaatgagttcaggcaaaaaaaaaaaaaaaccctactctacaaggtaccttaaatttttaagatatggtcctggtaaaacaagggtatttatagtttttgaatttagaagcacagtaagcaaaagatctgctaagcaaccaaaagtaggagaatgtgatgagttacatttctcactgtaattgctaagcagcagcaaatagcttcctgattggtacaggtgcttccagggctatttaataggacattcattgttattcttgttggtagttaatcttcaactgtgctgcattcaggtcaccatgctgtccacctgatctctagattatgtgtattgcagaaacattttaatgtttttccttgcaaggattccaatctaaacacaaatgataaactctgcctcttccgtaatctggtcctgctatgagtttaataccaaactctcaattaagagtgatacagcagacggctgcagccgttatggcaaggaccatggtgtatcgttacactacttcctcttcctgggcacacaggaagtcctccctttccaacccgtcttgcagttgtcttgggggccatgtgactgtgttctgttaatgaaatgcagatggaaggaatatgagtcactttggggtctggctcttaaaacatcttgtgcaattttacagctttctctttcctttctggagtaattattctagataatggagctctccactgaagcagccgagaccccatgtcgctggaggagagctgcaaaatagccagaccaagaagcacctgagaaacaaacctttgctgtattaagccattgaaatttcaaggtttatttgttaccttttgcccaaaattgctttatgtttcataagtaaataaaaactaaaagctaaaaaatataaataaataaataaataaataaataaataaataaataaataaataaaacagagccaagcaaccatttgctgactagaggtcacacaggtactctgagttccttgaagaaccacccttctgtttaacattgggacttgcagagctcacctgaaccaaccaatcagagctcacctgcctcctcgaatcagggctcagctgtatcaactagtcagaactgcaccgcatcaaccaatctgaactaagcaagtttgaatctttcatttgaataaatgaacttgattgggaacctaggtgggagttttatctataaaagccaaaccctctctttgttctccagaacacacctttgttttataccaaggttgtgccttctgggtttgcagactgtgacaggaataaagtctttttccttcgaattccttttccaagaacttttgttcatgataggtctgtgttgctagtgactcccacactgaacaatgcaggtatttccatcattgaagaaagtgtcattggacggtgctagctagatacagtcttagaacttccttttcctcacttagcaccctatcatgtacagtttcacatatcatcattgtccaaaaactgattttactgtctgaattatatagatgctcttggtttatttatctggtcttctatgtttggatacttagattgctttcaaatggtcactgtcataaatgacaccctagtagacatccatgggcagcaacttttgtgtatgtctctattgattatcttaggataaatgtctatctacaagtaaaattatggggccaagaggacgtgcactttttaaggcttttgatgtatatttccaattgcactctgaaaagatcatatcaatttatcctcccagtgttatttattttagtgcttgccaacatgagaaaataaaactgtatttcatttttattgtatttctgtcattattagagagatttacaactctattagaggtccccagatcaattgtatctatttatacaaattattttatgaaataacaaacttgtcaaagtgtatatggagaatacagcttctactcaccaaataaaacatgggaaggctgcccagagcccatctgtgcattaaacccatgctgggctgagcagaggtccagtaagtatttactggtcttggctgaatctgtgacaaatgtgtgcttcttcccagtgacactgcttgtgatggtgaactttttttgctgaaggaagcaaacacagactttaatacactgatcatccacaaccctccactgacgcacaactgcaagaaaatgctcggtcccttggttccacaccctgtagcaggcatccacgggtgcatggcagatgctgtctgactatggcctgatattttccttagcttaaagaaaatccctctttttagtttttccttcattcatcaatcaaattgtttatcaaacaataactatttttcaaggagtgtgctgggtgagaagaatatgaagtgggtcaggtatattgacctcagcaaggacggaacctaaccctcagtgtgcattatgacaagccactaagtattcccattgtttttattgtacaaactccaagaagttgtagacaaaatctcaactagttgggttatgaaaaagataaaaacacctgtgtgttataatatttctggctataatgtagcaggttctattctaagtgctttatgagtatgaatttattttatcttcacaactacagaataagagagattctatcagtatttttattctacagataaaaaaaaaaagagcaagagtcctcaaaatgccacaggaattgaggtcacaccacaaagaaacgcttccccacattataccttcaaggcccacatacaaagtgataatatttgtccagctcactgggctaaactggtgaagatgacctatatgaggctacctgtatagagccttatgaaaaaaaagtacaaatttttgcaatatattattctgataagaacaataaaatatataggtgatattaaatattaattcatataaaacttccaaataaaatcttcattctagatattctatctatttcaataagaaccttcagcttgctcctataaaggtaactttatagaaacagggcttatgcttgaaagggcttccggaaacccctgatcctctttaaggcttatctcttttaattcctgatagtcaccatttctaagaaactccattcacgcatgtcagatatcaacaaaaggcagataaatattcattgctttttctttgagaaacccctttttaccattaacctaattttagataagtttctcattctctgtatactctttacttttactgacaagtatagtgctaagcctccttgtgctaataggaatggattctgaatccaattgaactgtactataactaatatttctttaaataatgtgttgtctcaagcattcatagatgctgctccgccagtcgtaataattcttctttagtactcaactgatcatttcatccacactttttcaaagtcgaatatttgcttgaaatccatacactttgtcagtacacactgataggctttcatgcaatcctgacaattttatattaagtttattcagatattaagcattttttatatgaataagtcactctttttttgagacagggtttcgctctgtcacccaggctggagtgcagtgacacaatcatagttcactgataccttgaagtgctgggttcaagcaatcctcgcacctcagcctcccaagtagttgggaccacagtgaggcaccaccatacccagctaatttttgtattttttagagacaggggtatcgctctgttgcccaggctgctctcgaactcctggagttaagtgatcctcctcagcctctgaaagtgctgggattacaggggtgagccactgtgccttgcaagaataaatcactttttaaaatgtaataactattttttaacaaatctgaaaagggagaatcattcacacacccacatacaaacaaacacatacatcgaagtttcttttagcttataaactctcagcaaaactctccttttcagatgccagtgctccaaggtatcaaacaccagagtggaatgctgatcctatttcttgacataaaggtgaaaagagtcttgactgtcaagagtcttttccatcatttaatggaaaattcttatctgcaaactttcgcataagcaagctgctactctgtgtatacgatgatgtataactccagtctctgggttttcagcaccagcatgaaatcctttctttacatttctgtggttgcagcagaaacattaggttggtgcaattactgcaattaggtgggcgccattactcttgcacccacctaattcatggcaggtgcttctgtaacatgttggtttcaaagcatcagtttaccattttgaatattttcatccctaggagttcttttttttctgttgctatttgttcacctgcttgattatttgtatttgatacatctttgtatgaaatacaaataacatttttctaggcaggggagacttgtcatgaaactaatgaaactgaagctccagggccctaacttcctgggaggagccctggcaatgcattcacatggtcttataatacacggaaagtaagatgttttcaccccagttggttaagaccactgactctttctactcagacacaccctccttgccacgtcccttcgcaccaggtggtgttgggtgatacagagcagaaccctttaagaagttgagatggggatacacttggtttagatttagttggatttatttaggtgatttgaaggcttttctagaatagttactttattgctagccatcccagaatactccttccatttgtctaactcacctaaaatctcagcagaaaggtgcagggccagcagccagatgaaattgaccatgccctataatacccagcccccgaaggaagcatgagctgtacagagccagtagctgatctacaggaagtttttgcactcatcagaaatgaaaaactataatttagttctcaaaaatactcatctaattgaaatgcttccctatcagggatatactctataattgtgtataccgcattatcaacacatgacacgtttttttttatgggaatcccatgaaatagaatttgtcaggtttcctgcatttgcagcaaataactctgttgcagcactagaaagagcaaaaatgtttctgtgcaaagctgcgtgtttcatgcatcctattaatcctttcaataataaaaacagatttcaatccaccatgctagaagaaaaactaaactatatttctatcctctctagagaaaatgatattacaaaagcgccatcatacagaaaaataatcagggtacgccattaaaaatttgaaaggaaaaaagtattataggcattgtcaggaagttaataaaaatattacttgctggcttttttgatatctgcaggatttgttcagcttttaaaaattcataaagtttttgtgatttcttttctcattctgaataaatatttctttcatgccatcttttgtaactttgtattctttttcataaagagggccctaaatagcgtgtgtctgcttctgtttccatgcatttctcttcagagatttaactagtgctgataactatggacagttactagcatgcataggtttattgttctagaaggaacaggtttttgattgaacaatcaaaccacacatggacgccaacacatctacgaatcatattctttggaaatgtcatctttctctatttcctttgctgctttggtgcaggctggcaagatgaacgatctgtaattgtttgaagacttttggcctcaggtattaaaaagcaaaattgaaaccagtttcctgagttaattttcatattgttcactgaattccctattttgtgcttacagaagcataaagagttcaagtcattttctgcgtaagatgcttggtttgcagcaaactgctggtgacattacttcatctgacgactgttccttaaaaataagttattcatgccaaggaagaggatgatcatcagagaatggaaaccctgattaagtattttttgagctactaagtttgtcttcagagcctgatgacttcccagttttaatcaagaaattaatcaactaatttaatcaagaaatcccctggtggggggaaataaatacctgtaaaagttaaaccaatgtatacataaagtacttacttaaggggactgtcgagctttacagcttcaaaaaaatccattttaaaaaattactttttaggttacctgcatttttatgaatattttgaaatagtgcattgaaaaatctgaacaattaaacatgcaataagaaaataagtaatgtagtagtattaaattcattaaacaaagttcttcatataaactttcagtttagttaatgtaatttgagtaattaaaattctgaaaaattcacaaatatgaatattgtttcatctgagtttggtcaaaataatttgaaaaaaagtcaatttcctgataatatacagaccacttgaataaactcaattaaattgtgctcaattattatttatttttagatgtaagcttttttcctgaaaacaaacaataatttattatgaaattttatcttgacaatgtgttaacttcaaagccaagatggaagaaataaaagaaacatcctgaaaatgaatgaaagcaattatgttctactcaggaaactctaacatcagataatgatacaaatagtgatgtaattagaaaatgtttttaaccattgagaaaattaaataggaaaaaaacattttttcaggggccgcaagataaagaacttcatattttataataaatcgtcactgaagtgacacaggtactgactaaaacaaccacaggacaggcagaggctgtcagccaccagggtacagtgccagagtgactcacttcaggaggcagaaatatgcatgcaaatagtgttcaagtagattccaaatgttgtatacttaatggggattttctattcaaaaatagactttgaaacttttaagagctaccaaaaatttgcaatcctcagtgtcccgtagcacacctgtagtcctcagagacagaccagaggccttggcacactgcgtgcaaagggaaaattaaaacacgggaagaagtttcaaaacctttcaggctccactcaacctaaactacactctcaacccccatctcccacctccaactttgctctcaacgttaatggagtctccaaattaagaaaactttacccagaaggaaagtgtagccctttagaccaatggctgttcatggggatatgtggaggtccaggcaaggaatgttagggaagaaatggcctcctgaggacctcccaaaatcccttggcagacttcttccaaatatcctgcaatgcatcagaatgcaggttaacaaacagacaggctgtgagaatgtttggtcaggagaaagccacatgacccatgacccactgctcctttaaacggccaacaaatcaaaggaaaatgaagtgcaggttatttatcaactgagctacactcacataagtagaaatcttcccggtttctctccactgaaaccgtaacattgcaattctgctgttgtttttcacttcatagactatgacacccttggcacagatccccagggccatctcctcttctggcctcctcttctctgagaatacttggtgaaccagcacaccgtattctgggagctgctgagtgacctggagcagaaaaaggctgatttagaagagacaggcacatggtttaaaataatgggcctcacgccattcactccatgcaaaacacactgataggcgttctgaaaagaaagagtagaattgtcatgtaagtttaggaaacactgggtcaaacagatttatttgctatgtacaaaatttctctgcacctctgatatgatagaattttcctttttttttttttttgtaacccaaggaatacttttctcatggaatacctaaaacagtacttagaatacagttattatgaaaataacacagtacaataataatattctgaacaagttttttagaattcatactcttctgggacatctcaaggtaagagatttcttttccttgttgtgtcagagtctatagtattctctgttccaatccctttacgtgacagatagaaaaactgaggctaaggcacagaaagtgaccttccagatcaccaatgttagttgtgaaccaccctgcagagaaaatgaccattcattttggtgctcctcaccatgtagcaatgccttcgtgggggtccccgtagcccagggtcttgcctctgtttaccaggttaggggaataaattttgccaggggccatgggtcagttggagctggggactgcgttaggccaccaacttcttaagagaccaaagtataaaatgaacacaaatgtttctacatctgaatggcagtaactttcccaccttcatcttcaccaggaagacgccagtccccatcagaaggttgatgtgtctctgggacccacagcaaggacctcttgctccaggcatttgaagccctctcagaagggttgtattgctgaaatctggtatcccattcctacccccaaccagagagcataatgtcctatccaatctctctcacccccaggcaaggtcacaaaaacagggacaaattatggcttttgagagctcctctctcaggctcctttcccattcaccgttgatgaagtccatgcagacagctatgctgcctgcagactccacagctcttcacacagggttcagattacatttctgaaccctaagcctccttcgtttaactttggagagaccctgtcatcatcgtcatcatcatcattatcatcatcatcatcatcaatatccttatcatcatacaaatcaatatttattgagcgctggtgctgaaatatccagtggccagcctgggcatgtgattaaagtttaaaaagcagggccaccacaagataataggcagacgcttttaaagaatttggtgtgatatttcttttaaaaattaagcattaataagtagtcattaaaagtcattaataaaagtcatgcctttgctagacttaaacttcttcagttgtttagtattagtttatattttaatttattgtttacctatacaaagagagatacgatgcttttcagttctctgggcctcaagattcctactagtaaagcaccatgctaagcctctcccagcatgatttcattattatttaatcttcagaacaatcacagagatagtgaagctatcctttttctaagtaatctgtccaagttcctgctttggagccaggaatggaaatatggaaagatgagcctgtttgctcctgagtcttcactcttaacaactgaaatacagggaatccaaaaggcctggaaacataggtgaatacacttaatgttgtcaatgacatcttcaatctgtaaaacaataaaataatgatgtctacctccatttgctgtctgctagggagtctcctaggatgcttctcctggccccctttgcattgctattgctgggtgtcctttcagagggtcatttcctctccatgtgctttgggccatcttactacaaggcctgtcttccttacaacaggtagcaaagttgagatgggaccaagcactcctggctgccagccacacatcccttgctgcattgaacattcttcaaaacaaatggattgttatttctgaatattcatcaaggggttcagaattcatcttctctgaccttataactccacctgtgggtatctaccctaagaaaatatgctgaataatcaggacaaccccttctcataatgctgttcagtacagatttgtggggtgatttggggaaaccagctcctggcagtaaacgatttcctaaaaacagtactgtcttaaaattgattatcaggcagcctttacaaaggatatttgtaaagcatttgtaattatcaggagagtgcatttgttataatgctaagtggaagaaactacaggatacaatcattatgatttcaatagcaagaaaaaaatcttttaataatatattaacaacccacagctatgtgggaaaatggctccatggttgaggaagttaggaaaacactgaattcaccttaaacaggttattctgagattaataagctaatatagttgtgaatctacagacagactatggtattcagcgcttcccaaactggacttttgcccagtctgtggctagtacaaggtgctgaactttcagagttagtcatcagtgaactggggaccaagagctagcctcccaataatggtcttctcctttttctaatgaaaaacaagagccatgaggagctataattaaataatccagtgattgcttgtagaatagtaactgggctctgtgatgggcactgaggatccacggccttccaggcatttatagcccagtagaagagatggaaaatgtccagaaatgacggctgcacgaggtgtcttagcaatatatatcaacaacgttcaaaatgtttattaccttccaccctgtaattccacttatgagattctatccctaaggaatgaagcagaaatacagctaagatttatatggaaaagatgctaacctcagtattgttttaaatagtcccatattggaaaccatttatatgttaaacaatagagcattgagagaaaaaattagagtacaatatatgttaattcaaaagaagttttcaaatgtttagatctatgggattatatacatacataaaagtgcatgtataatataaagctaattttaaatatatatgcatatacatatatatatgaatgcacagaacaaagagagaaggatgaatatacctaaatgtaactgtgctatctccaggcggcagaattatgaggaaatgtttacttttataatcagggagggggagaaaacctttaacaaaccctcatcctaatgagaggctcccaatgtgctctggggatgatgacaaagccctgtctagtttatctctctgtaccacaggcaggcaacaccagcattaacaaccccaaccagtttaccaagggaaactgcaaaagcaagagtgctccttgaaaccgataaagattacatgtaaatggaatcaaatctattcagtgctttctgtgaatggggaaaaaaatggttttctgtatttttgcttctcagcctggtagtttcttttacaatcatttttcatcgttcaaccaggaagcgagggaccctgacagtgagatcagcactcaaagtcagggtctgggcagaggccagaaggtagcgtccatcctgcagacatctgccgcagggttgggtccttggcctctagattgggttctgcagttctgtggctctgtgaccactcattatcagatggctttgaagtccccactggtccctcatcaagggaatgcttcgtccccttgacagggaacacgtgtgcagcccggactatggagtgccctgatcatgcttcgccagtgcttctcaaatgaaacgcttgcaggctacaccatgttagatacagggatagttctgcaaaatgaccagctgaaaagcaaaggcccaacctcatgttggctgttctgttttcaagtacccatctcaattaagggcaagaaaacacagatggaatatttctacctgacttctgtacagggaaatacacaaatctcctaacttccttttaaaactgctcccccaatcaaatggcccagcttgtatcccatcctggggaagctgcgagtgtcctcgcacttatcccccagctgtatctgcacaggcagagtagccactctctccctggtccccacatcttgacatagagtagctggtattgttcttgttccattgagtgtttattgagttgtgtgcctgtgggtagaccgcagtcctccccacaagacatggggcttcctggggacaaagagcatgtgctttttgtctccattttccagtgcctggcccacagcaaggggagattgtggagtagcaaagactattcatcattgtgtgtgcccacacggggagactgcagtgccactgtttttgccccgctggtgaagagacggtgggcccaagctgcactcctgtgcacaggccacagcagctgtgctatgttgaggactgctgcctgcagggctgcaaacttagggtcttgtgatggcttttctctggctcaagcgctgatcttgtacttctgttgtcctatgtgtcaactataagaaatgtggtctccctgcttggaggaaagtgtctggaatgctgatctaagatttgtccgggcacagtggctcccacctgtagtcccagcactttgggaggccaaggcaggtggatcacctaaggtcaggagtttgagaccagcctggccaacatgggaaaaccctgtctctactaaaatacaaaaattagctgggtatggtggcaggcgcctgtaatcccagagcgagactccatctcaaaaaaataaataaataaaataaaaaataaggaaaagccctaccacacccaccccagctcactaaatcctaccctctttggggtcatttccaatgccagctgcttccagaagcctctccttgcccctccctgcctcctagagttccacccttgctcatgcctccttgtgggtctgcacacacctgggccccttgagaaggctctggaggggattgctggctgcattcccttgaagaccaacacctctctccaggtcaggaaggccttaccctcaagaacttcagctcagcatcctctccccacagtgcagagctgagccggtgcatctctgagacttcaacctggacccgtagagcggtcatcctctcgatcagactcgctgggatgtaatcttcaacgtgaaagtatggcttactctccacctgctggaagtaagatgtagaagggaagggcacaatccagacactggccgggggactctgagaggaatgaaaacattatctgtagtcacaattccaggagggcgccagagaaagacacttcctcgaggtgcccacctgggatattattttctactatattaaaaacggggccaaaccctaggacatgaacagaaaagagagagtaaaggagctgtttttgagcccctttttatgccaggtagttcacagaacacataaggcttttctgattctcacaggaatactctgaagatggcattgtcattgccattgacaagacaagcaaggagagaggtcactcaacagggcgaagatcacaccacttggaagtgacagaaacaagatgtgttcacctcaaaccctcacactttccacgatgccacaccttaccaaaaggcatagcaaaaccctggccctaaaactctatgttgttttttttttaattcatttagcatttctgtctacatgcactcccagaacattgtctcttctcaccaaggaggtcttagctttggcatcattgctgcacatgaaggtgttcaaggagtagccccctggaaaaggggagactggatacccccagcccaccttcatcaagtctgttctttgggagactgaggctgcatccccccaggagagggtggcaggtggaatcactcactgcttgatggtgagttccctgaacacagactctggggcaggtaaaagtctgcagaagtccatgcaggagtgatcttgaggtccactatacagaatgaggaatgcaggatcaggcagagggagaagctgaccctgcctttgtattcccagatcaacatgtcctggtctcaggaagcctttcccagcctaaccctgggcaagccatttccctccagttgagggcagttactcatgaggaaggcaagtgggagctgggagaatctggcctcactggggctgggggtgaatgagttggcctgagtggggtatctgaagagaagagcacagtgtccactacctcccacactcctgatgtagcatgtccccatgtggccatggaccaagaatcctcaggttggtgctggcccatgctggttttgagctcagctccaccacaaacagagagatattgttcagcaggctagtgcataaaaaagcatttagaatgctcttagcatggccaaattccagaacactggcaacaccatgctggtgaggatgtggaacaacaggaactctcagtcgttgctggtgggattgcaaaatggtacagccattttagaatacagtttggttgtttttcataaaactaaacatatgcttaccatatgattgagcaatttgctccttggtaattaccaaaaggagttgagaacttatgtccacacaaaaacctgcacacagatgtttataacagccttattcataattgccaaaacttggaagcaaatgatgtccctcagtgggtgaatggataaataaactgttacatccagacaatgaaatattgtccagtgctaaaaaaaaaatgagctgtcaagccttgaaaagacatggaagagtctgaaatgcatattactaggtgaaagaagtaggtctgtaaaggctacttactgtatgatcataactatatgatattctggaaaatgcaaaactatggaagtataaaaagatcaggagtttggaggcagggagaaataaataagtggagcacagaggatttttagggccatgaaattactctgtaagatacttgaaagttggttatacaaattgagtaattcttgtcatatccaactaaatcagagaccgggagccaggaagaaaatgaactcggggcacatagcacctgctccaagaattaaatttttccataagcccaactactgaaaggacttgctgtaaccctaagaccagttttacctagtagctgccgaaaagatctgctgggactctaagacttgttttacctcccactgtcacttaccaatcagttttcagttcccaaaagcttctcaagtgctgatgagttttctttcaaaactataacatttttattcctaataaaaatcccaacgttctctctgttcgtgagacacaccaaagaccacccagtctgtgagtataccccaaactgcaattcttgcttcccaaataaattgttttaaatttagagattcatctccatattctatttgacttcaacaatagcataatggtagatacatgtctttatacatttgtcaaaacccatagaatgtacaacatcaagagtaaacctcagtgtaaactatgagctctcagtggtaatggtgtgtcaatgtaggttcattgattgtaacaaatgtacattctggtgcaggatttttatggtgtctgtaggagaaggctgtgcatgtagaggggcaagggatatatgaaaaatccctgtattttcaattcaaatttactgtgaatctaaaaattctccaaacattaaagtctattaaaactttttttaagtgtttaggatctttgatccaggatccttctggtaggaatatatccaagagaaaagtccatatgggactgaaaaagctctgcggtcaagtacacttatttttatggcatttataaaacagaaaaatcagacgcaatttaaatgataataatagtagttatcacttacatggtgctactgggtgaataccccacaatacaagaatgaagaagtgaaggaagactgggaaggcatggcaggctgccaatccagaggatcactaggaaggccaccggaggacatgtaccattgagtgagaaagaatgcaaattgaatgtggtgaagttcacaactgtgtaaaaacccccgcatgtgatcaaggcagggagagaatgcacccagaggaaagttattctgctgtgatgatgtgattaaggagatttatttttatactaaattgtctttgtctccctttttaaaatgcaaatgtaatcatgttgcttccctgtttaaaattcttcaggggctcccaatctttcacaacagtggtttccaaattattttttttcagcaccagaaccatttatcaaacaaaacataagccccttaggaggccacactaagtcttcccagatataacaggtggcccccacccagcttcacagccaccgaggctcaggcagcggacaggccagacttctcctcttgcccattcagtgacacagagaggggctctcctctctgaggcctcactcaatgacctttgaagtgtccattgcagcacctggcatatagcaaagcaatgtgaagtgagccctggttgcgctctttctagcttacctaacctcacagagtcacaactttctcaatggcaaatgtaaatagcaccggcttttccgggttgatttaagaattcaatggtgccaagcccagagcaggcctcccataaattaagactaagtggttgtataaatgaatgggtttgtgtaaacctgttggcctttacatacgtgagaaaggaaaaaggtctgcctttgggggccacatgggggcagcagagagcacctcagaaatgtcctcagggcactagacaggttaaggcttggcaggatctggggatggggaagcagaaggagaatgagatgacactaagccagaagcagggtgagatcagtcagaaactggacgggcacaggaaagcaccataatggagtgttggtgctggtccattttatgtgtcaacttgactgggccatggggtgcccagatatttggtcaaatattctgggtgtgactgtgagggtgtttttggacatgactgacagttaaatccatagactgagtaaagcagatggccctccctaaagtgaatgtacctcattcaatctgttgaaggactgaattaaacaaaaagactgaccctcctgtagagaagcagctcctctctgcctgactctcttcatgccagttcttctcttgcctttggattcaggcttggactggaactgcaccattggccctcccgggtttacagcctgctaactacacagcttgaggcttctcagcctacataaccacatgagccaatgccttctaatacatctctagatagacagacagaaagacatatagatgacagatagataatagacagatacataggcagatgatagatacatagatgatggatagatagatagatagatagatagatagatagatagatgataaatagatggatatcttatcagttctgtttctctagagaacctagactattataggctcatagagacaggtctgggcccctggaaccctggggcaagagactctgctggactgactccaggtctgagtaagagactattactcaaactcccacctgcctccagtggatctggcctgctgtccccaacaactctaagtgctagagttaaactcaggtttgacatcctgtatctgaatctacagactgaaggttagcagttgtgtcattttatatcagagcactataatgctggaggaggtagaaggaaagcttgcaagcagcagttgtcacatgctagataccacacatgaattgccatctttcacccttacagcagttttgcaagagattgatgattattttccattttgcagatgaaaaagccaaggctcagagagaaaacatgccaaggccatatagctactgaaccagaggccacagcaagaatgtcaactgattcactgggacactcctggcttagagcaccctcctcccaggacttcccaatgtagcaccacccgaagctggcctaggcatgaaaagggccccaggcctgggtactgagggcaggaaggagttcaagggtaagcagtgacagggattgtcaaaagggcagggaggaggttaagagggccaggccagctctgagacactgcctccctggggcagtgtcaggggcagaaagtgaagttccagtatccatggaccagggtagtcccaggagaggggacagaggggaattgaactatacagtcccctgacaagccagctgctgatgttctgatggattactgttatctgtagtgtcttccagtccgggagtttcaactccattcattcacagctcttgaacaaactccctgcgcttcaagtactgctttggtgctggataaatggctacaccaaacagacaaaaacacccttaccctcaggtgttttctatgctaatgaccaataaaatgaattcatcatcccacatgatgacaaatgctgtgaacaaaaacccagcagggtgagggaatacacagggactttgaagaccccaggacacagcagcgccttctgaagctgtaccgggaggaaagcaagacaatgttgggagagtctgagaagtgttttcaaaccgcagtctgtaaccaattggtgagctatgaatcaatttaggggcccataatcagcatttttaaaacgaatgagaatataataggagatatcaatgtgcattgcatatagaaaggatgctccttatttcctgaggtttttgcttcagttctgttctatatacatgtgtaggtgttgggttttaatgtccatttatccatgggacatggcaaaaaaaattttacaacccactgttctcactgttttaactgttgggcttgtccttgctctttaatccagttccagaaccaaggcaggcaagttataaccaaggtcactcacagccctccctctctatcccacataccctgtgaggaataagacacagaactctgcgaaggtgtccacacccagtggtggctactgttcctccttctcagactcagggtgtactaatctactagggttgccataacaaatactaactagggggcttaaacaatagaagttcattttctcatagttctggggactggaagtccaagaccaaggcttctgcaggtttggtttctcccaaggactctctccttggcttgcagaaagcccccttctccctgtgtcctcacatggcctttcctctgtacttgtgcctccatggtgtttctttgtgtgtccaaatttcttcttcttataagggcaccagtcagattggattagggcccaccctaacagcctcatctcaaattaatcacctttttaaaggccctaactccaagtactgttaattaggggttctacatatgaattttggggctcaagactcagcctataacataaggccagaccccgatgacgtagcagactagaactttaggtaaacatggctcctttattcaccaatgatgtagcatctctgaccactaagtgcccactggtggtggacatgtatttctggccacatgtgactattcactttctttttgaaggaggaaatgggaaaccatccttcctccctctcagtctatgcacttggcagtgtgagctctatccctgcctcctagggtgaccatggggttagactcaagtctaaccaatcaaagcataacatctccctacacaatgattggcttcaggtgggcacatgactctatcagcaccaatgggaaagaagcccaggatttccatgccatttccaagggagagactctctctcttgcacagggctggaacctggagagtggaattggaaagccatgaaaggcaaatgtgacagaggagagcacagctcagagacacaagaagcccaagtcctactgacatcatgtgagttcctatcacccaggctccaaagtaagagtgattgggctggaagcttgtcacagggatgctgggaggctgagaaagaaccagaacccttcaattttgcaagacaataaatgacatgttttattcaagccagcctgagcttgattttctatcacttctaatcaacagaatgctgtccaatcacctgtgctggccaaaggtatgggaggatgcgaaaaagtatccagagggtccacttgtggggccaggaactctagggggttggtactgaccttgaaaggtatataaggttgagacggatgtgcagacattatgggaaagggcattcaaaggctcagtaacatgccagttcttaggatctcaaggatttaaaggtccttttgaagatttctggggcagaagggtggagtgtgtgtggttaacatttctttctttcttttttttttttttagcagtgaattcctccttcatgcagtcctcttgaagaagaccatctcttctccaagctaagcattccccagtggcacccagcttttgtcacatgacagtggtgagtgctctccaaggtaaagcccagcatgctggctgggaggtcaccagggaagagattggtggagacttcccctcccttgctccttcctctctgctcctactgatacacccagagatggactccacattcagatgtcatgtcacactgctgggtcacactgctcggtctctgttgaggtctgttcccaagcctttcccttcatccagaacatgggcaagagatgagggaagtgcttcataaaccccaacagcaaaattacactgctgtcataacagctcaagtggttggtttctccttcctgccttgtgtccccattttaaatcataattaggtaggtaaatacattagcataatccttccctattaataggcatctgaacattaaataacaagttactaacactattaactccctgaggattataacagaggactatcattggcagttaaatcaaagaaacttgcatatgattctgctgcaggggcaagggcttggccaagattaggattgccatttgagaagagtgtatcccagaaaaatcagtattggccttggagtaacacgtctgggctcaaatttagactttacaatgtactagccacatgaacttcagatcactcttctagaaaattgagtgataatatcaactctatgatattatcacaccaacttacaatgttgctgcaagagctaagtgagttaacataaatcgacaatgtctgggtaaatgccaggtacatagtgatcttttaataaaggttggctattactattcaaagcaagactaaccaaaaagaacaaatctggagacattacattacctgacttcaaactacaccataaggccatagtcaccagaacagcatggtactggtataaaaataggcatatagaccaatggaacaaaatagaaatcccagaaataaagccaaatacttacaatcaattgatttttgacaaagcaaacaaaaacataaagaggggaaaggacaccctattcaacaaatggtgctgggataattggctagccacacacagaagaatgaaactggatcctcatctctcaccttatacaaaaatcaactcaagatggatcaaagacttaaatctaaaacctgaaaacataaaaatttgagaagataacaccagaaaaacccttctggatattggcttagacaaagacttcatgaccaagaatccaaaagcaaatgtaacaaaaacaaagataaatagatgggtcttaattaaactaaaaagcttctgcacagcaaaagaagcaatcagcagagtaaaaacacaacccacaaaataggagaaaatctttgcaatctatacatccaacaaaggactaatatccagaacctacaaagaactcaaacaaatcagcaagaaaaaagcaaacgatttcatcagaaagtagactaaggacatgaatagacaattctcaaaagaagatatacaaatggtcaacaaacacatgaaaaaatgctccacatcactaatgatcaaggaaatgcaaatcaaaaccacaatgtggtaccacctcactcctgcaagaacggccataaccaaaaaatcaaaaaatgatagatgttggcatggatgtggtaaaaagggaacacttttatactgctggtgggaatgtaagctagtacaaccactatggaaagcagtgtggagagtccttaaagaactaaaagtagaactaccatttgaactagcaatcccactactgagtatctacccagaggaaaagaagttattatacataaaagatacttgcacacgcatgtttatagcagcacaattcccaattgcaaaaatatggaaccagcccaaatacccatcaatcaatgagtggtatatgtatatatataccacaatttctttatccactcattccataaaaaggaatgacataatggcattcacagcagcctaggtggaattagagaccattattctaagtgaagtaactcaggaatgggaaaccaaacatcatatgttctcactcataagtgcgagctaagctatgagaatgcgaaaacataagaatgatacaatggactttggggacttggggaaagggttgggaggatgagggataaaagactacatgttgggtgcagtgtacactgctcaggtgatgaatgcaccaaaatttcagtaatcaacactaaaaaacttattcatgtaaccaaacaccacctgttctccaaaagcctattgaaataaaatgaataaattaatataaataaattttaaaaataaaggttggctattactattgatgatggtgattatgataggaattcaataaattagtaaattactgtctttaggaggtacctattggactagaactagactagaactatattactgagtataaactggatttattcatctttgtgcctcccagagcctagcaaagagagctcagtgaatgctttctggatgaataggtggatgggtgtgtgggtggctgggtgggtagatggatggataggtagatggatgggtggatggatgggtagatgggtgggtgagtggatggatggatggatgggaggatagatcaatggatagatgaataggtgggtgggtgggtggatggatggatggttggatggatggatggatggatggatggatggatggatggatggatagatggatggatatatgaataggtaggtgggtggatggatggatggatggaatgatagacaggtgaataggtagatgagtggatggatgaatcaatgaataggtggatggatggatggatggatggatggatggatggatggatggatggataaatgtagtttactccaatctagctggtagatgctaacaatactcaaagcagagtctccacattactaacacatgccctcatcctgtaactgtttttccagtgaccccacacaaaggcccctggtgttcacccctacctccttagggtaattgccaaactcagcctgcaaggcaaggacccccagctgcagcagtatctcttcattgcagtacagcctctcctccaggatatctttccgaagctgcaggtaaaactggtgccttgtcaggctgtgcctggaaaagaagtagcaataaaaagggctgggttgctaagggaaagggagaatgttagcaccagtgggttttctcagtgtgggaagttggaaaagtagggaagacgagatgcaactcaatagaattcagaggcaatgccagcaagacaagtgtggtctcctgcatttataccatgcctcctgcccctcgtttagggccactctatgccagtcacttcatacaaacttacagaggtgtttcttgctctggtttgagtgaggaagctaataaccagttcggtggtgtttctaataaacaaagaaataaagacgcagggatcaaactgcaaacccatgtctctgtcctccaaccctcatgactgggctgctgagttgtgtgttgggggtgagggggcattttggggtcacagacagagaattttgaccttgagtggagtatgtctgaaacaaagggcatattctcattctgaccagggcctgcataaaaaaactgattttcctcctttgttctatcttgatcagaatccaatcaacagaaaaccaaccacaatagctattgttatttgtatgtaatttacagtttgcaaagcacttgtcgatccattacctctccgtcagcctggacatacataaatcccttaaggaacaaatgaacaggtttgcagcactcactggagcagcccatagtggctgacaaagaactttatcctcaggaagagtgtgaaggtattcatggaggtcttctgaggctgctctctccagccttcaggagctattttgcacaatctggtttcactgtccaggaaaaagaactctttgcctgaaatggaaatagagcatgtgtggaaggagaagcagtagggattgcaccatctctcagactcatagccctaagccctacccagagtgtcacacacgagctgggtgagtgcaggagtgggaggtaagtctttgcgtacctggtagcaaggaacctttgttggggtcatggggtgtcaagaaggagcagacaaagaggagagggtcaaataaggaaaactcaacaccaagaggagaaaataccgttagttatcttatcttacaagatgtcgcttaatatctgccttcagctatcatctcatgggtataaaatggaaaaccaaggaaaggagtttgactaagtttgtgcaatgtgccagaaccctccacctcagctgtaccaaccccctcctccccagccatggactcctacagtccaaatatgtgtgtcctcccaaatccatatgttgaaaccctaacacccaatctgatggcattaggaagtggggtgtttaggaggtaactatgtttagatgagatcatgagtatgggtcccccatgatgggatcagcatccttataacaggaggaagacaccagagcttcctctctcagccatgtgaggacactgcgaaaaggaaacctctgaaagccagaaagaggaccccaccaggaatggaaatcagctggaaccctgttattggactttccaacctccagagctgtgagaaagaagggtctatttttgagccatcccctctgtggtattttgttagagcagcctgagctgcctaaggcatggtgtaagtggagtcaatttgccctttgacccaagtggttccagattgaaaattccaccaacccaagctcaggacttcaaatcctggcaagtgtgtcctccagtacccctgggagggagactgaatcagccccagccactgaaggcccctcccccacccctctgctctcttcacagcaaagctcaacccctccagtgccctgggccactcctggggactgctgcaggtctgcccctgccctgttctaccacacactcaaagtggctcctccttctcagtgctccaccctttcagcccaaagcattctctagcagcttgcctgggcacaggagtcctgcccagttttggaaggcagaacttttaaactggtgaccaacctcttcttccaatgcctatgcatgctggggtggggagggggtgtccaggatttaaacagctgtcaccacaccacactcagacctccatcccctctgccacctgcctctgcccttactgctgaatctgatgccccacacgggactcacccttcccttaggatgaattctccccaagagataggcagttccccaccaaaggttggttggtaatccctcccaagttggtctatatccaaaccctagaggtagtcacctttgagtgatttccccaagatgaccctagctaggcaggtgtaaaattgtccatgtgggaggggctcaggatggccacctgattgggagaaggcaggtaggagataagtggatttgtgagtgcaggtgcactcacaatgcaagcacactggattagattgcattttatggatcaataacaacacaattcctaaagacacctgtattcacaggttatgaaaggtcgagcaaatatcaattgatcacatcaaagcatataacagttgttcttatttgtgagagagatctttagaaggtctgatgagaactatggggataagaacatgctctcaccagccctgcttggtacaaagaataatcatacaagttcgtgagcttttcctactggaaatgggaaaatagaggaacactgagatatgacgcctaagccagatgggctgggagggagaggatttcgccagaaggccagtgtgatcccagctcagcctccacacagtggttaaagaaatccagctgtggcagcatggtatttatagtaatggtgtgaaagttatcaataccaaaatgaggtcatttatgtctaaccctgataaagtgcagccaaaaggccatgagggaggggcactcatgcatatgcctataccgaaaaataccacaggaaatgttttccattctacagcttgctacatgagtcacacaaggatagccagcagcacaaggacagccagccgcacaaggacagctagccactcacacaagaacacttgcctgacactctgtctccactgatgaactgatgtcaactcctgcaataagcccctagaaaaaaatcatctttttgtctcaaaacaactcacatgtacttctctcttttgtctttaaaagcttccccttcccccagcctcctgggatgcacctgtagtcctctagaacatgcatatcccggattgcaatctcctgctaattccagaataaactctttctttggaaagcctgtctctctttgttgttattttaggttggcaaaacctggtgttagagatgtgggatccaaaaatgacaagccttttcccataccagcgaccgcagaacacgtgcagtgcccactggagcccattgtgctctctgcttccaggaatcatctttctgctggtgctaagttctgtcttggatttgagcaccctcattttggcttgctttgacttgattcgagatctggttttataggtctgaaggacatggtccttcttctgagtattcttttggtttcacttttgtaggggatttggcatcctttctgatgtgtactcttttggggttggttgtttgtgtacagaatttaaattggcatcacatagactttccaaacataattcaccccatgaatttttaagcttatggacaaattataccaaagataatttagagctccaatggccagatggagaccatttgaactgcccaagcttgttttttccttagaattaaaattagaagactgcagctataaggtcagtttgaatggggcacatatttcaattggcatcttgaggcttcaaaacgcattcaggactcaaaaatgccttaatgcaaatatctcaaagctagctgagactcatttgtctccagaaccttccctcccctatctacaattcctcctcctctttgtcttcctctagccgaactcctcttttttccaaactgctcagctactaatctaattcttctctccatgaccaccaagtcattttttaatatgtgaatcttctagggaagttctagatgggtggaataaagaagttaaaatatgccatttgggcctatcagctatttaagttaaaggcacttttaagcgcacttttaagagcaggtgcaaattggccactttgacccttgtgttatttcttaaagaagatgaaattcccatgtgatagtcatcctccctctcctggaaggaaaggcaacatccttatcttcaaggacaagaagtttagacacagaataccatacagaccttgttggaataactctgatcttttaagcctcctcataatttagtcccattttcacaattaactgttttttgtccaacccagtaactaatttggtggagtcttcatcttcttatgggggctcccatgccacataaaacatttattatgcttttctcctgttgatctttcttatgttagtttatttctcagacacagctggagcctgtgaggataaaggatggaagtagaagttttccttccttacagtttctggcaatgaggatgggaccctaagaggctggacaccccactcactccagcctatggatgagatgctgagaggcctgacaaaagcctgcaaaaggtggggggattctttccaaagccagctttcccaaatatctatggatagtgcctagctaagagaagaaggtaaaaattttttcttgtcccttcttttctaaatttgaattggcaggagaaaaacatttgtaaggttgttctctgaattgtgactcttgtgaatttggttctaggttctaacagaaatcgctctttttttttgttttttaatctctgtcttctgtgtgatttaccacaaggataaaagttacaataagactctcctttcatcttgttttatgtctcaagagctctgtagccagtgaggatatcttctctggtctccaccagctgggtggtggagactgtcaggtttgcatcagatggcgagccagctggctaggagtctgaaacatgaagcatctccttgtcccagagtgccagctcccaggggaatttgtctcaattgtttcaacctccactaccttgttaacaagtaaggtctttgtttttcgtctttgggagagatgttggatctcgaggggggtactgcatttttcacgctctttttgtggaagcctctcgtatccatggttaagacataaaaggcttattggctttgagtcacaattgaagtggttatacctttggatatttggacttttgtatctaaaagtatttttagagagccctcatcatgaacaactgtcctattggtacatgcgagaagatttggcttgaaggaagaaaataaacacttttataaattaactgttttctcagaaaaacagaactaacctaaatgttttttgagttcaggtgatctggtataatttttggtaaatatagaagctagtttaagttttttggttcaattaaaatagtcatgtttggagacttgtcaacattaaacataatacagacatacgacttcttctatctggatttatcaagcaaaagcgtatgtatgtttaagatggtaaaattgtaaatgtaacctaagaataaaacatacagtaaaaataaattgcttgatgtgagacaaatgtgacaatgaaaaaagagagttaaaaaaagccatatgttttaacttttaggttctttgcttctgtggtattttttaatacttgcctgatttactaacaataaaaataacgtaagataatgactacatttgtttcatgtcttatggagtttttataaacaattcaaacataattgttaaaaccaagtgaattaataaatgtaaatataaatgaaatagagtataagtaagcttttcaacaatgattatgttttataagatatatctacttaaaatggtttataaaatctttttggttacttaaaacattacagttatagtaagttaaatgaaatgatgaatattcatttaatagaccacttccaaataagatattatgctgaaatattagttgttgaacataagtttaagcttatatacttttgtctcctcattgtagaggaacaaaagatatttgggtctgttaattaaaatgctctattctacactgaaaaaatgtgctatgaggaagcatatatttctaggtgttataaaataatgttttcacaaatttgtaaaaggcagtttatgattgcttactttctagttttctggttttcactagaaattaaagttaccaagagttttaaaattccaattactaaatgtaattctgtacacaaagtgtacaaaaatgtaagatatgtttgggtgagaaaagttaaaaggaagatatgagaatgtgtttttatttgttgtcgtttaaaaaagtaattttctctagttggaggctagttgaggattgcttcaaaacaaataaataaagaaaaaagtgatatcaataaaactgaataagaacattataaatggtttgagaaaattgcaaaaggtttatggaagatgaatattatgaaagaaatttttgtgtgatcaagataattaaaattagaagaaaagtatttatttatgtttttctaaaattgagccttaatatcaatagcatacttgtgcaaaactattattttgtcttctctgttaataaaatacagttatattgcagtattagcctctactgttaatattaatatgtttttccttaactttttagtaattggcctagaaaacaaaaattttgtgttttatcagaatagtttcttgtgctctgtgctgtattttattagctcttttattacttaaaaaagtgatcttctcaatattcaaagagctaagttttgaccattatgtatttgccttttgaagaattttaattatcactctggttaaatgaatgacaattattttacagtgaccagtgattctactttgatcaagggttttaaaccttttgacagttttgacagcttcccaaaatcaaattctaaattgagtctttttgaccttgaatttactttgggtctttccagctgggcccttggaagcaacaaaggatatgtccctcaccttgtaaaagaggtgttaaactaattgggtttattcaatatgttaaaatgcatgggaaacattatccaataataagtggtgccaaatctttaagttatatttataaatatagttttgatataaatgttcctaaaattgtacaaaattgctagaattccgatatgtcttagtataatatttggttattatgttaaaatgatatatgccatagaaacaatgaaatttatctgtaaattgctggttataataaactctcttcagatttttaaccatggccattctaagtccttatcatccatggaatgttatggtgttggtacttttctaaacgcatttgcaatcagctacagtccaaaaattgctttttcttcaaggaggttcacagaaaggatggaaagaattctgacaagttacaggtttctgataacttcaagatcaaaccattggactaaggaaaaatgtccaggacactaaagaagaaacagagtttgtgaaactgctaacaaagatcaagcagaacaagaattaattacatgaggctgaacgaacggatgaaaaagaataatgggtttttataatttttacttgaaatttcactggttctttaaatgttttgttttctagatttaaggaaactttttccttgtatgttatctatagtttacaacaatataataaagtatactcttgtgaacaaaattaaaatatttgctttttctcctttcctgatccaaccagaattctaaaactatccataagcattcttatttttatgataatatagttatttatataagttcaataaaatatgctctctttataacaggatacaatacttaaaattggttatattactaaggctttgacttggatgtcatatttgaaaatgcacataaagttacttcagccaaactgaggtttgtcttgatttggcctcctagccttgagagacttttaaaagtcaggctgagattcttatcaaaagttctagcagaacaagcttcaaaggagcctacgtggtcaaccactattcttgatgcacttatgcatcaaggccaaacttgatgaggctaaacttacttagtaaacaaatttgtcttattgtgattatctttagtaaaaatgggggtaactgtagaaaagaaattatgcttctaaaggaaggtgaaaattgtattacacctgttatctgactgtagccctgttcattgcttttgtgtgtttctaatctacctgtagactgaattggaccctgaattcttcttgcttccttcagtatctgaagaacaaagaacaagaacttctctgttcctaaagccctataaactgaagctgaacaacaactcaatgtaaaattctaggaacaagtctcctgcctgatgtgcaggctacatagagagttcaccaaaatgcccaacgctggtctagtgcttcgaaatgacaaccaacacctatgaaacagaacaatgaactccagacagacttagcctcagagccactctttccaaacctccatgttgcttaaatgaagctgaaagatgtttttacatcaactcctacttgctggtcatttcccttcaacgtgagagtagaacaaccaggaaaggtccatcccagtaccgaggaacaatcaaaacctaaccacaggatgatccagcagtgatgctttcagagcaataacttgatcaaaagggagaaatgtaaacattatcaataccaaaataagtcacttatatttaaccctactaaaatggagctgggaggccataagggagggtcactcatgctctatgcctataatgaaaaataccatagaaacttttttccaaaccacagcttgctacatgagtcacacaaggacagccagcagcacaaggacagctcgccacacaagggcagctcgccactcacacaagaacacttgcctgacactgttttcactaatgaactggtgtcaactcctgaaataagcccttggaaccaatcacctttttgtttcaaaacaactcacatgtacttctctctttgtctataaaggcttgcccttgcccaacctccttagatgcatctatagttcactatggcatgtggatcctagattgcaatctcctgctaattcccaaatacactcattttttggagagcctgtctctctccactgtcattttaggtcgacagcagaaataaagagtctctaatagaacgtcagagagggaagagggtatagaaaccctttttcttggatatttagaatggagtcttaattagctcctagggtcagggtactaagtccccattagtcctgcatcattagatggaaatgcttttaacatttgcttgtttgtctaacttcagtgccctgagatcaatcaaccagatccagcaagccacagaaacccacatcttacactcattatttcctgacaaccttctgcacttgcttgatgctttatccatgagtacttgaagccctcgtcatgctgactaatgtctaggcatacaaagggaggcacccaagtctcaaacagttttcccagaagaaacagagctcaggtacccagatacctgggttaccagaggcaccaggccagctgtgagctgcccaagagatgcttacttttcatatacgccaagccaaagtaggtgagttcctcgaggttggcaaaggatgtcacggcattgaagacagctcccactgttgattcaacatcacattttacctccaggtgctgcccgttcagcaggaccacacagaggtccctgagagccaaataggatttcccttttttggtctgaaaacaacaacagtatcaattatactacaattataagtcattgagcctttagtgtgtgctggttactgtactaagcactttacacacattgtctcatttaattgacaactctaaaagataagtatatttacaattcctatgcagcagatgagaaactaaggctcagaaatggtaagagtcttgcctagggtttgcacagtttgtaaggcaggaactggactcaaatctgagccttctgccaggctcagcaggggccaggaaagctgggaggcctgtctgactgacgtctttcccatgcggaaattccagctctcccttgggctctgcttcctaagagggtcacccagggccctcatcaatgaatcatatggccctggatcaatctgtcgatctgacattgtctccccaggtcccagcagagcacaggttaattaattctaaacttcagagagaatttgggtgggtgcagatccaatgaagagacagagctggagcaaggggattacctagactctagaaatgggtcggcagagccaaagagcctccagagtctgccttctgcctcttcatctcccaccacagccccacccagaccactgttgccttggttcagcctcctggatagttcatcaccaggcagccacctgggccattctgtctgtgtctttgcacatatgatacccactgcccctagggctcttccactccctccccatgtggcaaactcttatggatctgtcaggtcaggctctggagcccttgtctgtggctcttcctgagtatccccatgtcccaaagcccagcctggacctcccccaggaagttctctctagaaggcagtcatggacagacactagcatatgtggccttagtgccatcgagaccatgcctgtggtcataccctgacactcctggcacccaggggcagcctatgcactccaggggccagagcagatctgaggaccctgtgggagggggtttcacacatgccgctgggcagggctgatcacacaggcatactccatgccaccttggttcctacacttgctgcacacctgagtcacctgagaggtgaggagaccactcccaagatggttctgtcagtctggcacaaggcctaggaaatcaatatctagtaaagcttcccaaggtgattttgcgagagccaggaaggctgggaggcaggtctgacccgcttctttcccttgcagaaatcccagctgcttcctgagagggctgcccaggccctcagtgatgaatcgtatgcccataatgggcccctgcttgggtccagtgctctgaagctgccctctggacactcttaatagttgtgtttggaatgtgtgttttctgagtgaagtccccaggacaatgagcgagtatacaaagctttgactttcagcagtcctgcctcccctcctccttggagggttctggctgccaactcctctgctctctgaatccccatgccttgcccagcctcccctgccccttcatcctccccacacagtgacctctgctgccctccactgagggcagccatggctctcactgccccctagtgatgccttcctcaggggctggtggaggaaaggtcccatgcaggcacacgcacccaaggcatgtcagagcaaccatgacagtggctgtccccaccctgggccaggagcaccaaagctctttccctgggcaattcagcagggacaagcatctcacccacccagctcccaagccaggtaccaaacgcatctccatgcaaagggtgtaaccccttgggggaccactgattgtctgggctgggacagcagagtcatgggaagggagcttgggctttttcaccctgcgtggggcatggtgcatggatccagcaactggtgtggcaaagtcacagagcagggtcccaggtacctgcaagggtctctgttcaccttgtgaatatccctatgcccaagagaatgtgacattaaacagcaaataaaaaataaaaataccatgacatgatgagacagagaaagcacatatagagaaaaaagaaaatgttttatattttagttcctgtggtggctgcttttgaacacagggtgctgcctcttcatgtttcagtgagcctagttgccagtgtttcccacgggacagccatgctgtaaggggaatctgttttgttcccaacacccacagggaagcagaaggaaagggtgtgtgtaccaagaactccacttggagggagagatagggagctacactgactgagaaccctggggacaggaaaggaggggctaaagcaacaggggcaaatgctccagcccaagccagacaaacagagtgacacaggaaaccctgggaatggggcctcctgtttcccaggtaagggacagaggtctaaaaagtattttactgagggagccctcagtcaccctcatacccttcttgcatcttcctagaggcaagggtccaaggtcccctctgaggattataactagggtcctagacctggtgtgtaggtcaagatgctcgccccagacagaactgggacaatagcactgttcccatcgcctggagtcttggtacctaagcactgcacaagcatccctgcagagcgggggaagctggcccccatcacagcaggtctggcccatctacccggtgggtagaggagtctccagtcacctaagccatgtgaccacagggatgtcaggaaggggtccctgggtgaattgtcccttcttcccctcagctgagggcaggtggcttgaaggggatgggcagaggtgggactgggctgaggaggccatggccctctgacttgcaagccccatacaggaagtgtcctcagaaggttgtagacccccagagtgagccaccctgacaccccagcccctcacacaccagcctccttagctttagtattttcatgctttgggtaactcaatcttgcatacctggggtgtaaaagttatcatcccacttcatattttttgtgcccatgcaggtggaccaggcacacagtgggtgcccgtcagcgtgtgctgcataaattgatgcagctggtcattgcataggaattggaggcccctgtcaggcaggcatcccacgtgcactgaccagtttgcttcaacactttcaggactcaggtgtagaggaaatgatgtcagtgcactgcaacagacatccccttgacaggggggtgcatggaagctgggattcaatgggattttgctggagtgagccagaggtgggctcattggtgctcttcagggcaggaaggacaagtggagggcgatgcaggagcctgggaggggagagcctctagccatgccccactcaagccctgcctccaagaggccctgagcagaggcccagaaagccaagttgacaatgtgtgcgcttccagccctgggggttggggagatgggaaaggctcacatccaaatactcaacattgactgagaagctctcggccccaactgggccctggacaacagagatatgggcctgaacatggacagatatgttctggggagctcagggtgagaccagccacacatggggctctgcaggggacgtgctcaggctctggggcagggaagggacagcccacacagcatttgcccttcctgaaaagcccacaaggctcactccttgtcttcacccagtctttgttcacaagatgcctccccagagccactttcctatctaaaagagcacactctccctcctaccacctgccatgctccatcctcctcccttcttcgttgtttttttgtttttgttttttgttttttttttttgcacaaatcactacctggcattcttttatatttatgtctttgtctgtctttgccgcctccttctagaatgtaatctccacatgaaaaggactttgtttcattcgcagcatagatgggggcctagaatagtgcctggcacctggtagatgtttcacagcattccctagctgaggctgggagggccagcaggactcagctggaagtcacgtggggcccctttaacaggctgaagggaaaacagcagcagtgggaggcagtgatggttctggcagaggtctgggggaaactgaatgccactggggtgttcccatgtgagaccccattcagacacaattggcctcccgcaactgcccacttccctcgccaccctccatccctgcccagtctagcccagtagttaccacaaccgatcccggcagatgtagtgtcatcggggcctctccagccaacaggatgaactctggcctggaaaactggaggaaaacagtcacatatggtagagaagacaacagattccaggctttgggtctgggcttcccccatgatgcacctctgcagcccccaccagcatacattccccagagccagcagaaaacaggccaagatggggctgacctgggctgaggccccagctgaatggtacatcttggagcagaagtcttacaggtgggtatagggtatcagcaacattctggctcttaagttgggtacaggggtgttcggggtgaattataagtttcataatttacacagaactccatcttttgtatgtatcaaaagtataaaatgtataatataaatataaatgcaataaaaatacttgaaaaaacaaaaatacttttagatttagatgagctgaaatgttttctagctctagatgttgaatcaatagcttagtgggcacctcttgttctcagtgtgtttgtattacacttgacccagaaaacactgcaatacccatcactagctagacccagctatccccctgtggggtgcatattctcaacccattttacaggtgaggaagttgaggctcctcacctttaaaaaaaaaaaaaaaagcttaagaagctcacctgagtcatataaccagcaagagatagggttgggtagggcttctatagtgcccccaagggtacctagcaggactcttgtcccaagaggccaaaattccagcccagaagtgacttgtgtcctgcaagagttcccaatagaagtatctctagtgagtgatcaggaagaaaagccaaaggaggtggacaaagcctctcagaagccctcttcacgccctccaccaagttcatggaggccagagaagggccaaggaggacagtgcgggccaggccagcgtatgggaaccataggccaaacaggaagagggacatcctgaggctatttggagctcagctcagtcaagggaccttaactaactttgacagacagacaggcacattccgcctaaccctattaccctcttagggttagccagctggaaggataactctctcctccctatagaagccctccctgcggccctggatctatgctcccacctttcacctgtgcagaaggccccttccaaacacattctgccttgtcagttctcgaatcatgtagcacgctctgccaccaccctgcgcaccggtggcttcctctagggtgggacccagcatctttaaccctacatcttatacagcgtcccccatagagccttccccagtgaggctactcagtgaatgcctatgccctaagttgcaaatttcaggtttatgttagtccaatcctataaacctcagcccagggaagttgtcccctagaagaccctgcccattttcagccaccgtgccagccacccacagctccctgctcaagcctccttgaggagtgtccttcagccttattttgcttaccttgctccttctttgcagaaaacccctctgagaaggagttgttggccatgagctgtctgctgccgagtgcacagatccagagctgagcctccggcccgcctgctggtcctggggatctgctcctggaagagcgctggccaggggttgagaaggggtgaagcacttagcaatggcaagggcttccatggcatgaaagaccacccgcacaggggctcagttgggcagggtgcacccactgatgcatgtcaccttctcccccacctatgggggagttatatccatttttcaagtgggggaagctgaggcctggagaagccaggctgcacagccactggggtggggtggggttggaggtacaaggcacagtcgacttctccaccccatggctttacctctctgtttgtggtgccaggaccccaggtctagagcaaccacccagcaggtcatgggactgcagcagttctggcttctttagaatttgatatgttgttcaaaatattttgacaataaaatatattgtttaaggaatcagggggtaaaaattgttttcattgggaaaataaagttttaaatggcaggaaaaagtattgcaagataaactctacgatatccaatcagggcgtcagctgtggatttgacatcaactatgacaagacactgttacagccctcaacaggtcaccatgtgaataaataaatcacccaaacttcaaaataaacaccgttccaggtccaggaagatatgagcccatctaggttttgatctgattcaagcatcctaagttagacaattgcaaaaatgtccacagttcttctccctgatctgcaccctttgcaatccgactttgcagcctcctgccatcaagagatggagtctatttcttactccttgaaatggggctggcctttaggcctgatatggccaacagaatgaagtggaaatgatggaagaccagttctgaaggctttatgcaccttgccgtcctctctcctctctctcctctttctctctgtctctctgtctctctctctctctctcagttcctctctgtcagttctgccattgtcacgagaacaatcctaggctgacctgctggtggaggagagccagagcttcccagacaatggccattcaccccgcaggagaagctggatagccgagccgaagacagtcaaaaaggcaggaaggctttcagcagagtctagaagacctcccagctgagcacagcctaaatgaccaactcacagaatcatgagctaaattcataattgttgcttttagccactgtgttttgtggttgcttgttatgcagcatggtatggcaatggataatggcaacaatattgaggcatgttgttgctccgccactcggcctgagtatggttcccagaggaaacaggatgccctgacagcacagctgccaccaggcccctcattatcttggcttcggatctgcttaaatgtggcttcttcatctgttaatggaatagcattggcattttctggaggagcaagaggcttcttactaataatcagtaaagaaataaggtaccatagcccccacacctatgtctcacatcaagttcacagcaccctttaggccttgctgcttaccggttaacaaggaggctgcagtgactgtgtgtcaaggtgctccaatggggctctggtgagctctgggtctccgtgcttctttctgaaactaatcaagcagcatggtagagggtatgggcagaagccaagatcacggctttcttaaatcaggcatctcagagcatgaatggcatcatgacttactagctgtgtgaccttggtgaaattccttagcctctctgaatctgtttcctcatgtagaaaacagaaatgacagttacagagggttggagggagggttacaagggaagataaagcctaatggcaaagtgcactttgttttagagacaacaaacaataacattaatttttttaaaaaaagctcagatttagttgaaaagtagagaacagtagatttgaagattattccaaaaaccactcttttaacacacccagaacaataactgaaaaaaaaatcaagtttttcttttcttgttgtttgtttcaatttggattttctcaacttggacagttagaactcatttttaaagttttcatttgatataaataactgtgttgtgtccccaaataagactttcctgggaacacaggtgagtcctaagctcagccccttctcttcaggggcttcctgaaagagtggcacttacataggctttctctgccatcacaatgtggatgtgtagcccatacagggcaggaaaaaatagaatgggtaccatcagcccacgcagggactgcttagggcacgtacccacctctgcaaggatgcagacactccggggcctgtgccgctgggctctcgctgcttgtcccacgcagcctcttcctgagcaggtagcttctgttctgctgcacagaggagctttcctccacaactcttttctccacctgggggtcaagtgcatcacacatccacatcccaagataaggagggggcgtttttatagatacatgcaaactggctgtcagactgaatcaatgtggaattgtctgccctatacggtgacctaaagatgtgttctctggcacccagaatgtgctctgtgcccaccccctgcatgcaccctgaaggcacttcactccccactccagacctgcacactcacacacatctgtgcctttgctcatgcattccctccatggctacagcctccccagaagctcctctgtgcccacaagacccagagctgtgtgctttctacttctaagcctctctacctctgccgtctgatcaccttcccttatcactgcactcacacctggctctgttgcatcatgttccatgagtgtgctgcttgtctgtctcccccaacatctctgtgtgctttatgcaccaccgtagcacacctaatgcagtgcccaatgaatgttgaatacgtgactgacatctaccttgcagatccctgacggaaatgttgcaggtcagtacactgtctatccaaggacaatggcacaccagtggatggtagacctcagtatctttcaaataaatatagtccatttcccccaccaaatcctctggctcaattcataggagccacatgttcctatgccaagagagaaggggtccaagaaggaggccttctctgatggcagaggccttctctgattgactgttgccgctgtccaccctgctgtccccacatctccatccactttggccctcattaatcctgctctcagctctccaacttgtccctggacaagtgcagccactcaactggcctctagcttacctgtctctggttcctcccaaatacaaacttccttacattttgtgccataggcacctcacttgcccatcctatcccagctccactcaggtctcatgggggaccaactccatggtgccattcctgcaacagagctccccagggggccaggctgggcctgtctccagctgagactatatccttcaacttgtcagctgtactaccatcactcccctctcccaggaacatttccccagtaaataacttgcacaagaatccctgtctctgggttagcttggagggaatccaacctaagccaaatgcctcccatgtgccaggccccttgctgcactctgtggagtgcacagggcagcaagcagcacagtgtgacaagcacaacaaaggacaccccacaggtataaaatagcagaggggagggtacccagggaccacaaaaacgaagtcggggaaggcttctgtgcagaacctagagttgaattttgataagaaaactgaatcatgggttctaaacattattgctttatgtaaggacgcacttgcaaagatgtcaagggtcttagccatgtgacaaactggggcttgcctaaaggtctttgttagcactgcccaatagaactgcaatgacaagaatgttctagatccaccctgttcaatagggtcatcacctgctacgagtggcaacggagcacttgaaatgtgacagatgtgactgattaatttaattttttattttattttagttaatgataatataactaattcaaattttaatagccacacatgaccagcagctactgcttgaaaagcacggttctctactgacctcagaaatggtacccagaaccaagccaaccagccttctgatgtggagaccagcaggggctgggtagacagacacttctttctcatgaacccgacaagcttccagaaccgactgcaacgtgcaccgcctgtgaggctggtcttcacacatggtcagcaggatggagtgcaggggctcgcagagctgcaggggctggaggcagacagggccggtgagaggagagagcagccagagctgccactacgaggccagcaccttgtcaggcaggccttggagacatggaaacgggtgttcccacaagcaccagagcagatgcctgccccttctggagagtttaaggacagacacaagatccatcactgaggccgcaaagtgcggagcaatcatctctgcagcaattctgtgttgtctgctgctttctaaaccagaacatccttctgcccaagcacatgcttggaatgctcatgaaaactagatgctttgacaagatggatttccacctgtgccaagcaccccaaatcaaaccagaggtcagcctttcactcaagttcacctgcgtagcttgtcattgtatccaatcactcagggggtctcacttggcctttcccctggaatgtgagctcctggaacatacagactgtggcctattcctgttcacttcggaacagccagcagtcagcacaaatgctcaatcgttgttggttgaactttatgtcacgtgtacacatcgagcaaaagaaaacagaagcatcttataagcatttccctcatgcatttaaatgaccacaattcataggagaaagtcctcaaattcagattcaaaatcagactttttctcaagctcaacacacactgcaggtcactttccagataaaggctgcactaccgcttcttgctggggagcatcagctgtgagcacctatctctgtgtacagccaagctgctgagtcctgccgtcacagtaaatccaggcgtcttttgtgcctggtgctgcacagccacaccagatacagtccctgccttcaggaaaataatggtgtgatgagagagacggtcactaaaagagacaaagaccatagaggatgacaaggactttcaccttgggaagcacaggccatggcactaatgtagaggaaggggcttagccaaggctagagttaaccaagaggaaagtggggagtgaggtgctggtgaagggatccgtgtgtacaaaggcacgaagatgcagatgagctgacatgcatctgaagggaaggggattatgagcaggacaggggcctgggggaaaatagcaatgtggggtcccttgttcaaaattattaagaattccaggacagtgatagcagagcattaaactaagtgcaggaccctgtgctatgacacagggtcacacactcaggacacacacccaggaagccggtcctgattatggcagagtgccaaaggggaaccagacgggagcagggaccctatcctaggctccaggtgtgtctcactgagaagtcagaaggcaaccccacggccagtgaggcgttacaaaaggttgcatgtgagagtggtcgtgagctggtctcttagaaagaccacccaggaagagcccggatgttgaattggagagggtcggggtgagtagaaagaaaggcaggaaggaagggaggaggagggagggatccagtctagccaggtcagctaggcagggctctccagcaggtgttcttgtggcaccagtctctaaggaattgttatagtatcagatggaaatgtacacaaacacttctattctgtagttgaaaattgtgtaaaatattaggatatttttatgtagttcttttttgagacagggttttgctctgttgcccaggctggagtgcagtggtttgatctccactcacttcaaccttcccctcccggcccccggggtttaagcgattctcatgcctcagcctcccaagtagctgggactataggcatacaccaccacacccagctaatttttttatttgtagtagagacagggttttgccatgttggccaggcttgtctcgaactcctgagctcaagtggtctccccacctcagcctcccaaagtgctgggactataggcgtgagccaccatggccagccaggataaagttaagtttctaagctttaagccttcttgtagtttttaaaaaatgactctaaaaaatctttgagagggagatattgtagggagcatttacccaaatctattgagcccagaagcctttttcagggaagcatctcactttgggaagggttgttttaaagcctttttaaaatatatgtaaatctgtatcttcagtgtctataaaattctctagcttgctattaatacttcctctgagcggagatggccaaacttatcctgcttgccagtcccaaattgtggctgcctggagtgctatgttgagtgggattctgaggttgtttctgcactagcaggaaggagttgtgtgataagttctcaacgcctgcctaggacctagaggacgggagagtggcattatgtgtgctcagtaaatgtggtccctgcccaggagaaaaccactaaataaacccagagacacagcccggcaagacttggagtatcttgtttacaaacctgatgtggcggaacatgaaaccctgctgaccagtagagggtcattcctaaagaatagacatgcatctgcccaaaagaagagtacatgattagatttcaatcatctctgttattccatggctctgcaagaaaaatacaatccaatttccacatgaacagacactgttgtctggcgagtctagcaccatctgcaactcccttaacccttgttacctcctactccggaggctagaaagccagaaatttgctttctagcagaaaccatgacactcagttttggtgaaaggcgtgagagaaatctgttagggggcttctgataaggcttttgctttactgacaaaaggacacatgtgactggccccacactttcccctttgttcctgccttcaaaattgatgtgattgatacatggagtcttcgcagccattccgtgacaatgaggcagcaagcataggacagaaagccagccactggggaaggtagaatggaaatacacagcctggatccttgatgacatgaaacggctgctgaccaatccctagacctcttgtttagtaactaacaaccatatctttggccctggccattgtattttaggccttctgtttccatgacacattacagttcagcctgattacaaagcaccatatcttgtcaagaagcaaaatgatgtcatgggaagagcattgtttgacatctctgaccctcagtttcttcatcttaaaaatgagtattctgcctgaattctaataaagatcaagtcaaaagtacccgaaggtggtaatattaactattattattgttaccattattattattggacatagagcacttacaatataccaggccttgttctaagtcttttacccatataaacttatttagtcctcactgcaatcctgtgacgtaggtactttaattgtccccacttgtctacatggcctctggattataccagtcctcaatcaatgtcagttggtgtttattgtggggcttctattataactgacaaggcacatttcccttaagatctctcttctcaggaaatgatttttgggattttagaaggaaacaatgaggtaatgaaacattgcatgtaaaaacacacagttatttgagccccccacttggtttaatacaagtggttttagtttttggttttggttgttcacatctcaaggtcaagatgtgttcaatgtcacctgtgacaactcattagctctcatctttgtttgaaattatatcctgaaaccagctcccacccctcagatgaacgtgcatagataccatgcaagaaagttcacaagctgcacccccatttccagagaaaggacccaaagagcaggggcttggtaggcagccacttctttctcattacccaacaagctcccagaaccaattgcagtgactgccacccgcaaggctggtcttcccacacggttagcatgatggagcatagagactcatggagctgcagggactgaagtgcagacagagctccagcatcctgagcactgccagaggcaccacccacacctgggagctcacctggattctaagggctctgtctaaaagtgtcttagggcaaggccttggccacagtgacaaaaggcttcatccaaaattctaaattcagctcactggtagacactgccagtagaggctggtgagaaggattttgaaggcaactcctggctcagtgggaaagaacaccatgtttgattggtgatgtctgccatgagcataggatggggtactggcagcacagatgacttgtagttagagacctgcccacaccttccacctgacctgcacctgaggctaagatgccaagtagttggggaaatatgtcagtgcactgtttagggcagatgttggtccaaggagaggggtctgggtacaccctcccagcaccagaacgaggcccaggactgggggaggattctgagcacagcctgtccagggaccattctcctagctcctagctgcccaaccaacccctcatggacccatgccaaactggatgaagagaggagcctgtaatgaatggaaaagaacagtgatgaacagaactgagtgttagagatgctgaaagagatcaagttacctggtcactctgcctccttgcctaataaacagggcttgaggctggtggctttggccccttaaagcccactccacttgccatgcttcatatgcctagagcgctaaaccaatgtttggttagttcggagctcagtccctctcatactggatctcttccagctcacactcactctcatcttcctggccaggactcagcaatacatttagccagttcttaactcaacctattagtcttgaatctactggagtcctcgtgcctctgcctggaggaaagtgtgcaggaggaaggaacatattattttccagctcaaagacgctctgggcagagaagtgactgggccttcataaggtactcaatggaggccaacctgcaatcaggagggtgatgcctgatcctaaccagtgagtactgggatggtcaggagcactcaaatctgtgttagctcaggtacatcagaaagtggagcctgaggcaagggttaagtgcagacccttcactcaggggctgcaagcccagggcaatgacagtgtagagaaaatgggaagggagacagggaccaatgtgatatgcagggtcaaaatgctggccatctccttgcaacaagcaacagagcacagcctgaagtgcagcagacagggcttcctagcactcaggacttctctagaaagcttgcaaggcttgcacagcacaaagccatccacaagagaaagaggagggaaaacgtatcctcttaggtcccctccagactctcatttaccactggctaagtgtcccccataagaaggtaactcccctgcattctcaggttgcattggcgtggtcctttagcagtcacacagaaatcccagtcccaggggtcaatatgtgacatcttagctgagtccagggcataagaggcaactcagtgtaggtggagccaagagtcccaaacagacctgagaggcacgcaagtctgtgtccaatccaggaatcagtgattcacccctggggtcctggcagtgtaagaaggtatgtgggcctggatgccagagtgacttccaggatttcaggggggagggggtgctggagctggggtcactggaactggaactcttatgctttcacttttgtgggctgacttacagacatgtggacccagacaaaccaaatctggaaaccaccacatccccattctctgcctttcagagcctggagggaaagcagctcccattccagaatgcctcccgagggtagcagcattttcacatctgcacttttctcatgaaagggcgaggaagaagaaacagaactctctgcggaaacacccaccatgccccatccagtgttgtgtggctgccttgcaccattctctcctttgagagaattaaaattctctttgaaattaaaaatgatgtttactggaaacttctgctgttcagaagcaaaacatgtccattgttgaaaaaccaaaaacctccactgatgttgccatccagaaacaatcaccgcagacactttggtgtatgtatttttagaacttcctctctctctctctttcatcctctctaaccaaacttggataatattatgtgcacatatattgaatttcttttcaatacattaaataagcttctacagcctcattttaatggtgttttgtctcatgtcctctcccactcactatttagcttgttttcaatttatcactaacgtcagcaatacaacaatcagcattgctgcagctaaatttatctttacttgtgccttagaataaattcctagttgaggacgtgttgggtcattttgaggtgtcttgctacatactgccaatggtaacaatgtgccagaccacttaaccacagcttttcaacacttctttttgaatattgataataacctgatcaattaagccacattaaccccattttaccaatgtagaaattggggctcagagaagtggacttgcccttgtccatgagctagtaagttgttgacaagaaatcctgggaataaaactcttgaaacccactctggcttggtgttgagaaccaagctctgcaaggctgagctgggagctggggaggctgccgctgggacaggcctttcccagggcacaggactcagaagttgcagagtagctgcacagcttacctgagatgcatcaggctgctcatcctcactctgtccctgtagcagttcaggggccttgaaaggagcagcctctatatgagaaacacggccttggaaagaaaggcttccagctgcagaaagcagggctgaccaggggcaaaccacatagtccgaggaatctgaaaccaagccagtgatggggctgtagagacagagcttccatctggggtgccagcatgggactgtgcccagcaggtgcctggcagtacccatctctgggactgaatgtgagcaagacccagaggagacatggaacagaataaattcaaccctgatgcatgggaacatgtataataaaaggtgactgtggccatggccaggaagttagcacctgcacctaaattcatctgtggcccaagagtctcaaggtaaaaggtaaagagagggtcaggcacacctggaatttagcacaagcctgagttctctagagacagaccaggatccaaggcagctggtcttctgggagctccgtagctgttcatcagaacctccagggtggggaagagggagaagatgacgctgaaggcacaggtgcacagcctcctccataggcccatgctgggacccatcgccctcacagaacatgtgtaatgtttcactccaggagcctctgctgtatgcactgaagcccccaagcacgtgtgacctgtgagttgacacctgagtgtgggtactcagcatttgttctggaccttaatgcctaggagccccatagtcatccttggataccgctaccttaggtctctcctgtactgagagcacagtgtgcagctttctcattagagggctctgaagagacactataggaggccttattactgagagcacagtgtgcagctttctcattagagggctctgaagagacactataggaggccttatctctcccacagtttctggagttagtgcaagtgtgaggccacctggaggttgggctctgtacagaacacatgcccaggatgtgaggtcacttggccacctcaaggccggaacttgacatgtgaccaccttctcaaatctacacaggactctagcggccctcctgcccacaccaacctccagagaggtgactcgcccgagcccacctacaccctaaagggtcgccccaacccccacctgcagtgcgtgctccctacctggccaccggtggctattgcctgggccatgactgcagaccacctctggcagggcacaccagcaaattctaccatcatcatgggctgcaagcacagctcctcccacagatctgaaccccaaacagggaagggggcttcccttcaaagtttatccctcactgggtacctgccctcagccttaggagacccactagcattttctttttctttttctttttttgagacagagtttcgcgctcttgtcacccaggctggagtgcaatagcgcgatctcagctcagtgcaatctctgcctcccgggttcaagtgattctcctgcctcagcctcccaagtagctgggattataagtgcacgccaccacgcccggctaatattttgtgtgtgtatttttagtagaaacagggtttcaccatgttggccaggctggtattgaactcttgacctcaggtgatccacccgcctcggtctcccaaagtgctgggattacatgagtaagccaccacaccagcgttttcttatgccttacagttgctcttcaaacactgtttagtaattctttctattaacctcccctgtttagaacacagagtaggtctgccttttttttttttttttttttgagatgagtcttgctctgttgcccaggctggagggcagtggcacaatcttggctcactacaacctctgcctcctgggttcaggaaattctcctgtctccgcctcccgagtagctgagattacaggcgagcgcaaccatacctggcaaatttttttttttgtatttttaatagagatggagtttcaccatgttggccaggctggtcccaaacccctgacctcaggtaatctgcccaccttggcctcccaaagtgctgggattacaggtgtgagccaccgtgcccagccaggtctgccttctgatggggcacagactagtgcaacatctggtggacagagtgtaggggtgtcctgggtgaccacaccctgcctctcatctctggttatgcccagagacagcccatgtgctgttagacacccatagcactgcagccactctcttcctaaatcctcccagctttgcatgcctggaaatgctgcaacaccaaggcagaagcaaagcctttcttttgactctgccacatggcatgggtccaagagtcaggcctgccctcccagtgcagctccaaggataggtgctattcttctactcattctaatacctcagagtaatcacagatcaagcagcagcaaccttgttctgtgctctcagaggttgatttaaaaaagcagcagcagccagaactgtgtttgtgtgggaagcttcacatacaactccctgtgatttgactgcccccaaacactctcttaccgttgcggaggtcttccaggagctgctcagcggccaggaacaggagggaccagatttcctcctcagacagagcttcacccctgacctgtagggcgctggccagcgtcacagaggacaggctcatgcctacaataaagacatgcatgtgacagggcctctgcaatgtccaggaacatgtccgggcccgtactcgccactctggtgcagccaggcatggtctggccactactgcacaccggcactgtgttttcagcacctgggtccctggggtcaggcacagagccaagcacacagaggagttaaagaaatgttaattggaggactgaccaggttggctggtcggttctcagtgaatgagtaaacaaacaataaaactcccaaatgaaaggttaaatgaataaataaatgaacaaccaaatgaaacatgagaacagcacctcccagctgggtgcgagctgttgcagagagtaacctacacctgggtagtgtgtggcctcctctccttctctctctggagaagttagctaacatttttgcctgcagtacgtgattcacatctttcatctctggctgccacatgtagagtcagatttggtgccagtaccacccctttctccagcacctgcctgaagtgccagagcgactcactagacagaagtataagccccatgtttcagaaaggggcagcctcacagataaactggaggaggctcaagagggctagtcttctcttccctctcttctggtaagcagggcctttagaccaaagctgatgtttaaatgtctatctccctgacaaagctgccacccactaatctccagagacccaggtgctgagtggcaccggaagaagccaggcgggcttttcctaatccatttacatcctcactgatctttctctacagccagagctcaagcagggcgggtgtgcagtgtcgggcgctagatggggagcacatagaggcacccccatcccccattgacacactaatccaagatctactccccagctgcccagctccctgcagacacctctgctaccagcctcctccagcctcaggaagagaggctggtttcaggagaaagaggcttggtctgctacctctccctggggcagaaagggagccgcagcaggaccccctcagaaagcttgacctgtgagccgtcacttatcacaaggagtctgtgaagaagggagtattgtttccatttacagacaggaaataagtccaaggtaatcaagtaaaaagtgatgaattagaagctgaactccaggccctctctctttttcttttctatttcttttcttttttctttcctttccttccttttcctttccttttctttcgtttttttatctctcctctctctttagaaactgtttgagacttatggactaggcattcctattccaccacatttttctaactctctatagccacagtgaaaggttgcttattaaagataagaagggggaagaagaagaccatgattcttatacaaaaaatctctaaatcccaaaataaaatattgaatgggtggggttttttaaattgctttatgactagacaaaaatgcattaaaagtcttctaggctggtgtggatagtgaagaccattatttcagtacaataattcaatggagggaggacaaacttttcaacaaatagttctggatccatcatggaaaaaagctgaacatggtcctaaaccttgcaccttatgcaaaaattacttcaaaatgaatcatagatttaatatagaacataaaactataaactttcatggaggaaaatgggagaaaatatttaggactcatcacaaacaaggactgcccaataaaatgaacagctgatttctcatcaaaaaccatggagaccaaaaggcagttggatgacgtatggtcttaactagccacaccagcctcaaacacttaatgcatttttttctaggcacaaagcagttagaaaaaccccacccaatatcaaaatacttggaggggagactgtcaaacaagaatttggtagacaacaaagcaatcaatccttcaaaactgaaagagaaattaagacctattcacataaacaaaaattgtgcaaatttgttgctagcacacccttccctccgagaaatcctaatggagtccttcagactgaaatgaaaagacactagacagtaactcaaatccacatgaagaaatgggagcacccataaagataataacataggtaaatgtaaaagacaataaaaatgtattttgattggaacccttttttctcctatcagaatttttttaaaaggagcatccaacatctggaaaagcacataactgatcgggtttgccaatcaagcacccttctttttgttaaagctaagagtcactagaggcttgaagttgctgtttttgttattggacgtgtcaggatcacaacttccatatcaaatataaccatgatccaggagtcagtgacaggaaattactcatcaccctttcaattaaaaaaaaaaaaagttgtcatgcttgttccaatgcacaagcacgatccctctacagaaggaaatgtgtgcattccagttttcggcaccaactccctgcctgaccaaccacagtgttacggtggaatgttatgatctgtccgcagtggcaagttggtttctgaagagtgcaggaagcctgggaaccatccagagctctgaatttccctggctggcctcaggactacagtgtgggttatgaataatctgcaagctagcaggtaggccaagatttgtatcgctgctaggcaaaaatgcaaattccttttcttgacctgagaggtctggcaggcagatgagccctgcccacctctccaactccacttcccacctccctgtcccttgcttaccaccctcaccgtgttccatcacactgggcttgtgatagattatgaagtaagataattctctacactagcccaccagcccttaacaaccagcctggactcacaattaacattgttatctctgtgtgatattgtgaacactatttcaaagcccactgctacttccttgaacgacaatacacttccatagcatttactgtacgccaggcactgttcagagtgctttatgtgctaactcatttaagcttcatgacagccttctgaaatagggctatcatcatgcccattttaaagatgaggaacaaagaggttaagtgacttggccagtgtcacacagcttggacttgggtttacgctcttggtctcagaggcagagctcttccccaccatattatgctggctgtggaaatgctgtgaagcactttatggggcctgtaatctcaggctatgaaatagtcattagcctttagccatcacaccaagatgcctctgggctcctctccaagtttttcatggtctggtgggctgtatcatgcactgaaaaggggatcattaactatgtaaaggatgcagggatcccactgcgtagagagatctgacagtgaggatgttctgggaaagcatccagtcaatgggcattttgggggggcccctccactacccttatctctcatacaccttcccagatctcacctacatagactgaccctctatactgactccactatctgaaggcttcggggctcatctagtagcatagaagtcttctttgccattggagatcccactagcccatccagaagcttctttgggccctttccaatgagtttccaggctgaggagcatcctgtttgccaggacttgcttttattggccttagcctgtagcagcccctctccctggcatgcctcgggctagaatcttttccctgcccttgatctttagtgcttccacttgggcctccctctcccatgtgccatggcaacagcagccctgagcttcatctgtgaggctgtccctacagccttccctcagccattaccacatttaataaatactcgtcaaggatctggtatatttcaagctctgtactaccagtagaatgaggaacaatgttaacaacctaccctgagagtcatggggatgggcagagggagacagccaacgagaaggtaagcaaataaaataattctgtagagtgatagactaatgaagtaagaataggcaatgcatgataacaagcttttggtgtgggggacatcttagctgaagtggtcaaggaaggcacttccaggaggtgtcactgaagctgagatttggaagttgagaaggcaccagccatgggaaaaacttcccaggtagagggaagagcaagcacaacagagtttggcagattccaagaactgagagaagcccgctcatggtgagggaggtgagggcggtaagccaggggtaggcaggtgggaggtggagttggagaggtgggcgggtcccatctgcccgcagacctcttaggccaagaaaaagagtttgcattttggcgtaggagcagtatgaatcttggcctacctgctagtttgcagagcacgtgcaacccacactgcaaagccagggagaagccttttgacactggcctgtggctgagtattaactagaaggaagggagagttccagagggctgactgcaaacaccttagcttatctgatcttcaccagtcctgtaagtggagatggttttaatcaagggcaaagctcgcatctgctccctgcccccccacccaggaagaacccttgggtccctgtcccctagacagctgcccagtcaatccccgagtgtcagctgcagggatcagccacctcacccgggcggcacaccgtatgcattagttgccaagatattttgcagcatttgtaaagtgctggcttctgaagaagtaaggatctctgttatccctaattgtatattgattgactgactatatagtggcttttgaactgtgagattttggtcacatttcggtattttgtcttcattcatctcccctccccaactctccatcaagacaccatccatgacctctggccttcatctgtggctggttagcgagattgacaaccctctggaatgccctggagacactcctgcattgggacagaggttggaccaaggtctcagaggtccctaaggaccttctcagctctggagctgaaggtgccactgcccaggaagagaaggcatggaaccaagggaagcagaggaggccttgcaggatggggatgagtcacacaactcctggcctcgtgggtcaggggaccaggccactgtctgtccttggaacactccttgtttctccaaactcctggtttgtcctcacctcctcggcattctttctccctctcatggtccctgaaatgttgtccctcaggattctatttgaggccctgtatggtttcctgtgccttctataacaaattaccacaaacctcacagactaacacaagataaatttattatctcacagttccaggaacaagaaatccaaaatcagtttgactgggttgaagtcagggtgtccgcaggactatggtccctccacaggctctgacggagaatccttcccaggcctcctccagcttctgccatctgcccgcattcctcagctatggccacatcactccaatctctgcctctgtggtcacatcgccttctcctcttctgttttaaatctcccagtctttttttttttttctgcctgtaacattcacaggttccacaaatcaggatgtggatacctttacggtttttatttttttatttttttattttatttacttattattattattatttgaggcagagtttcattctctcgccctggctggagtgtagtggcgtgatctcggctctctgcaacctccacctcccaggttcaagcaattatcctgcctcaacctcctgagtagctgggattacaggctcccaccatcactccaggctaatttttatatttttagtagagatggggtttcgccatgttggccaggctagtctctaactcctcacctcaagtgatccgctctcctcagcctcacaaagtgctgggattgcaggtgtgagtcaccataccctgccaacctttacctttttttagagggaggctttattcagaccaccccaggctctttgtctttcagcattctctacctgtttgcctgaaaaagacatgagctttgggaggttgaattcttagctccttgaccctgggcacagggcacatacttacccctctgagcctcagtcttatcatctggtaaatagggctaacagcagcagcgacctcatggaactgcccaagtgctcagcacataaaaggtgatgagcacatcatatttcctgtctctttttgtctctgctccaaccatccagaaagggattttaaacatcaggactgctgagcagcttccaactatgggatttttaagatatggtgttaattgtttccatctgtctgccagggttgaggtgctataaacatcccattttcaaccttagcaaaatgcctcaaatatctccatgacaccctaggaaggaaccaggaagaatgtgggactcccaaggaatcgaagctctcagagcgatcttttcctctcttctccttttgttccttcggtctctcttcattccttctccctctggacatttattaaaaaccatctgcccacagtcagaaccagagatctgaacaaaacttgccagaaggcaaactgcatttttcccctgaaggaggaaaagactatcctgcctctgctaggccctagttaaagagttaaaggtgtcaaggctcttatcttctggaattctctcacagtcagcttcccagagcctgaccttgagtgagtgagtgatgctgacattgcatcactatcaccttctccacacagacccttccctgccctgttttctaccccacagcccctgatttaaatagtggctacagcactgacacagtatgaccttgaacaaggacactcttcacatctcatttacccatctacaaaacggagatgctgactcctaccttacaaggtgggtgtgaaaaacagaacaagctaatgcaagaaaggcaactagagaacaccctaccactcttcaggattccaaggtggcatcttgcattcgtagatgagaggatgcacactagtacagagaaatatttttcggcattcagagcattttagagtagtgtttctcccatcttcaatcttttacatcccgttttcccagtgtttgccacattcccatctcacttgtacaattaagacaagttttttcatttaaatgcatttattttaaaaggatactacatatcattatagtaaatggaaagttagtatcatcagatgtaaatagaaggtaattataactattttataaaaattattgaattattgccaaataaaattgccttcaaaaggctctgagcctgggcatgatttttcattatgaaagaagcaattagttttagaaacatgtaaagtctatttctgagcagactgtcttcttgacataatctgaaaaattgaagtaaaatgtcaagagcatcattcaatgttattaatgcagtcatgttccacctgggttccatggccccacctgtccttctctaaggcttcagggccagttacaatgtaatgtgaccgcagtgtgtattagttgaatcctcaccaattatacttgatgataattacttctaaggagagtagccctttacagcttacagagttttcataaacttctgtgattcacacaaaaatccttaaaaataaaaaggcaaaaacgatccccacttccagatgagtaaactaagaatttaattgacttaaggtcacaaaagccacacagctagtaaatttaaatttctgcaaaagtggaaggctggggttttgagctaacaagactaattaaagctatatgggtttaaattggtcttcaatttattaaagttctgaatttaaaaagcaactttgtctcgaacctttaaatttaaagtattatgcgctattaatctagtgacttgtatataagaagaacgatttcacatgatgtttgattaatatgtaatgtattcttaatctgttggtgatctccagagaaacagaaccagtagtacatgaatgtgtgtgtgtaagtgtgtgtgtgtgtgtgtgtgtgagtatacacacatacacattttttttttaatcttaagaagaaggaagctaaggtcatagcctggggtaatagactcactattcatagacttatagagcaagtacatacccttttctcccaccttatcacctcatcaccaggactcctgcataagaacagcagatgacagctaaagaacagcaaggcccagattctacttaagaaggagtttctaggaaaaggtaaagacaagaagggagagaaaaacaagaacaacagaaaaaattgaagtctcagatacctactgtattagggttctccagaaagacagaaccaataagatgtatagatatagatatagatgtaaccaatatataatattggacaggatatccaagaactgtggaacaattacaaaaggtataacatatgtgtaaaaggacaccagaaggagaaaatggaaaagagtagaaaaatatgtgaaacatttaaggtaataatggctaagaatagatagatagattgatagatagatagatctatatatatatgtagatagatagatctatatacatatatgtatagatagatatagatagatatcttatatattatagaggctgagaagttttacaatctgctatctacaagctgaagacccaggaaatgcaatggtataattcagtccaagtctgaaggcctaacaaccacagaagccaatgatgtaaatcccagtccaagggcaggagatgagatgagatgtcccagctcaagctgggtaggaaaaaagggatgagtgtctccttcctgtgtcttttgttctattacagccctgaatagattatatgatgcctgcccatagcacaattcaaactctgatctcttccagaaataccctcacagacacgttccaaaataacatttcatctgggcagcccatggcttcattaaaattgacacataaaattaattataatacctacagctatagcaaacagtaaacacagcactactactagccagataatcataaatgctctcactaaaggtctgtttatctcagttcctattaccccatacatcatgtccagctttcaacaaaaaattacaagtcatgtataaaaacaacaaaaaactcagtttaaagagataaaacaagtgaaagaaccagactctgatatagcagaaatcttgggattatcataccagaaatgtaaaataactatgattaatatgctaagtgttcaaatggaaaaggtggggcaagatgcaagaatagatgggtaaaatgtaagcagagacatggaaattctaaaaatagaaaatttcttaaaagttagcaatcaacagcattgcaagagaaatgaagaatgcctttggtgggctcatccagtagattagacaccttcaaggaaagaatcaaggagcttaaagatgtgtcagtagaaacttcccaaatggaaatgtgaagaaaacaaagaatgaagaaaaatggaacagaatatccaagaactgtggaacaatttcaaaaggtgtgacatatgtgtaagggaataccagaaggagaaggtggaaaagaatagaaaaaatttgaataatggctgagaatatttcaaaattgataacagacaccaaaccacagatctaggaagcttggaaagcatcaagcaagataaataaaaaaaacacatgtaaccctaaacttaaaagttaaaaaagcaaaaataatggtaaattaatattccccagcaaaaaaaagtgagagagagagaaatgtaacttacatatatagcagaaaaaggataagaattacaatgggcttctcttcacaaactgttcaagtaaaaagatcgtaggacgtaatatttaaagtgtaaaaataaaaaaactaccaatctagaactctgtatactgcaaagttaacattcaaagtgaaaagaaataagactttctcagacaaacaaaacttctgagtatattggtcaccagtaggcttgccttgcaagaaattttaaaagttcttcagagagaaggaaaatgatacagaagagaaactcagatcttaagccatttatttcccttattcttaattgatctaacagataactgtttttcaaattataatagcaacaacatcttgggtgattatgccttataaataagtaaaataaatgccagtcagttataaaggctggaagggagaaacgggtattactctgtaatatgtacctgtactacacatgagctatttgaaagtggatttaaatttgttgtaaatgtatactgcaaactctagagcaactactagaaatattttttaaaagaagtataacttacatgccaaaataatataaaatgctcaattacaactagagaaggcagaaaaacacgggaagatcttaaaaagaaacaaaaaccaattgcaacaaatagaaaacagttataaatatggtggctattaatctaacaacatcaataatcactttaaatataaaggtctaagtatgccagttaaaagacagaaactgacagagtagattaaaaaataaaacccagttatgttgtctagaagaaatcccctttaaatatgaaggcacaaataggttaaaagtaaagggaagaataaaaagattaattttaagaaaactaaaaggatgtagacagatatactatgctaacacaaattaaaagaaagctggagtaaccatcttaacttcagacaaagcagacttcagaatagagaaaattatcaggaatacaaaggggtattacataatgatagaggtcaatattccaagaagacataacaatctctgatgcatatgcacttaacaacagagcatcagaatacatgacataaaaactggtagaactgcaaggaggaataaacaatctactattatacctggagacttcagcacccctctatcagggattaacagatccagcagacagaaaatcagtaaagacgtagttaaactagacacactgccaaagaactggatctagttgatggctgtaggctattttatccaacaacaacagaatgcatattctttgcagtttcacatggaacactcaccaagatatatcacattttgggccataaactttattgatttatttatttatgtttatttatgtatttattttttgagacaggttcttgccctgttgcccagcctggagtacagtggtgcaatcttggctcactagtaacctccacctcctgggttcaagcaattctcgtgcctcagcctcccaagtagctgagattacaagtttaaaagtacagaaatcatacaaagtatgatttctctcatggagatttggttctgtcagtagaaccaaactgcaaatcaataacagaaggatagccagaatatcctcaactatttggagattaaacaacacacttctaaacagcaaatgggtcaaaaaggaaatctcaagataaaataaaaaatatttttaactaaacaaaaatgaaaatacaagttaccaaaatttgtgagatgcaatgaaggaagtacttatacagagacttctaacattaaatgcatatattagaatagaagaaagatctaaaattaataatctaaccttccacctttagtaaactacagaaaaaataacagcatgaacctgaataaaagaaagcaaataataacaaattagaacagaaatcaataaaattgaaaacagaaaaacaatagagaaaatcaacaaaactaaaagcagattatttgaaaacaacaacaaaactgataaacccatagccaagtaaccaagagagaaaaaaaaagagagaagatgtaaataactaaaatcacaaatgaaataagggccatcactactgatcccatggatattaaaaaggataatatgcccacaaatgtaatgacttagatgaaacggaccaattccttgaaagtgaaaatctatcaaaactcatacaaagagaaatagatcatctaagtatgcctatacgtattacataaattgaattaataattaatggccttccaaaacataaagcaccaggcccaaaggatttcactgttaaagtctaccaaacatttaaggaaaagatgacgctaattatctgcaatctcttccagaaaatagaagcagagggaacatttcttaattcattctatgaggccataattgtcccaataccaaaaccagataaaaatcttgcaagaaagtaaaactacagatcaatagttttcatgaacaaggatgcaaaactcttcaaaatattagcaaatcaaatccaacaatgtataaatataatcatacaccatgaccaagtgaaatttaattcaggtatgcaaggctggtgtgaaaatttattaatgtaacccaccactttcatggactaaagagaaaaattatataatcaaatttattaatacagaaaaagcatttaacaaaatccaacagcaaatcatgattaaaaactctctgttaaccaggaatagaaagaaacttcttcgacttaatctttttaaaatatgtaaaaaaaaaaatctacggccaacacatgacctaagggtgtgaaactagatgtattcctgctaagatcaggaaaaatacaaagatgtcccctctcaccattggaagtcctagctaatgtaatcagacaagaaaaggaaataaaaggtatataaattagaaaaaaagaaataaagttatctctgttccgagatgatatgattgtccatgtatgaaatctcaaataatgaacaaaaaacctcctaaaactaataagtgattatagaaacattgcaggacaaaaggctaatacacaaaactcaactgttttgactttaattaacatcagcaatgacaactgaaatgtgaaattataaacacaatatcaattattatattaacaccaaaaaattttgaagtatgtagaaataaacctaacaaaatatgtataagatccctataaggaaaactacaatattctgatgaaagaaataaaaatatttgttttaaatatttttaaaatctaaataaaggaagagtattctatgttcactgagagaagactcaatattgttaaaatgtcatttattctcaactcggtctgtagatttaatcccagaaatttattttgtgaatatcaacaactaattctaaagtttaaatgaaaagggaaaacaagtcacctagaacagacaacacaatactgacgaagagaaacaaagttgtaggactgatccaactatccaacttcaagagttactataccaaggcaatcctatacaaaaagaacaaagcaggaagcatcaagctacccaactttaaactacactactgggctacagtaaccaaaacagcttggtactggtacaaaaacagacacataaaccaatggaacagaatagacagcccagaaataaggccacacacctacaactatctgatcttcaacaaagctgacaaaaacaagcaatgaggaaaggacttcttattcagtaaatggtgctgggataatggctagccatatgcagaagattaaaacaaaactccttccttaaacaattatataaaaataaactcaaaatggattaaaaacttaaatgtaagacccagaactataaaaactctggaagacaaaacctaggcaataccattctggacacaggcactggcaaagattttattacgatgatgtcaaaagcaattgcaacaaaagcaaaacttgaaaaatggaatctaattaaactaaagagcttctgcacagcaaaataaactattagtacagtaaacagacaacctacagagtaggggaaaatatttgtaaaatatgcatctggcaaaggtctaatatccagcatttataagaaacttaaggaaattcataagaaaaaaacaaacaaccccattaaaaagtgggcaaaggatatgaacagacacttttcaaaagaagacatacatgcaaccaataagcatatgaagaaaagttcaatatcactgatcattagagacatgcaaatcaaaaccacaatgagataccatctcacactggtcagaatggctattaataaaaagaaaaaataacagatgctggtgaggttgcagagaaaagggaatattaatacattgttggtgggagtgtaaattagttcaaccattgtggaaatcagtgtagaaattcctcaaagagccaaaaccaaaactaccatttgacccagcaatcccactactgggtatatacccaaagaaatataaatcgtcgtatcataaagaaatacgcatgtgtatattcattgcagcagtattcacagtggcaaagacatgggatcaatctaaatgtccatcaatggtagactggataaagaaaatgtagtatatatacaccatggaatattatgcagccacaaaaaagaatgagataatgcccctttcaggaacatggttggagcaggagaccattatccttagcaaactaacacaggaacagaaaatcaaatactgcatgttctcacttataaatgggagctaaatgatgagaacatatggacacaaagtgggaaacaacagacactgggtcctacttgaggatgaagactgagagaagggagaggagcacaaaaaataactattgtgtcctaggcttagtaccaggtttataatataatctgtacaacaaaccctggtgacacgagatttcccatataacaagcctgcacatgtacccctgtacctaaaataaaagtttaaaaagtaaaataaaaaataaaaacttctaatatgcattcttcaatttaaaaaagagaaaaaagagttattatagggtatattaatcaagacaatgtgatgttggtgaaagaatacacgaatagattaaagggacaaaatagagtcaaaaaatagaccaatacatatacatttaactgatctttgacaaaggagcaaaggcaattagtcttgagatagtcttttcaacaaatagtcagcaagggcctagggagagcccagacattacactcatccagctacaatgaggcacagtcatttcttccacacagtcagttcagagaaggccaagtgggagctgaaactctcattcccacctagtggtgacttgcgtcacaccctagacttccactttcctctggtgataacaagatgccccttggcctccccacgggggtggtgccagggaaggtgtaagagagggtcagtacttttaccaccatgcagtggtaacaaggcatcccctgacgtgttgcatgaggagcagtaataaggtgtccccgaccctcctagcaagggtggtgtcagcagaggactagaggggagccagaacagtcacaacaagatgccctcaaggttatcaagagagactgagtggggggtctagacttccatttttacccggaagtaatgaagcagagcccttctgtccatacagtatcagggaacatctgctaaaaatgaagctctaagtaaggtccagagtctcatatcatagtacccaaacatcttggattcagtcgctattgctcatcatatcaaaaaccaggaaaatctcaacttgagtaaaaaagacaacagaagccagtaccaagatgattcagatgtcagaattatctgaccaggattttcgtgagcaatgacaagcacaataaaaacaaagacatagaaaggctcaacaaagaaatataaagaaccaaatggaaattttagaactgaaaaatacaataaccaacattagaaacactatgggtgggctcaacagcagaatggagaagactgagtagagaatccacggattgagaagagaacaagagaaatgacccaatcggacaacagacatcaaaagacatttctgtatcaaagggcattatcaagaaactgaaaagacaatccacggaatggcagaaaatattaaatattggcaaatcatcaatctgataagggtctagtaactggaatacatgaagaactcctacaattccttaacaaaaacaccaacaatccaatttcaaaatgggcaaaggactcaaatagatatttctacaaataatatatgtgaatgttcatagcaacattatttataaccaaaaagtggaaacaactcagtgtcgatcaagggatgaatggataaacacaatgtggtccatccatacaatggaacattactcaaccataaaaagaaatcaagtactgatacattctacagcatgcatgaaccttgaacacgttatgctaaagtgaaagaagccagatgtaaaagcctacacattgtgtaattccatttatatgaaatatccagaataaacaaatccatagaggcagaaagtaggtttaggtgccatgcttaatatggagtactcacatgtaggatgtctacaaagaagtttcaaaacttaacagcagaaagcaaacaatccaattagaaaaatgagcaaatggcatggaaagacatttcactgaagatacacacatcgcagataagcacatgacaagatgttcaacatcactggccataaggggaaggcaaatgaagtctataatgagatatccctccccacctatatgacaggaaaaaaaaataaagtgacaataccaaatgcttatgaggatacagagaaactggatctcttctaagttgatggtgggaatgtaagtggtacagccacttcagaaaagagtttgtcagtttctttttaaaaaagagaaaaactaaacatactcttactatacaactgagcaattgtgcttctgtgcacttatcccagaggaaaaaaaatgaatatccacacacaaagctgcatgtgaacgtgtgtgttttatttgtaatagcagctttatttgtgatagccaaaaactgttaagtcaaaatgtctttcatttggtgaatggttaaacaaattgtggtatattcataccatggaatactactcagcaataaagagcaaactattgatacgtgcaacagcttgattagatctcaagggcattaggctgaatgagaaaaaccagtctcaaaaggtcacagcttgtgagactgatctcagagatagtagaagcagggtggtagggagtagaatgggagctgggggagatctttgtggcgatagaatagttttgtatcttgattgtggtagtggttacataaatctacacaagtattacaatggcatagtactttacacacatattgtaccaatgtcaaatgtctgggtttgccattgtgctgtagttaggtaagatataatcactgggggacactggaggaagagtatagggacttctctgtgctctttgcaacttctttgcaactttttatctgaccatatatgaaaattaaatgtaaacaaaaatatgcaacagattaggagaaaatatatataatggcaaaagggttactatttactcatcaattagaaaaaaacaactctttaatttaaaagttaagaaataaacaggtgaaaaaatacaactactcaataaatatttgaaaagatttgctgtgtttctagtaaatcagggaaaacaaaacagcaatgagaatttatcaagagggtcaaaaatttaaatatttgatgttagcaaggtgggggctgcagaccaggccctctcataacacccattaacatgggaattaaattggtatagatttttcagagccatctatcaaaattgagaacatgtatttgccaagtcccagcaatgccaattctctgcctcctagggaacatttctaagcatataggaaataggatgcacagaggcgtgttgcatgtggatgttgctggtggggcaggtggtacctagtacaagggtggccagcgtcactgaaatgcagccttcagagggatgcagaagctgaacaggcctgagagttcccccttcacggagagcatagccttctctcctcctgcagtgatgattgagggataaacctctggctgatgggactcaggcagggccaggccgtccgtgggttcccagcctaatgcaggttgagaagtggcttgccctgtcacaaaccccactgggtgaatgctttgtttaaaaattttcctctagaagtgaagcagcttcattcagtcaaattaatccatccagagcagaccattaaaaatactggttagtgaagagggggtccttaactcacacttgacagacccaggagacctgctgtagcacagatgggaaatgggagacagccaaggtgtgagggtgaaggcttgtccagaatcccactccgagtggtttcagggagaggactctggtctcaagctcttctcctgggctttatttaccacatacccctcctcaggccctgagtcaggaagttgcttcccacagtgatatctacaaagagctatacagccagctgggataagggatgaaggtcaaaccgaaagtgactatttctgtgcaaagaatcagagagaaaaatcttatgggcccaacagcagtaggtaattgagaaagtgagactaagaaaagtcataaaagaaacggtgattccttattaaacaatatggaaaaactgtccactcctgcctataatccaaggagctgctagtggacgtggtctcgaggcccattttcatccctcaagtgggcttcgatgatgagcgctcagtgcccatgaggtggcaatgacactgttcctctcagagaccttacttatgtgtggccaatttgcgacagctgatttgtaaagcagtttggcaatctgtatcaaaagccaagggatgtccattcctgccatcagggtcttcctcttctgggaattgatgccaagaacataattgacaaagatgtatattcaaagatatttgccatggtattatttgtaacaatgaataaaggcaatgccaaatgtcagtggtctttgggtttctctctgccctggctccctcttcaaatcactctacatgctccaaagttaccaaccatcagtccatcccctccacagccatgtcttaagctcagacccgtttcttgagctcctgcttggtgatcccaggatgtcctttagacaacccccttagatgtagagagctgaattcaccttccccccacctcctcctctttcaacctctcttatttgaatacagcaaatggcattcccaccacctaacccctcaagccaaacattcagacgacatttttgtctccttcccatccctcaacttcccagcccgttaatcaccatctccaaaatctctctaaaatccgcctgtttctctccaaccccaccaccactgacctggtctaagccaccagcaccctcccctgaatgaccactgaaatgtaaattctacaaaatggtttcctacaaccataccttgcccctgccctgatccattctctgtcttgcagagtcctcttcctaaaacacaaatctgaccatgtcacacctcgtgaaaactttcagccactttctattctccaaaggatcagctcagatcctgagcaagatttgcaggacctcaggcccaccgctttggactgatctctagcagcttcctctttcccccatggcctttttccagccttagacgcaccacaacccccttgcctcctgtccttctgcaggctctgtggggacactcgcatctggagctccttcttcccccactggctgaatgactcagtaaattaacaagtgaatacttcagatgctgcctgcactctggactggcatcatacaaaaatgatactgatagaagaaacaaaagaaattcctagatggcacttttttaaaatgtctaatacatttactctccagccagacactgtttaacccatcttgaatctattgaagagtgagttctgacagctcagccttgatctgcctcctgcctggcaccagccctcctggaactggttcctgtgcaccatcctacacatctccttcctgcctcccttcactacctactctatttccaacaatgttgggctatgatagctcaagcaaatacaggaataaggaggcttacagccaaggcaagaaaaaaaaagggagggcagttaacagtagagctgccagcgaccagtaaaaggaagcctgaggaataggaatcagcctcgaaagcagacttctgccaggaaagcagctaaaaacactgatatctcagggtgaatacaattcaggaggggaatgagaatagaaaagcatagtggctggaagagcaggctccgaggtcagagctggattgatcccacctcaccgtgggcaagttacttcctctctttactcgtttataccatgagttattgtgtctggcatatggcagtttttcaataaatcctagctattcatattatgaatcctgagtatatggagagggcagggaataggctagagacaagccagcaaaactggggtttcagaccagaaatgacttcactaatggagctgcaggtagcattgtcctgggctgcacaccgcagcccttgctattcctgagcagttgaattcatagtcatctattcatggtgttctttttaataagtccaacattttggtgagtgacagcttcatccccagagagaaggaagtattcttcctaattcttccttcgtgcccccttcatttgcacccatgagtcattttctcaccactctgtattctgctccttaaacctttcttggattctgtgatatgctgaagaaggctcctactggcctgtgagagccaattgttaaatttccagaaattttgtaagctggtcattaaacacagccattaccaaaaagtattataaaaatctccaattaaataagttatattaacaatatgttgaaactcaccatttccaaattattttactgcattttactgttgtctgtgctttggaacttatttaaatgaaatacatttctatgatggaaatactgtgtaatggtgtgctggtgcacagcccttccacctttgtgttcagcgatatcacattgggagcttgtgattggccatggtggtagtatttataccacaaaaattggcaaaagctacaaattagggcttggtttgctgttttttcattccctaagaaaactaagaaagtgatggagaaaatgttcatgcagattaaacctaaaagtgtgtcgcgtccatagttgttacattgtgaataacacaaaaattgggaaaacactcttccaaattcaaaaactatgatctgatccagcagtcactcatgtcattgacagatgagtgaagttaagacaatcatcttcattgtttcactttcttcttacttgtcaatgtaaacaaaaatatcaaccaacattcatattggaactacattcagtggtcaattgcaaacaggctgaccaagggtataagagttcagcaaaaatcaacaaatgcatgctgtgagaatcaaatggctatatagaatttgtaataaagagtattttatattttattacttgtaaattgtgcaatatacatccttcatatcagtaaaatttataatgaacttattagatgcatatgtatttgtttttgctcacagtgctggcagcaccagcttggagacctccccttctctacattccactgttgttttcttaggttaggccatctgtcatcattccaggtttcatcctctccaatcccacacccatattgctactagattaatcttcttaatattaaatgcagacacgacacatccttcattaaaactaccagtgcctatctgggaccttctgagtgaactctgggccatagaaggccttccttgctctcccctgttcacctctgcagcctcctttcttatcagattcccctgttcccactttactaaagttaggccaaactgcctgctgttcccagagcatgctttacttattcatgccactgggcctttgcatgtgcttttctctgcttgggatgccttttccaatccccctgctcccaactcctgctagtgttcgcttagcattaaagccatgctcaagcaacacctctcccaggagcccgtgccacctccatttcggcacttgctatcaccgccagttttcatgcaggtccagcattctgccccccgacccccactgtcctacaacctggaagatcctctgggctgggggagacatccccagcatttggcatgtggccccaggagataccaagtaagttctcgttgaattaatgaactacttaattggtttcagctacagcctatagcaaatcacaggatttagccaggagaaatagacacgactcatctctgaactcaattgttgctttaaaaaaaaaaaaaagttgtttacactgttgaaaacctcaactgagttttttctttcctttaagcatacaaataaagccaggtgaatcatttcttttccattgttttctggaagtcagctaggcataccctgagtcttcttactttaaaccactgatactctttaagcaataaccaaaacacttgcttctgaaagatagtgacagccatgatttactgggctactcaaatgctccaagtatgttctaagtgccttacgcgtgtcaccccatgaatcctcagcaacatcgtaacgcatggggcattattatccccattttacaggtaagaaaaacgagtcttaggaaagttaaaagagtcatttgaatttgcacagatgctgaatagcaaagcagtgattcaaacaaggggtggtctgattctaaagtccatgttttctcttctgagcccattctttattgctaaaaaacaaatacaatgtctatcaggcttagccaatggcctggaacaaataatactccaaataataccacaaagggcactgacacaggtccttgcccagctgtgttcttcttattccggatacctagacccagtaagaagtttgccctttccctgaccagatttataggagaaaactgaatgatgccaaggaatacctgcgtccttcgttaaaggctgcatccaaaagtctccgtgaccaggtctaggccttcatcatgggacaactttccaacaaggagcaggggtctcttgcaagtctgtccgcggagctccctgccaccagcactgttgccgctgtctttgtttactgcttgtcactaagcacttgctgcccagcgagtgagtcaacaaggccccttccctttcctgccaccactctcattccctgggtcctgcgcagtctctggcctgttagcaggcactgccaccccagcagcctgcgtcctcaaagccagtgacccgtgagagagccaggaagagctcaagtggattaggtgccactgaaggcaatgggattgctgctcagcagggcttttacgctgatgtctctttatctcctggcccaatcaaaagaaagagctctgcaaggaactgggggcagccccagagcagaggcttagtgtcatcaactcaagagtcctccatgccctttcatagtgtcagacattggacctgcaaccaacaggacagggaaccatgtgaaagcagcaggaggaaatgataacctggatctgtctgtgagaaagcaagaaaaatgtggttagagaaagggggaaaggaattcttactctttctggtgcttggattcagaaaggaaccagcagagatggggaacagcaagaagtagatcatagctctgtagtagaaggggcaaaagaacagatctctcaagccctttaaatcaatagcagtgtcaaaactgagacgtatttatttaaaaagaaaacatgagtttttgcctgactacagaataaaatactaaaatttgaggccgggcacagtggctcatgcctgtaatcccagcactttgggaggccaaggcgggcagatcacgaggtcaggagatcgagaccatcctggctaacatggcaaaaccccgtctctactaaaaatacaaaaaattagctgggcctggaggcgggtgcctgtagtcccagctactccggaggctgaggcagaagaatggcgtgaacctgggaggcggagcttgcagtgagccaagatcgggccactgcactccagcctgggtgacagagcgagactctgtctcgaaaaaaaaatctgatgaaactcagtgctggtgagggcatggagaatgagtactctcatatgccaatagtgagattacagataagtgcaacttctctgcagggaatttggtaatattcatcaaatttgtaaatgtacatatcctttgtaaacccagctgctaagaagtaaccccatggacattcttgcaaaagttcaccaaagcatctgagaaaggatgctctttgcagtgtattttggtagtagcagaaaactgaaagccactgaagtgcccatcaacagtgattattgtagttcacacacagtagaaaaccagctatgcagctgtgtaaaggaaggaagtagatctgtgtgtgctggcatataacaattgcctagaaaattctttaagtgacaaaaggtatggaatagcctagtatgtttccttttattacaaataggtacataaagaccaggtatatttacgtatatttatgtatacatattctttatacactgtagtatattagaatattatgtagacatattcttgtggttctggaaggaatcacaagcaacttaatagtggttgctaggggaaagagttttggctcattatttagtcaggaaaattattgttcattttggtattttccccctataaccttatgttatattacttgaaaaaaactaaaaaacacaatgttttacatttttttctgcttaaagctatctatattgacattccctgctagctagcaaa

SEQ ID NO: 212 - DNA, 216120 bp, Homo sapiens
  source 1..216120: mol_type = genomic DNA
ggaatatctcttgaaagcacatttgcctcttggaagaaaaaacctggaagtctttgacttctttgtatttacagatgttctcttactttcactctgcaacctcactctacagcacgctgtttcctaagagtgcccttgaggtgacccaagtccttagctttctttcatataagacagtccaccatgaactcaactgataaattaaaggctatactttgaagagacttttttttaaaaataatttctatttaaaacaggttcttttttttccagattgttttgaatgaatcagaacataaaaatcctccagaaatatttgcaaattatccaacttagtggggtgtgaggattaaaagcaaagttatcttgaaaaagatatagaatatgttaatcaactacctaataatgtgataataatatatgtataagatctttaaaattttatcagctgggcactgtggcttatgcctgtaatcctagcactttgggaggccaaggcgggcggatcatgaggtcaggagtttgagaccagcctgatcaacatggtgaaaccctctctctactaaaaatacaaatattagccaggcatgatggcgcacacctgtaatcccagctactcaggaggccgaggcaggagaatcccttgaacccgggaggcagaggttgcagtgagccgagatggcaccactgcactccagcctcggtgacagagactctgtctcaaaaataaataaataaataaataaattttatcagtttagcaagtctattaatgctaaaaacaataccataaagttttgattaatcagagaacctgtttcatctttttttttttaatgttggaagccctccctaaatgtaaaggttatttcaacaaagaaaaccatcctctttgtatgaccccgcatggcatcagtgatcttagaattacaggatcttagagctgtagagatctaaggagtgaatctcatgtaaccccttcagttctacagacaggccctgaaaatgacagatgccaggaggtggctcagggtcctgaagctgaatgatcacagagccaggcgtggacaggtagcctgcgtccacccactgcccttcctaccacaccaggttgtcgctccgttagctccttcattacagaagtagggggacatttggaaataaatatactgactccaggacaagaaagattcttcttgtgattgtctatttctcctacaagcaggacacagtaaattccggttagaaaaaatgtctgataaattcagatggtaaggtatgcctacttttgctttaatgatcctctgaaatagctggtcaagagcctaccctttctagagggaaaagaactctccagatgttctgaatgtttctgtcatttgcaagtcatcgcacaaaggctaaattcaccaggtgattccataccatctggtgtgggacagatgtgccacagaactacgagtaccttccatgatttaaacaaataaacaaaaaaaaaattcaaatgtaaaatgctctctttttaattactaaattaagaaagttaaacaatttaaaaatgtaaactcacaaataaatcataacaaaaaaggaattaagacttcagagttgctagtcagtattaaaaactcaatagaaataggatttttgatttgttgttgttaaacatatgtaatttaaggttggtacaaacagcaactaaaaatgtaatacttttttgtttttgtgcatccccatgaaatgtaaagtagtgcatagttattccactggagaactcctggacatatagaaagtcattcgttagcagtacaggacatttaaaacacttattttacaatgggaaatgtacaacccccaccctcatttcccccagaaattttagttgcatgagaaagtttagcgggttgccatgactacaatgctatgggttttagatcacttaaatgtggttacaggtttattaaattaaaaatgtctgaaacatttcagcattcatatttttatacaagaagtttgtgtggtatccatcttccagttctcttggtagtatcagccatttgcttgcttatttttaagttttgagaacaaatcgcagtaagttgaagcaaatagtgctaacagaacttgtaaattcagcttggggggtggttcctgaaaagagtcaaagtaacaaccacctacaggtacagtcatgaaccaggaaagtgcaatccaaatgaaaaaattcatgctttgcaaaagccaaaaatgaggccactggtgttttcagaataacaccggtgctttgatgctgacttgcagtaaaatcctccctctgggtcccgcagcttggtggctcaggccggccacagtctccacattagcacccacattgtatatgtacagggacatatatattatatatattcatatttataaaaaagaaaacaaaaacaaacacctgtcctgattggtttttgttaaaacatgaaaaaaaattttattgttttagacaaagaggccacttttggaaaataatacttttttttttttagttgaatcaggtgaagacagagttaaaatcacataggatttgcatttttaaaaaaggaaagcactaggattgttggcactggagtaactatttacactgaacagaggtttggccttttacataacatcgatacaatgcattttccaaagtctgagaaataacaaggttctgtctcgaatgcttcacagaggaggttcggatttggggacaagtgtcattaatgagggccatggaagttcgtcagcttcagagtcacatgcaatctgatcctgggcggttccgctgctggggagcagctggctacggaattgaaagctaatggggaggggtggggcagcctctgggacaaggcctctctccgcagacccgggccttacaggttttcaccaggttggtactggggctctgtcgcggtaaagtagtcttccaggaagctctgcaagtactcaaaagtggggcgttcttcagggtcctttttccagcagtggatcatgagctcatgcagagagatggggcagtcctgcgggcagggcatcctgtagcctcgctccacctgctccagcacctcccggttgttcatgcctgcaaagacaagcgcagtgagagtgggcaccccggggatccaggccctgaccgccgcacttgcagatcccctttcttcttctttgcgtctgcatgtggctaaaacatgcggagtactcccatccccccaggagtcaaaccctgccatgctactcaggagtaaagaaggagtgcagaactgagacatgaaaaattcagaatgactctcaaaacatgataagtgaaggaagccagacacaacaggcaacatacggtatgatttcattcatgcgaaattctagaaaaggcgcaactacatctatagaaagcagatcagtggctgcctgggggaggggaggaatccctgccaaggggccagagggaactccaagtgggatgggaatgttctgtcagggtcaacgggtcaacaaacttttcctgtaaaaggccagacagtaaatatttttggctttgcgggtcacatatgatccctgtcttcttctttttaacaaccctttaaaaacgtacaaaacaaacacaggttgggagccagacctgccaacccctgttctatattatgtatggggtggtgtgactgtttatgtttgtcaaaactcaataaactgcatccttaaaattgttgaattttattgtgtgtagattatacttcaattaaactgacaacaatatatgaataaagcagacaaaaaaatccacacagaatgaaagcatgctgccccttgtttatagcatttataaactccatttatgaacttcataaattcgttttcttcatgcctgggcaaactcttagttccccactgttggagatctgccatcatgccagcgtggctgggcactgtctggccctgcaaccccacagtgccctgaggtttggtgaatttgatggggagatagaccatgtccggggcctatctctactgatgacttcagccaggccatccatcatttgaggtttttctgactcttgggaagctgttgaaacactgggctgcatagcactaacagaagacagatcgctaactcctcagagagtgcggcctcctgcacactggctgccttaacactacaggaactaccatgcttagggggtggccagtgtcctgacctcctcccaactactgccagccactattctctagttttgcttccctttttcattgtatcaccttctgccagctccccgtcaagctgtgctgtgctttggttgcttcctggccggtgaggctgtcatctggaatcctccccagtatctgacccggttaatttgcaggagcaagaacccgatgtcaagccatatagaaaccaagatttcttcccctatttcccagggctacagccagcaggagcacacaccatatgcatggagcttcctttacttctaggggaggtggcgacccgttagctagaaacttgtcagcacagccagaggcgctgggccagagcacagcctgtccccctgcagagggaacactcggacttcggggtctgttgccagtcctcttggttgtgttgttacttgtggagctgagtgtatcctggctcctcctggctgtcaaccacagcctgtcagtcacatgtctctccagaccttttcaggatgctttcttattctctgccattatcatttcttgaggtaataaaaattcacatattgtttctgctgtactgaagtaggccttcaatgcaattattgtaaaataacctcactcacgtgtcagggcgaccccttattttagggagagaggtttggtgaaggagtcagggtccctgcctctgtgccatgcatgcctttaccagcgacttcctcagttgcatgggaggagtgagaggcagcgctgtggctaattagcctacatcctcctccaatggctgaaaatgggggatgggggcggggagctggaagcaagggaggaactggagcatgctcgggaatgaaaggcagcctcctccggctctagataaacgcggacagaggccagcatttccttctccacaattccaccatccaacgagctctgaacaccatcaagtttttgtaactcacttgactacagaactgatctgaactgacctcatctggccacaaaacctgaactgattacgaggctatttactgtttttatttcttcatacatattgcccagaaagattaggaagagtgtgtaatcacgtagcagaactggcactctccaaagcatttgccttgccgcatcttttagtactgtccttggtttcatatttcagcaatgacagagcttggaccagcagaaatctcccttgtctctgtcccttccaggagtccacaggaactgaggggaaacaggcagaagggcctgacagatccttctgggtgcggttacagcccctgaaacgcctcctaatgcttgactctggctctgagtgcctccctccaaaatggcagcacagagtttaattaatcactctcctattgctccacagagcgcatgtcagtacatgtttcatttcattaaaaaacaaactactcaaatggaaagatttcacttaaaaaaaaagttttcatccaatgtctgccaatggaaagtttaattggccactgggtcatttttccagtgctcggtccaagcctcagacacagcacacttggtgatgtgaacctcaacatgtagcgtctcccgaggcagtctttcctgggcatttggagccaggggacagggcataagctggcccatgcagggtcctggcagacccacatggtcaggctccttctcgctctcccctttcctgtctgcacccctccgctcttccccactcctcttcttctcctgctttcttctgcccagacctctcaaagcaaggggagtatatgaaaacaattccacgcactgggccaagtggaaacataccaatgagggctttgccaggaaagtgggatattttgacaatgcacttggctgacaatgacaattggaatgggactagctcttttccaaccatccataaaccaggacctgcaacgggctgacctgcagacctggcaacttcacaatgtacctctgcaacaataacggtggcaatcaagatatgcccactcagcaaggcttgggctagtttttattttataaacaatagctaaattgaatggattgtgttaattcagggtgagtatcccttctctgaaatgcttatgatcaggagtgttttaaatttcagattttttaggattttgaaatatttgcattatagggctgctcaaccagtaagttgagcattccctttgcgtgttatgtcagtgctcaagaagctccagattttggtgcattttgaatttcatatttttggattagggatacttaacctgtatttaaaatacagtattctcagctatatgaattttgaaaatcatggtttttttaaataattttttttaaatggcttttactctgcacactaacaaaaagataggtctacttcatttttttcttcttagatggtttcatatttttgttagaaagaaaactgtcatttcctctttttagccacttttccccaagacattggctttacctaatacctgagaggtgaaggatagtgaataggaagggaataaacacgagtttgggcaccagggcagttgggagagtgtcttgagagacatgggtacactagagagaggaatccttttattttttatttatttatttttttttgagatgaagcgtggctctgtcatctggggtggagtgcagtggtgtgatctcggctcactgcagcctccacctcccaggttcaagcaattctcctgtctcagcctcctgagtagctgggactacaggtgcatgccactacacctggctaattttttatatttttagtagagacagggtttcactatgttggccaggctggtcttgaattcttggcttcaagtgatctgcccacctcggcctcccaaagtgctgggattacaggtgtgagccaccatgcccagccagaagaatctttttattacacttccaactgaggaggtggacaagagtgctggaaatgtttttcctttttctccttttttttttttttttttttttttgagacagagtctcgctctgttgcccaggctggagtgcagtggcacaatctcggctcactgcaacctccacctccctggttcaagcaattctcatgcctcagcctcctgagtagctgggatcctttttctcctttcttaacagaaagaagagacagaaactttataaaacatggtgtctgagcacattttagggaaacaatgtcataaacagtttggccttccaggtttcctagtgggagctgcaagggagagcatttttcaacaggaggggagatcctggctggccagtggtgtctgactgtgggaagagccacgttcgagcagtatgaatgttccctggttcccacagagaggcggcttggggctggggagccagcaagcacagaggccactgcccaattttgttccaaccctctcctcctctgctgttctgcccttctagcctcacgggagccaccagccccttctgctgtctctctagaattgctcaggaaaacaggccattgtggtgggtcactttcatagggtacaactgaacagtactcaatccataaaacacctccagcacttcgggaagctgaggcaggcagaccgcttgagctcaggagttcgagaccagcgtgggcaacatgttaaaaccctgtctgtacaaaaagtacaaaaattacctgggcatggtggcatgtacctgtggtcccagctgttcaggaggctgaggtggaaagattgcttgagcccaggaggttgaggctgtagtgagctgaaatggtgccactgcactccagcctgggtgacagagcgagaccttactagtccgctgtgtgggggtctgccttcgagtccctctttcccagagcctccatggaacatctccttgtcaactcagattttaggctttcaaacatggtccccgacatagcatcatttccagtcagtctgccccaaacactgcaactgagattctccagccaagaagactgtgctcacttcctgccattatgattatattatcctttctaaatcatgttgctggcttcctccagcaaactcagaggtcaagtttccaactctcactttcaaactctgactctgtagggttgccaacagtgtctattcttgtgtgtgtgttttcttttcccttttcttttaaacttccctattccacttctttgagctgtacatgaactcagtagtcttccctttttccttttagattctttgaaaaaaaattttttaagggacaaggtcttgctctgtcacccagcctggagtgcagtggcatgatcatggctcactgcagccttgaactcctgggctcaagcgatcctcctcacacttcagtctcccaagcagctaggactataggtatgcaccaccatgcctggctgatttttatttttatttattttttttttgtagagatagcatcttgctatgttgcccaggctgatcttgaacttctggcctcaagcgatcctccctgcttcagcctcccaaagcactggaattacagctgtgagccactatacctggtcttcttttagattctatagggaaggaataaaaatcactttcattggcagagcaccgaaatagatgtcacttcttgacttctaactttgcatcttttagcaagtgacttgacttcccttgaacttggcttctccatttgttaacaaaatacctcaacattcattgtgctttcagctatctgaaaaaatgtcttttatgaaagaagagtgtttgtgttttatagctttccatttgtgcagcttcccaatatggatctcagatgggccatatctgtacaatcagggattttaagtgttacccgtccatgtttgcatctggatttgactatgggttgcaaaacctgggtttttgtgccatgtgaataattaagcactttaacaatgggaatgatgtttagattatcagatacccaaattccttttgctaactgagctttccgttcaaagggaatcacacaacgttgtgcataaggccttgggtctgaggctccccttgcttctgtgcataaaaggcccggtgtttacatgtctgttgagcagtgctgtgctggcgctgggaaggaggaggggtgttaatggtgcttgctcagcatgagcctgcgccatcgcatgtgcttgtattaacagattctcatgtgtccttgctatcgtactggttaataaccgtgacactgagttaggttttagtataggatcattgtgaaaattctgggcagggagatgctgatggaagagtgtggatgagaataaagaacttatcttgagaaggtacaataatgacttgctttgtttctctttcctcatcttgccagataacctcaggacagctgtttttattcagcccattgtattaataaacacagaaagacagctactcatgtaactgaatacacaggtatttctgtatttgaagttgataatacagtatcatagagaactcctttgtcccagaaaaaaaaaaaaaaaggagtgaaaaagagaggcagggtgcccatgaggaaggccccggaactgcacccctgagaacaaggagcacgtgaggctggaacacaggactgggggccgaaagtccctctttggccaccctcttcacacgcattctcccctggtctccctcctcctctcactagacatgctggccaagagaaatcttgtagaaggaggtgacagcatgacctctgggcattccaggcagggttccctctctgaggggacatcatgagctgcaggaaaaaccccagggactgtggacgagccagggagagacacgcaccctcggctaagatgagagctttcattcggcttcccagtctcctcctggttggagagtcctaaccctttcttctcccatgaaaaacctgctcctgttgttatgttgaacacaaaggaaaatgtatctacggttcagggctctaaggcagagggaggaccagagtggcatttggaatcctttaaggaaaaagccaccagtttcattaatttcccttatttcttcaggtcattatcaagcgactagatgtattcaagaaagtcacctgttgaatgatttgaaagtgcttccaatgaatgaataagtgtggtttgcttaagaaagtgttcctggcctggtgcagtggctcacacctgtaatcccagcactttgggaggccaaggagagtggatcacctgaggtcaggagtttgagaccagcctggccaacatggcgaaaccctggctctactaaaaatgcaaaaattagccgggcgtggtggcgggtgcctgtaatcccagcttcttgggaggctgaggcaggagaatcgcttgaacccaggaggcagaggttgcagtgaaccgagatcatgccactgcattcccgtctggctgacagagcaagattccatccatctcaaaaaaaaaaaaaaaaaaaaaagaaagtgttcctgttctaccaggtcctgccaaatccacaaaacaggtgttcggttaagagccagggcacagaatagccaggacactctgcctagaatagtgttggaacatgatgtttgaaatgatcacagggtcaattttccagaagaactttgaggacagaggctaccttgtggctaggaaaatatatatccatgtgtgaagatgatggaatgcagttaaaaggctttgcaggctatgggctaaatttaaaaaccttgtttcaaaaacctcataggtgagttcttttttttctgtttcattcactcatttatttgcttatacttactgacagtctactatggggtggaccctgtgctggacctcgggaatccatcaaagggactcccttctctgaagctgctgagaaatacacacaaacggggggcccaacagaaatatgctaggtgtcatggaggcaagcagaaggagcaccccatttggtctggacatggggaaggctttccaaagcagatgatgttcagttgggctttgaagggttctgaggcagacaggggagccacaaagagagacctgcatgttcaagagacatctcttgatgtgtcttggtaacgtgtgaaggatggaagacagcaagagagaaatcatgtcactctcctgctcaaatcccctcacttcccacctcactaagactaaaagcaaaagtttcaaccatgagctagaaaggccttatctgatttgcccctggggcctctgggacctcctgctccctctgctccagccatgctggcctcctttgattctggagggtctctgcactctcccttcccctgatggaaggctgtgctcccagatacccacctggctggattcttgcttcctttaggtcttctactcaccagtgaggtgctcctttgccactctcccctctctccccttccctgttttatttttctccctagctgttaccagcagcaaacattcaatatattttgcttatttatctttgtttattgtttgtctcctcaaagaagaatggaagtctatgagggcagcagcatttgtctattgcttcactgctgtattcttggtgcttgcaacagtacctggcatatagtaggtgcacaataaatatttgtggaatgactacagaaaaagagttatgaagaactatgtagaattacgttttctaggatttatctgaaaggcaaagggaagccgtggacgtttttaactagcagggtgagataaccaggtctgtgttttctagaatactaactctgttggcaacaatgatagaatggtgggtgggtgggtggtggggaggcggggagaaactggaagcagaggggaaaagaaggatttgagaaaggtattaaggtgaaatgacaggtaaaaatgcataactgattttatgcatcaaccccagaaaactgcttttacttaagtctttttatttctcacatacaacaatccatcagtatgaaatcagttctaatcttgaagtaaagaaagcttctgaactcttgcttgcagaaaagcaagctagactgcaatgcagagaatgcgttcagctcaggctgctagcggggaactgatggagctcttctttggaactgcatccatacttgttacacatctcgaaagcaaccttcctcatctggtaaggtgatgtaacttttctctaccacccccgttaatctcagcatcatatttcagtattttttccttcggcttccaggttatcattcagtttgagattgtcgtcttcccttcttttgtccactcctctcacacaacttgccaatgttctaacatctccgcctccctttgccctttatttggtcacacctcacatactccactctaagttccttctgggattgtcacttctggaccttctttcacgctgggcaaagatgcctggaaagcttttataaaaccaatttatatgtcaccccctcctcccgcacctccatcttcacctaccaggcaaaggagctttcttatgtgtcaaggaaacagcaggctattctcaggtatggaagactcagaaaaatgtaccaccatctactgttctccaaaaaagaattacttcaaaatatactctagccaactgagacatgagacatgactacatcaaaatgcagaatggaaatcatgacggaccgggactgggagtctgtcctgaggtaccagcaacaggcacaaagacgcaacgtgggaagctgagaaggacccctcagcgcacactgactgacttgccacaccaacaaatagcaagaatgcagagaggaaggtccttctttgccttcacagtgacatctgaaggaagcttcgtgaaacctcttgttccttaggaattattatccttcgttagggtaataatcctataattggaatccctctgtaaaagcttctccctcaagaagagttttctgttggattcacaaacccaattaaataggattatagctatgttaaaaagcaaaacccaggaagaacccatggctaggaacaggcctgggaacaattttttgtggctttctttgaatgaggaccagctcacgacacccccaatgaggacacggttccctggttgccactgccaaccagcaaggccccaacgcaggctctcggccacccttccagtcacatctccaggtgtgcccctgcacatggcatcttctcagattcatcctgtggtccctggaactgtcctcccaggcctatgtgccttcccacgtgccagaccttgggatgctcttcccgccttctgggcttgaggaaacctacttggcttccaaggtctggcttacttgccttccctacacagccccctctccagcactcctccacagctagaggcagttatcacagcccactgcagaccagcacttgctcacagctctctctgcaggagccgctggagttagttctcacttcaaactcctctgccatcctcacaggactcagcttgaagagtccctctcaggacctgctgtgtgtggatacctggatcaggtgtccctgaccccattatcagaatgaagatctaggccccatagtaggtaaagccaagtagtccatcctttcaggatgactccctctgataataaacaaggaataaagaaggctggtttcttcctggatttgatgcacattttatctatctgactgtaatatccatgaacatagggactaaatttatttacttgcccactgtgctaacaatgcctagcctgaggcaggtactaatcaaggcttgtttagagtatgagggtcttatttgcactatctccccgatagaggaaaatgcctggcacagttcacagtgactgaagctacgctgaatgaatgaatcctggtctaagtggtaaaatgagggcattttctttatgctaaaaccaaacctgacaaaagactccctcagaaacacgcacctgccttccttctccaaggcccccacctccacccctttgtcttggtttctgtgtgagaccctgagaaacaaaaagctgctttgtattactggaagggaaggcttcacagaaacgcaaaacaacattaaccttttctccccagttgcatttaacacacagggtgactataaacctgggagggatcaggaagaaatcagttcaaaattcagacaataaataaagaagagatgccttcacatcctcgccctcctgagacccgcacatttccccccttgagaagcaattcagaaacacccacgctgtgctccatcccccagggcggccctttcttctgtgctggttggcgattcccggagtgtctgcccgtgtgtgcatgccgggagcagcagtcaccgcagcatcaataaaactgacttacacccgcatctctaaacgcccagtgccggcacttcagagactgggaatttgtcaattttgcctccatgtcaacttggctctcctaggagtctcaaggctacaccaacccagaacgagattatcttgatgtgcccctctctgtgttctctgaagatgaccagaaacaatcataaaaaaggaacaaagggattacaaattaatctgccttcgctagctcctctgactgcaaagctatgattacaaacccaggatttgcaagagacctaaattcctcattaatcgtcactatcgtttctatcattgtttttttttttttttttttctttaagctcctttcttacgcagggaatgagggggagctatgttctttcttcactcagcagtaactgaaaaatatgtccttaacatttcaaaaaagcagatcgtccctgtgctataaccactaaagcgtggaggtgaaatggcatgggtgtcctttatgtcaccatctgtcgacgttaatcaatttaagcatggataagccaaactcgtggtttctttggagagcataaatctgataatacagaaacattccagagtctaagaatttccaatttctttacattatacttgctttggtatagcatgttttgactgttcagcaacaggcagtgagtggctctaaattgcatttcacatgtgcctctgctctctttggccatctggagctgggtcctgtggagagaacaggtcctggcaccttcctgccaggctcactccatgggtcagtgctacagtgtaatcaaaaagcagtggggcttttctccttctctttcccagacatgtctgcaaactccatttgggcagaggcactgccagtgacatttctgctctgggaaccacagacacatactcctactgagagaggagagattctatgaactggagggggactgaagcatttagaccagctgctacttacattaatcctggcacacagttcatggtggctgcttgtctacatacatggtggctcccagttctgcttttctctcgctgaatacctggccatgttcttcaaactcaagctcagcagaaagctgaggatggggcttagaaagcaaagtggatgaagttttcccaaatggtgtcaaaaaagcctccaatctcaggcccatgtctgtgaggccctgctcttacctgggtatggcactcttcctttggtgaccagctctgtgagtaagattccaaaagaccacacgtcagacttgattgtgaacctcccgtacagggctgcctcgggggccgtccacttgatggggaactttgcacctgcagaatgaacacttggttattcatcaggcagagggcactgcaatgggcatggggtgtgggagggaaaggcacttggcaagctactttcctgagagcaggtttagaggggaagacagaaaggaggtgaagcaggaatgggctgggattgggaagatgtagggtctggtcttgactgtgtgaccgtaagtaatccagctcaaagcaccttagtacctcaataaaggggggaagaagccctggtttcttatgatttaggaaaattatatatatatttaactttgaaataatgctatgttttaataaacatacataggatttagtcataatgctgctctcatgagtcctcgggtatataagatagtgtggtctcactgggtacacaaaacctgattaaaccactgagctgctcccagggtggggacaactggatactgcccatgtgttctgctgaaatgtgttagatttcccaaaggcctcccacacccacagcagggaaaggaatctgcctccagctccttctctctccacatttgctgtttttcctccattctttctccctgtagtagccatctttactcctgggatagttttttcttccatactgtaagatcactttcttaccactttttcttctaccacccagcaagagtactatttaatgtttgttttttaaagagcagttctgcctccatgactgtcttatgagtctctgacttttcaagaccaaggtgcaaattcatgtcaaagtcagtggagtcctttttttcaaaaatttatttgatcattgaaagaatcctgtctctaaaccaaaaggaagggtgtggtccaccttgctttctacaagcttgatgtgtgtgcagggaattaaaagggattcaggccgggtgtggtggctcacacctgtaatcccagcaccttacaaggcagaggcgggcggtcatttgaggtcaggagttcaagaccagcctggccaacagggtgaaacctcgtctctactaaaaatacaaaaattagccaggcatggtggcacgagcctgtagtcccagctacttgggaggctgaggcgggagaatcacttgaacccaggaggcagaggttgcagtgagccgagatcgtgccattatactccagcctaggtgacagagcaagagtccgtctcagaaaaaaatgaaataaaataaaaataaataaataaataaataaataaaataaaataaaataaaagggattcagcagcttgtgctctcaaacattcagctcagcaattataaagcagttccaggtattttactgaacaaactaaaagaaaaacacaaggaatttttattacttatggaaacacagttacatgcttaaagcatgttcattctgcttaaggagctcctgaaaatcatacaaaggctgacaaaatcagaacatttcatagaatcttctataaaaagtcactatgtacaaaagtggcgaatgattaaaatatttaaattggcacagttttaatagccagaggtatgataaattacagcaattagatttttgtcttaaatacagcatatgataacatctttagtaaatctaccctggcattttcaggcaatataattttcctctccatctctcatgtgtctgtgtgaaatgaaatgaaagaaaaaaatcctactatttcattatgaggcatctcacattaacactggagcagaaaagttattctatagttttccttttatgcatggagttatttttaattagttatgtttctcaggcataattatttatatctttccttacgtgctagatgattccacataagacctggtattctctgaatagtcagttgttttgtttttaaggtttctttcaaagcattcttctcacacttcctatcctttagcattctgttcacgcagctttggactctgagccactgggattaatgtgatagattttcttcaatgttgagagcagactttgctctggaccaaacctcagctggagttctcttacttcagagaattaaaggtatactacattcattcctatttaaaccatctcttgagccaaatggcttggaaatctctgaccatctctgaagtaaatggaacatttttctctgctgtgcagacaaatcctgtaaataaaatgacaaccaaaggagttgtttttccccttctttgaatcactcaacattggtgaaggtgtgtgtgttgctgaaagtgactatttaaaatttggatactgtcatgttagattttccaagggatttcataatttcagattaaaaaaaaccaacggcaatatcagccagttgcattagtcagctttattattttctcattttataatctacaataaggattataatatataaaccttcaaaaaatgttaaaacaaaggctgcattaatgtaaggaatctttgaaaggaagtcatttgtagatatgtggtctgagttactactagtcggaacttacttaaatttgttttgtattaattttctttctaaggcaagcaatatatttacaccaaacaatgtatttataatgtatttggaggaataaaacataatgtctttgtccaacttctcctgcttcttctctgtcttaaaacagcagctgctttcaacaaaagaagcttctttatagataactcattttccttttcaaggaagacaaaaggttaaatcaaagcagcaataaggtattaatgattaactgaggtttctactgaaaagagctaatccctgcttcctcttggacacatctcattacttctgtttccccttatcttggcttcccacctcctgagggtacaaagctattggccctaaaatgcagctctaaatgtggtggagttaactggggatttttggcaggtgtctttaaaactagccttgcaggttgcacagtgtaaaatcccagtctatgaaaacagcatccctaaggttgtgtagtacataacctatacaatcccacagatgtccctgctgcagggctgctgcagtgagctctgtaagttaggagacttcagacaccttgaaggaaggatctcctgggtgtaaacgttgcctttcccttgaaagtaaagttctgacaggcaaaaagtcagaatcaaagtggtcttctaagtagtatggacttacagaacaacggagaaaacatcaggagaaccgcaatgcagttaacttggaattgttatgtaactagctgattcacactttgaaattcttctgcttgggagcaggatttagatatgaaaacagttttctcctccttgcattttatttagaggaaacagagcaaactatgcaggtaatgatcatctatgtcactgatatcttgagcttcactgtaacacttactgtacttgttccatgtttacatgaattcaaaaaaagaagtgaccactctgtcatttcttactgaattagcttaacagtttaggattctttaggataagccaatacacgaaggccataatatgtgtgtgtgtgtgtgtgtgtgtgtgtgtgtgtgtgtgtgtggtgtgtgtacttggaagcatcttttccactgaatgttttccaggtactatttgcaaattttaccaaactcccaaggtaaactcattgccgaaacctcgacttgtcattgtgaaaacttgacaacctggtgttgtcactggtacccatgtcctagaacttccatgtaagaggatctttgtgccttagtcatttaactcccaggaacatatataagaccagttagccttaggctgaattattcctgtaatgaataaatgtgtcgatgttttaaataatttctgatatacagctcaatcctgtttctctgaattctgttgagatatgaaataagtggtcacaaactctgtgtaatatcagggatcttattcaatcccatggctccaatgactatcttgaccccaatgatgcctgcatttatatcaccagatgggacctctctctcgagtccctgacttgcataaccaatttccctctcaattgtctctccatgaaattggttatacaagtcagtgcccctcaaatgcaacatccaaaatttatcttccccacaatttggcttctcaatccttggtgactttgtaaaccacccagttggtgacaacagaatcctgagaatcatcctcacctggacactctatttttcatcactgtgcactcagatcccagcacagggcctgcctattgaaggaggtcaatacatctttactgaatgatctctgtgctctcctgctttgtccctgcccgtgtcaggtccattacatcctgaccatttcatgatcttgaattcactacccttcctctagtcctcgcttgctcagcatgtccccccctgggtttctatagtagccttctaatagaatctacatgcataatctggtccctacctacttccccagctgcttcttatcatcccagacttgttctcctctgcttccctcctctctcctctgcaacctctccattgcccttctttgactgctttgcaaatgccaagctcctacctgcttcacggacaggctatttcctttatcaaaagcccttaacccatggctaattcttacttctcttttgctcctagccaaagtgttacttgcacagggaacctttgcctgatcactaaagactgcggtaggtttcctacttctatgctgccagagcacctccctctttgtagttgtcactactttttttcagtaaatattgcctaacgaagctgttattattaaagggcaatgaatgcatgaattgtctgaaggctgtctctgccccagataaatactgtgcttgagtgctggagcatgtcttcccagatggccacatctccagtactgagtacagtgtctgctgcagagaaagcacttgataaacaggtgctgaatgaatgaatgagtagctggtcagccctcccagcccttccctttttggctgaataaccacagttccttacagagcgtattatcagttccctgccctctggtgagtcttctacttgtccttggtgacagcaccagtgtcactgtctggatgtccttttaagagtctaagaattgccaattgaaatagaaaagcaacagccacacactaatgaaacttaaaacacctggagaaccctgcattttcactgccaaaggaagtgtgttcagatcccctttgggtcggagtgaatgtatctgagtgggggagccccatactttgttctctgaggacaagggggcccagttcactggggctgcagctggggatgggggtggttagttacaacagcagaaagacgaggtggcaaggggccttgggagagttcacagtgaaacaaagtggaaaatccttaatagactggattaagaataaattcttaatagactgggatgaatgcaagtgactagacatcaaccattttgacctcaccaagccctggtcttcctcatttaaaataaagttaataatcatccatgcttcaagcaagagaaaggagagggctgtggatttattcagttatcaaagtttgtccacagaaataacaacacaaacacccaccactgctgggctggcttgttctttcttcctaccacaagtatttctggagtattccccagtgcctggcactgcactcggtgccaggaggacgaaagggaacacagtctctggcagtcatggagctggaagcttagtttgagggagataaaataaatgaatggctattatatatgtcaactacaataaagtgctatgaagaataataagatggggtacaaggacagattttgtgggactctgtaacctgtactaggattttggattccatcctaagcgcaacagaaagtcactgggctgtgagcagaagtgcgatgacttcccacgtcgttctttccccttgtcttttaaaacatggaagataacacatcattaccttgagaatgacttatgatgagacagaatgggaaaagtgttttgacttttcaaaactcttcaaaagcatcgtgacatttcaaggcccatgggtgtctatcagcaattagcaattgggtagatgatgcttccattgtcacttctgtcatgtttacttaacgagtggctctgggtacatttgtactattttagcacacttctcacatgtgaataataccaataatttcggtaacaaagcagtaaaacttagcatattccaacccgcaaagctcaaacatttctatgagaaatgcatgaattatttttctgagtttattcttccccatgtccttcctttctttccaagcattttgtgtgtctcccctgtgggctcttcttcttgcttgggcttactcaagcaagtttcctgcctctcctgagtagctaggatgctagatgtgcaccaccatgcctggctaatgtttaatttaatttaatttttttttttttttgagacagtctcactctgttgcccaggctggagtgcagtggtgcaatcttgacttactgcaacctccacctcatgggtacaagcaattctcctgtctcagcctcctgagtagctgggactattggtgcacgccaccatgcctggctaatttttgtatttttagtagaggcggtgtttcaccatattggtcaggctgctcttgaactcctgacctcaggtgatccacccacctcggcctcccaaagtgctgcaattacaggcatgagccactgcacctagtttaattttatgttttgtagagatgggatcttgctatgttgcccaggctagtctcgaattcctgggctcaagtggtcctcctgccttggtctcccaaagtgctgggactacagatgtgagccaccgtgcctgacctaacttggttcttgctaccccaaacacagttaatctagttcagtttgctttactataacctgtgtcctgcacttagcatgctcacacttgtttcttttacattggctttggaaatgctctctttctcttcacctgcttagctacagcctcctcagctccagtcccacctccttcatgaagccatctgtgattactccagccttcactaatctctccaatgcacctagcgccagtgctagaaacaacagtttaatgcttgataatagcagctaccacaatagctaaacatacactgagcgcttgctaagagtcaggcatgcaaagcactgggcacatgaggtggatgccagcaatagtcttgttctacagatgagaaaacggaacaccgagaggaaagcaatgtgccaaacaaaggacaagtgtagatgacagaactgggatttgaaccgaaggtgccagagcctgactgcataaacactatacactgttccactgtgtccatgtctcctctgtgtccttttactagttctttcataagttatttaaaaaatctccttaaatagaatgcaaatcctttgaggttggagacacatatttcttcatagcaacttgcctaaggctggttaaacagcaataaatgctctaactagctaaagggtccagccaggcagtaagttatctgacaccctgacggtcaaagtaattctcttcctttacacagacttaatcaaactaaacgcaaagagtgtcaatacagtggtgtaataaactaataattttcttcactcttaaaagttataggaataaaatcttcctttcatacgacagcacagcctgactgatgctctcggtttttcagtgccaacaggatgactgcccaaagtcatcatgtcaggatggcccatcccaagccccaggccacattccagttaatgaagtccctctatccctagtggccaggtaatctgtttttcacttctgcctcaaatagaaatagcttacttgactcagttacttcctgttctttatgtgttttcatacattaagatgatggcatgggcatttcaaatgctccaatgaagactgcagatacttttgctgccaaatcacctcctgcagtaagagtacataagccggccaggaaacgaggagtggatgctcttcagtgacaatgcaaagtggtccgattgtgggctgagctgggattgagtggtcacttgtggaaggaccactatgatcatttaggaaaggagcttccgagtcaggtatccctgtgcttgcacactggatttgctggttgatcatttaaaacatccctaagtctcagtttccttgtctgtaaactggggatgataacctcctaaggttgtggtgggaagaacagttgatgtaaaaggctcagcacagcgtctggtacctggtaatagctgaataaataccagctgttattttattcagatagtaaaggcctaaagtccctgagttgcactggcaaatgccatcagcaatgccaaagctctccaaacatcagaagaggaaaagaagatgaaaaaaccctcctaatcaaaacactcatcaaccaatcactgagaatcttctgagggtccatgatgtccccagcaccctgtgaggcgctcctgggaaaaccaagcacaggttgcctccgcccttggggtttctaggcagccagggagacagacttcacgggcaaacccaacagagaactaaatggtggcactgcctttaggaagaagagggctcagcagagacaggaaaagagaacataagcaggagatgagggcttcagggagaggcagccgcattggaatgatgcagcatgacccatggctctccttgcggtggggagggtcacggcaggggccaggacaggcctgggtgggcccagctcacatctccggagagctgaactgccaagtctctctcttttttatttttcttggtgaccaggccaattccatagtctcagagaatatcccctctggctaaaaaactaggccaaggtggagaaggtgaagtcagtattgaataaaagaagccaaatccttcctacagagaatctgagctgtgccctaatagcattttcaaggaggaaacccattaacttcaacaatagacactgtttttctgaaccaaagagccacccagagccctttttaattataaagccactaactctgcaaattattatatccaatatttaatagtatgcaataattcaacttgaaagttactctgggtaataaaacaaaaaaaaaaaatcacaaacaatgccaataacagaaatttggtttacaggagggggaggtgacaaggcggtaccaggacaggatatcctgtgaaagaagcaaaatcaaagctgacctgacctggaactttgtggttatttaaacaaaacaatgatttcaaacccaatgaaacttggcaaagcaaaactcagaattttcacactaggccaaaggaatgactttcagatttcccaaatgcttctgaagtaatacaactgggtgttttccagttatccccggtgacgcactctgttgaaacttctacttcaagttcataaagttttagcatcatgtttttttgaaaagtatatgttacaatgggttaagattatattccatctgaaatttcataatgttgagcaagaagtttgagaaggagggaggttgggaggaaggaggaatgctgtcccaccggggatgtgagtggagaagggacaagttaggccaaggaggacaagaaccaaggagtggaaggtgggcccgaacatattgcaaagataaggttgattaagtaggcacagatccaaagtctggttgagtggaatccatggaaggaatattcaggctgagaggggtgaggaaagttccaagagagcccagagttcaagactggacagagaagagacagaaggtccatcagtgggtattaaaaattgaacccaggacaactagaggacacaggggagtaggctcagctaccagggagaatgcaggggcaaggctggactctaggtattaatcctggggttttgcagtcggggaaggataggcaggataaattgtggaagggcattcgatccagacatggaggctaccagaaggtaaactgtgacattccttccaaatatccctagaggagccaggaagtgaagggaggaaactctgggctgcttgcctttctccatcaccctccttgcaacggtgaccaatgacaaacccagggtaacttatgggggcaacacaaaagtagaggataacattaatgggcatctcctgaaactgtgggtatttagtccttttaagaaggaaatctgagaaccatcgaagggactttccttggagtacagactgtgttatggaggcttatttaagtggttatcttgggtgggactgaagaaaaaaggagccctgcttgctgttctagaatactgaggctctgaataattccaattatccttccagtttccgaagagccagaaaggaagtaatatcagaataaaaattctgtaacttgattacctctgtaaagagaaaacaaaacaaaacaaaacaaacagaataaaaattctgattcacagcttcaacagcataaacgctatgtttgcggactttcaatccagaacaaaagacaagagctttgtaaccaactgcacactgctgcccagggtggtgagaggaactcacctgagtgatcaacggatgtgtgggatgtagctcaacacagaaatgatgccaagaatccagccacccccagaaggggcagagggcccgtgtcagtctgacttcatgccacatgacgagctgggctgcatgggcagcactgggtttggggatactgtgtgggaacagttggaggtcacggggtttgactgggagctcagaacatatcaaaggataataggatatacagaagacaaacatcactttggggtggctttttcaaaccgctccccttttcaatctggtacagtgtctgtgccaatgggggagccaccctggggatggcagagcaatgccactgagccccctcctttggctgtaagaaatgaggcttcagaacttggggcagtttacaaatgtactgcgtgtccatgattacccagatgatgcaaatgcaggagttccttttgccagcaaagcaagacaaggaagccaactgacatttttgatgtttgatggcagtctacagttcctatttacacactttaaaatcacagagggtgaccatctgcttccttcttgatgattaccaagaaacgtgggctgcacagactgaggacttgctcttgaccattcataaacaaccatcaaaaggctctgcccaaaacagcacaaaggagaaagagatgctcacacagaatacaaaatgggactgaccagcacagataaaggggaaaggtgtgcaaagaagctgggcttgaggtgaccactgcttacctccaatccatttgtatcctctgggcagagtcagagctgcccgagggtgggaatgaaagaaattggtcccatctccgacctgaaacagttttaatctttaaagagagactgtagtaggaaagggtgatttagagtcccttttcttttaattttcatctttggctttcaacacaccctttccgggaggaaaatggatgcgctctacaattcatctccatttccctgccaatttgacctgctccccctaactattaatctgggccccgaagctccacggtggctcagcagataaacaaagccgtccctcccagaaacgaggtggaagctcagagcttgaagcgacagaatacaaatgaaggagcttttctgcttagtgactgaagtgtaccaaactcggatccgggaagcttgattacaagcagcacggttcaggcatgcgactcagctcagcgggaaagccgtgtctgacctcggagggcagggcattctgtcgggcaagtcccctggggtctctccctagacagccctcaggatgatagactctcaatgtgggctggggaggtgggggttggcatggtcattttatggcggcaccactgagttgggaacacactagtcggtgcttaagacaatggcttgcattttaaagggtttgcttttcatgaaaggatggtttgcttctctagcatgggaagaattagattaaattcagtaattaaaaaggttttttttttcttccttttctctctcctgatatttgctgttcaggtcacagcacactgtgcgggaatggcaatgctgttgttgacagagaacaagaaattcatgtgctgacgggggcagagggagggcatctcacggcgagatcagccttgatctgccaccggattacaggggcctcagaagcggctgattaataattctgcaggagcccttgagctggaaagctggcgctctgagtctaataatccccagtcgttgtaatacaaaggaaggacaggaattgaattcacagttctggattgtgaaattcaaaattcgaaagaaacagggatccacttcttcctgagtgtgtttgtcaacctagctgcctgcttgtttgtgttaaatggctactgtgctttttgaatctaaaatctgattatatttaattagtacaggcatctgggatttctaatacacaaagagttattaaagtaacaaatctttctaaaatatgttttctatgaaagaatgtgttaatttatgcggtaacaattttttaacatgaaataattaacatgaaaactgcaacagttagtaattcttcgtagtctaatttatacttgaattttcctccagacaataatctattcaatttaaaccctcaatactgggagcatttgaacagacacatttttcttcttctatttaatacataagcctaaacttacagcagtcttatacaaagacccgaatgttcctatttttatttacagtccaaagatccaaagattatgtttccttgacatttgtttcattaattttgaacttaaaaaacaaaccaaccaaaaccatagagcaaccccagttcctgtccttcatgaggattcaaatcaggagaaaggatgatagaggcagagcctccatgtggaaggagccctgatgggagcgatcaggaaaacccaaagtggggtgggtgggtgtgtgtgtgtgtgtgtgtgtgtgtatgtgtgtgtcagagagagagagagagagaaacacagctattggcatccattggatcaatattataataatattactattactactactgccaactaccactatcagctcagtgttggctttgtgccaactgctttatggttattcacagggaagccatacaattctatgatatagataactattattatccctattttaagaggaagaaataaaagctcagacaggttaagcaacttgttcaaggtctcacagtgaattggcagcaatgctaggatttataccaagacactttgatctcatgggtcatgctcttaaccagtccaggccctgccctctttgggaggggactgaggtgtatgtgggaagaagaaaagaggtcaagctatccaaaaaaaacccaaaaaacaaaaaacaaaccaaaataaaacagaacaaaaaaactccaaagtgttgtggggaggagctggaagaagtgaataataccaacaacttctactaattgtcttcttgaattcttacaaccaccttaaaggtaaccaacaccaatcctattttatgatgagaaaggtgaggctcagaggggccagaacttatgctctaggaatacggcgtcaggatgtgaacacaggcttatctagctccaaagctcttgtgcttcccatcactccaaagacaatcttggagtgtgcaaggaatatcaatgcaataaacaaccctttctggaggttcctgcagccacaacagcatttgattcccagagagagccatgcacattgatgagagacagcaggagagcatgtctcacaagagtgtgggggggttggtgaccttggttatttccattgctgtaaacaaatatttattaaatactactatgtgctctgtgtctacaagggcccgctgctagtctttaaactaaatcacttctatagagaagcagtaagaccgactccacagatactcgggagaactgctccagccgtgcccacgcagcgtgtgtgtgctcatgcagcgtgtgtgtgctcatgtgtgctcatgttgatgtgtgtatgcacatgcctcagtgaaaatgctgagaaggcccatctgatattcagacttcacaagattaaaaacaagagaggcagcgcagaggcagggatagttctcaacagagaatgcaaatatgagaaaataggcaagctggccggagatgaggacagtggatgtgtgactccccgctgtgtccggggtgagggggcccttggagcatgcaggtatatcaaagtggtgactgcccagatccactgactggcctaggctataaaatagggagacagtattttttttcttgaaagattgattttttccctatttattactaatagtgattctctttaaaaactttttagactgttttcaaggaaaatgtatgtcaaatacaaaaagttgaggtgataaggatgatttttacatttcacaactctcaaagaacttttatagatagcccatgtaagtttcacactaatgatgtgaggtgatcatttttattatcaccattttacagatgataaaaatgaggctcaaagagcttaagtaactggcctgcggacaccaagcttgtaagtgacagagctgattcaaagccagggatcctaatgtccaacccctggttcctcagtctcactaggctgcctcactagcagcttagaggcaagtacagtactggcaaatgacacactaagtgtgtattcacctttttaaaaatatgtccacaaaatctgttaggcagtaactgcaattgctaacctaggtttgccctgtaattaccaattccactggagaacacagcccagagagatgagggcatgtgtgtatcaccacagcagccgtatttataatggccccaatttggaaataaccccaaatgttcaggaacagtagaatggaggctctgtgatatatttgtacagtggaatactactcagccatgaaaagaactactgttccatgcagcaatatggaagaatctcacagacataatgggaaagaagccagacacaagagtaatactataggattcatgtctgtgatgttcatttacaggcaaaacttaccaatctatggtgaaaaggggaaaaaaggctatttgtgggggtggttactgactgggagtgggaataaggggtcttctggagtgctggaggtattctgtatctttatcttcggggtggattcaggggcatatatgtacataaaaattcatcgggctgcacacttcagatttgttcgttttactgtatgtgtgttatagctcataaagaacaaaaaggtatccacaaaaggaagttatgcttacacacagccatgtctgtctgaacttgttaggtttaaatcaacattagtcggcactgaaagctcatgaagaaaaaactagagtctgcagaggattttcccactgcttctctcctgcttgtgcaatctctgaaggaagtgagggctggaggggctgtgaatttccagaagcaaggcttgtgacattgcctatgtcgggggtcacaggagacaggtgtggtatggacaagaagatggacagcagatccttgtggtgcctgtggtgagttctggaatgattctgggaagaaggtgcagtggtggggtagggaggtggctgtgaccagaactcaggggagggctggaaggctgagggcccagctgtggcagtgagacccagtgagggcaccccgactcatctttctgggcttggaggaccaagaccaccacctcaagctcaacagatccaaacccaaatgcatcctctttctctgaaagtaagatcttcccaagtactcatttctgttattggtaatgccattctcacaatcacctgcatctgactacttgggaattatctttgattcttctctccctttcctgaatagtgtttgagactttccatgtatctacaatccattcactcatttgtttattccccaagaacttagtattgtaccagatataccaacagtaacaagcaacatttatcactatgtgctgggtaccctgttaaacactttacatgcattgtttcacttaatctttgcaaaaatgcatacagcagacaaaatgtctttccattttacagataagtaaactgaggtaggcaaaagttaaataacttgcctaagaccccagaacatcaggtggtagcgctggatttcaaaaccagttccatctgacttcaacaatcccccacgtcttcctcctcatgcttgctgactgtcgtgcagtcttaggcttcttgatatcagtagctcctagtaaagtcctttcatagataaggcactcaaataactgatgttggcattatttagagactctgattgggcagaatttagcaaagtgtttgtaactaaagacgaactatctgctgtaattgagtgagatgtccagggaatagagaataagcaatcgccccaaatttctagttgcttctagagtgctgtcagtggaagaccacctcacaggctcagggcctggccttgaccacctccctgacatgggctgctgctcagtcctgggtagctgggatggtgcgaagtaaggagcacaggaaggactgtggaacccagctccacactccaattctgcttgtgccctatgcaatgccacctcatctgcccaaggggtgacagatatttccgtgcacgctgagatgggaaactcacaactgttttgaaaacaattgtcattcatggtcctaaaatatctgtgtttggtgcatgtttccgaatgccgcctgcattcccataatcaagatgcagcatggctgtggcctgtgggtaacataaaacccgacttgcaaatattattaggcatgcggaccagctgtctggaggagctgattaattcccagcagaaacttcagcacacagcacacatgccatctgcagagtacaccagcagacacacaccaggccctttctgcctcgtaaagcagccagggcagggcaggccctcgggaggaattttataaacagctgggttgtcccagtgctggaaaaggaaggtctctccaactccctcatacagacacactagaaggtgctccttaaaaacagtcccataaaataaaggggaaaagggatgtatgactaatcctctctatctttattttctgttcttttgatcactgacttgatgagatgtggtcagcatagcttagaatggtagatgcaacagggtcagccatttctggattcaaatcctggctctgctattttcctagctgtgtgactttgtacaagttacttaacccctctgagtctattcctattgtttccctgcttggtcctcacgtttcctctcaggcctggcacttggaaggtgttttataaatggctctgccactccctacccctctgctgcaggacagcatgtcttttattctcctgggacatcctgggacctgccttgccaagcttcatttcccccccccccagttcagctctccagttcacttacttcttacttctctctttctagtgtttggcatggatttgaaggtgtttgggaaagggaggaaagaagaaaaatgtttgaagaaggaaggacgggaccctcgatttggaaattaagtaaggaaacgcagtacaaaggctaaaagaacaaggttggccttttgaaaggggctctgacggcacctggggacatgatggtgcagctgggcagccggcagaagggcaatcaggacagctaatgcagaggaacggctgggggccaggctgagggcagcagcctgggacccgctcagggcagcagcctgatgggaggggaaccagcgagggtgccaatcacctagggccacagcctgaggagcctcactccagtgaataaggcgtggactaaacccccaggccctattaacagcacccctgccagcatcctctggctcctggcctggcaaccttttcatttacccatggttcatgagcgttaaccacaaaccctgtagagttcaaagtccaggaaaaggggaaaaactcgactcacacacagaagggtgagcacacggctctattctagccctttccttaatcaaatattcatgtctcacaacctttgcccactctccttctgagtctgaggagctgggatctgacagacttgcctcaggataaagtccctcattcagggcaagtctcagatccactggcactcaggtcctctcggctcaccttgcctcaaattcacatgcacattcctctctggacggccagtgccaatcaaagctgcagtgcgcctttgattagagatacagcatgccatctggcccagcaccgggggtgtatgtgtgtgtgtaacgcacgggtatgcttgctgtgtgggcatttggctccaggacaagaactgccacgtgttggggaaattcaaatagctgagctgtctgaccgacatgtaattcagcatttggacagtatcggtagcagccagggtcttagtttaacatttttcctcatcacttgaggctgctaagaatgcttccattctcagatcaaatgaagggagaggataattggcatgaaatgaaagaatcaagaggaggaggaacaggggcaagagaaggagaaggaaaaagagaaagaaaaggactccagagctggccattatgaaatgcagtagaaagcatcaccctgtaatacattccagtcactgctccgctttgcttgggatgactaggctttggttagaaacaccaacaatgaaagttcccccttgccccagctataaacattatattctacatgaggagcctatactcgattgcaaaccacatacttaatcacacacttttacctggtgaccactttgtcagtatctgggaagaaggaaaatattcctaaaaactcctttctagtatctggtgctctaatagcacctgaaaagctgccccactggaatggctgctgagttgggatatattttacttaaaggctaatttctataaatttttgcagagggtgggatggcggggatgatgaaaggaggtagagattttcgagtaactatgctgttaccatctgtagtgtaagtccactctccactctccctctccctgctctggacccataaggattcatcgctgagctcctgtgacctctacttctggttgggtctggcagaagacccagaagtgggctagagtggggttgggtgtgaatccccagatccatccctgacgtctctctttactgaggaggccctctctgtgcagtggcccattctgacttcttgtgcccacttctctgcccccttacctttgaggccttagttctgttgctgttacaagctctgagacactgcaccatgccctgttggctttctgaaaccctgcctgtgcctttgtaaaaaacacaggcatgtgagaatgtgagaataaatgtggtctctttctccaaaaacagagtattctaggcctggacgctgtgaggagaccagcatgagccaagaggaccacagcagcaaataccaatacccacccacccaccaaaaaccaatatctcatccctccactgggcccacaacagtctcccacctgcagagctgtcaaattcctgccagatcaaggtgtccaaaccaagctgaagaatgacatttcaagtattttctgaaggaagggaagggaaggaggaaggaagggctgtgcagtaagtgactgttctcacagctgtgatcacgagccattgtcattcaagtgcccaccttgtcttgctgtgtactcattgtcttctatcaatcgggccaatccgaagtcagcaatcttgcatatgagtccattccccactagaatgtttgctgatcgcagatctctatggatataattcatgcgctcgatgtaagccattcctgcagccacctgtggaaacccagggaacaggacatgttacaccacgacccaatgtacttagacacgtcattaaatctatggcacatcaagttaccctgcagggcctacctgtgctgccatgtccacaagatttggtaatttcagagctcttccttctccatcttttaagaaatccagtaaacttcctatgaacaaaacataaaatcatttcaatttactttgaaagataattcccaacagagagctgtatttggttttcttattaaaagtaataaggtagtcaaatggaataatgccatccacatggggggacaaaaaggtttatataaaaaagcagggtagaaaaaagtataggcatggagaagtaacagttaccttttaaaaacaaacagcattaattccatttctaggaataacaacatatatttgataaaactagaagaaatgggactcaatctccctgtatgtcataaagaggaacctatgaagaactgcacctcttcaatcccattccccaatcacccctgcacaaagaattgatgtggggaaaatacagcccagctgagtggtccaaaactgtggtcctgggaccagcagctacaataacacaagggaacttgttagatatgcaaattctcaggtcccatcccagatcgagtaaatcagaaactttgaaggttgggtccagaaacttgggttttaagaaggcctacaggtgattctaataatacaaggtaaagtttgagactcactagcttagcttatttacagattttgaatcaagaaaagacaatctgaagaatatgggtggggcagatggttccccttaattagatcacagccagccaagccttaaatcagacatctgaaatgaaacattggaagcttcagagccactattataacacagcctaagaaggcttagaactaacaccaaagcagggataatcatttgcagaagctggaggcttatgatggtcatcagtgatattttatgctttaatcacaaagttatttacaaaataaccctggatacaaaggacaaaccgtttgccagaaaaaaaaattcccattaaattttaaaagaaagtacatggaaaagaaaaattacactggtatcctctgataaacaatgtattgccttttaaggctgtttcttgtttggttcatctatttttccaaaacaaaatgatctctggccttatccctaacaatgctggtttgattaggaagacagaggggttgtaggggagagaatgtgagaataaatgtggtctctgaaagcatgtaatttcatcgcctgacgtttaagaagagagctggaaataaaaaagatgttgaaatgatggagactaaacttagcttagagaccagtgtctgatattaattgtttagccctgcaaaaaggaaatgtaacaaaagctactacattcaaaataacagcaaactatcataaccctccgtaccaccctgatattaaaaatgaatgttttaattatggagaggagcttgaatttctgacacacataacatgtaaaaagtatttggcatttcataaggatttggggtggggtaaacgcaaggttagtctgttttaaaaaatgttttcattaacgagcacataactggtggttcctaatgggaatacttgacccaggcagaaactagaaaagtagcaagtaggaaacttccatttctctcccctaaacaaccccttaaggcactgtgagctggagacaggagaggtgttgcccaacctttgttcatatactcggtgacgatgtagatgggctcctcagacaccactgcatagagctggaccagcttgtcgtgcttcagcttcttcatgatctgcgcttcctcaaggaatgattcgggggacattgtgcctggtttaagagtctttatggctacttttgtgtttccattccaggtacctacaaacatcccagaatatgaagtcaaaccaaagatcttcttttgatggaaaaaggttttgaccaccagctatttgcataagattagattttaaatttaaaacacttaatacagtttttgttgaacaaagacattcaattgcaaggactctgtcaagtattttaacagaaaaaatgagtttatttgtggttatggctaagatggctatattaagatttataactcattaaaatttttttaaattttgatatattaccactctctctttttttggctcagtcatatgattacacatttataccaaaagctctgcaccatacagtgatgaaagtccaggggttggaacaggcctggccatctaatagctgtcccttagggagtacagtgtgcatggaagaaattagattatttaagtttatggggtgtgccatttaaaaatatggcaccacatgaggatgtctggaaattacctctagactttcaatgtctgcaatggacaagttacttgactgagtccttgcacaggtgtgccaagcatgctgataagcactggcaaggagctcacagtctgcttgccaatacttcaacaaggtaaggcaaatttcctcagctttactgatggctagccacaagaacaatggcttctgtcaggtaggtagacaggggaaattaaacagcagctgagagggaacagaaatatttaaatttagcatgttaaaaaaaaatctagcaaatctgaaggcaaggcctggattatgattgtcctcagttacctcatctgtaaaatataggaatggaactggattatcttttgggtctctttcagccccagcattcaaaaaacaaaaccatacctaggttctttgtgtattccattattagacctatgatgcttaagaataactttataaaggggaagaaatctgctaatttagattattttctatttgaaaaagaagactggtttaaattaagatttttatatttaatataactgactttggaatttaaggattctgtaaattggagttcttattatcctgttaaagacatggttcatacaattacaacatgcaacctacaaaatataaattatgaaaaaacaagtggcttaaagaaaagttcatttaaacttcataaaatatctgcccactaagcattcatgggaaatttgacaatttataagtgatctttgctatttaagagtcagcacccaaaattctaaatacattaagatcttcctctgtaatacaaacttcgtcaattacacagacatccatcccaattctgatgggcatgttgtcttgtgtttattggaaaacaaaatgtgaacagtatatgtaatgatttaaagttgatatttgtaaaatttgaaaataaattttctaatagggtccaattctctgtgattgtgtgagtaatttgactaaaatcctctattattagagggtgaatgaggaagaaggaggtcatatattttacgatacttgagattaagtccagagagagatggacacaataatgtggatttattaaactagctaactcatacatatatatgtgtatgtctgtctactacctatttatccacctaacatacctacatacatctttgtagtacttatcatttgctgggctatgttttaagtgctttaactgtattaactctttttttttcttttcttgagacggagtttcgcttttgttgcccaggctggagtgcaatggtgcaatggtgcgatctccgctcaccgcaacctccacctcccaggttcaagtgattctcctgcctcagcctcctgagtagctgggattacaggcatgcaccaccatgcccggctaattttgtatttttagtagaggcagggtttctccatgctggtcaggctggtctcaaactcctgacctcaggtgatctgcctgccttggcctcccaaagtgctgggattacaggtgtgagccactgtgcccggccacctgtattaactcttttaatgcagaccacacctaaagatctatacccacacgtagcaaagggtactgatcgatattgtttttaatgagttctgaggaaggaagatagaggattccataagtattaatattgttttactgaaacatgtttttgagtggggcctaaacccatgaattgtttctaagcaaagctgtaactgacccaaaagggctataaaagaaattacaaaggcccagtgcagccagccttatcaatgacaatcaaataaagagaagtatgtatctctactgaatatctactatctgcaagggactttaaacatattaacccatgtaatcctaaaaataatcctttaaataagtatcattccagccgggcgtggtggctcacgcctgtaatcccagcactttgggaggatgaagctggcagaccaccaggtcaggagatcgagaccattctggccaacatggtgaaactccgtctctactaaaaatacaaaaattagctgggcgtggtggcaggcacctgtaatcccagctactcgggaggctgaggcaggagaatcactcgaacctgggaggtggaggttgcagtgagccaatatcgcgccattgcactccagcctagtgatagagcaagactccgtctcaacaacaacaaaaaggtatcattccaattttacagatgaaaaaactgaggcttaaaggagttaaatatgccccttgttcgtggttaattagctagtaaggattcaaacccaggcccattgagcaaaacgtccatggtctttcttatggctgcccatatacagtatcttaccttcccatttcttaggaagaggaaacaccagattcatagtgtactggtttcctgttctgcgggtgccttaattaaccacatgaagtaggacagatgagcacagcaaggtatcagcatattctgaaaatctggatggcctgtgcccgtctagttatccaggttaagtgtctttgtcccaacggctgtgtgtgcatttttgttcaaaaccatccttttaatcggctttgagatgcagccaaaacaaaatgtgccctctgccttaccaagccacacttcagcgaaacacccctgacccagcttcttctccagacacaacgaacgacgtgcaacttcccaagcatctttagccaatccagaagtttgtggggtacaactcgatgcaatcacagttaagttaaaacacaaaccatcagctttctctacaggaaagggaattaataaagaaaacacagtccttataatccataattatgcatgcactaggaaagatggaaggtgacttgcccgttaggatgacactcaacaaatatttgcttttggaaatgaagagcaagatattttatggcagctggaacattccttggaccatttgctggtttatgaattgagagtcatgtaatagtacaacttgagccatttgccaattttgcccacttactatctttttttttttttttttttttttttaggaattccagaatgttaaaaccaaaactgaaattattattccccactattagtaattcaaactttcttcccggtcacgcagtctttattttcaccttccatctttggtgtttgggatcttccaaacggggaagctaataagagagtaattgagtctcagcatacccatccatacttccccaaactgcccatttcccagtctcttgatcaactgcagggattctcgagggatttcccagacatctttggttttgacagacagatcggtaagccttggcatccctttgtgacagggaactactaggcggcagcagagacctgcagctctctctgatggagcagggcaggggcaggagagggagagaagagcagaacacatgtaatgacaacactcataagtgtaaacccacactagcggcgcacagtgctcctcaaacagtgctactacaccagcagacgaccacacacatcgtggaacactagcagcacacagcgctccttaaacagcgctacaccagcagacgaccacacacacggtggaagatcagacgccacacacggaaacattttcattggaggtagaagagaggacgttttaaatttagactactccatgagcccaggtacgatacagtctatacatagacatacacgcagactgctttggtttctgtactcactgaggaagaaaaacgttttcagctcaacgtgctaataacatgtttttgggaatgctgaaaatatccttactaatttcaaacagtggttttggattaaagaatgtcaatatgactgttcttccccacctttagtatctagattacccaggggattagggatctctctatatgactatacttaaaattataactttagtggaggatccttctataggacattaaactgttataaactagtaaggttgaagattataactggtggggaaaaaaagaagtaactttttttagtgatttcttcgctttctaactgattccattccaccatgtcagatactcctgggctgcttcttggatattttccattaaaaaaaaaaaaacaactttttaacagtcttcgacgtataatttaggtgtctggtttgaaaggagaaagaatggaaactaaaattcacagaaattcaagatgtgaaagaatgtattctttataaaaaaaagaagaaaggaaaaagtagttaacactcggaggtttttattctttctttgtcttctttccttctttctttctcttcttttttaaaaagaatataaccttttagaatctggcagtgctaaggggaacttaaatgccaagtaaaaatcagtcaggcgaaaaaaggtaacaaagaataagaaatcagggagtgacaaaagctgacagagcctgccttgtgaggtggacagacctcccgctccctcctggcagcccccggacccagggaaagcagatgtgctgctgggctgtaacttgctttttactcctttctttttgatggaatcaggctctgagatgtttaggtaggaaattatttatgtgtcagcatttcaaaggcattttattgtgtgagagagaaagagggaagagggaaagccaatataaaaacaagtctaacgtgagatggattttttttccccgagattaaaaaaagtgtctattgttcatatcccctctttccttccagctttacaatgttattaaggtgccctttcgaacacagtattttcaaatgatccaaaccctggggatcctgctgatgtttggctgtaatgaaatatatttcagcatttgaaaaatccttacaacatgcaggcattttgagtatatcacttaagctcagggagatattttgttccatttctcccaaatgtttcattagaatccacataaaccgagttagccaatgccataatcaactagtactgcaagtgctgttaatattttctattgttcattagtgcaagggatcaacagacatttcttattgtcattttcgaaagattgctttttcatgccaaaaattatacatacatatttcaatgattgtgcacagagcaatagtagaggtaaatcatatactatttttgagtcttgcctttgtcctggagaacaatagaaaatggagaaatgggtcacacaaaaaaatatctctaggcttaataggatatagacatgtgtctatacatgtgcacctatatctataggcacatgtgaacatgtattatatagtggcatataatacttgctaatctaggaaagaaagcaatcattttaacaattgcacataaaaccagtctttgataaaatgtataaactgcatatctaataattatatgttttcagaaagaacaaaataatggtgatatctgggtgttaggacagaaactgatgtacattataaaagtttaatttaacacaatagacataatagatctaagagctgtgggttgtgtaagtctaagcctagttaggaaacagcagtattggtggggaacatgataaatggcttgcatgagaatgaaatgtacgtgcagctattcctgcaacagtgctgagggtaaagtgatagtggaaacacaatattccttgtaggagtccccatgtaagcgccctccgagagactgctttctcacatgcaacgcggggaatgggaaaagacaacttgaagatgaaaaaacaaacaacttttaaaatttaacctattgctttctacttgggaaacaaaaatattatagaatcttcggacaaacatgtggaactaataataacaacagtagaacaatagcaatagaacctatacagccaagccctaccattaagggctggcaaagaaaacatactctataagtgattttgtacatattagttttacccctttccactttcctgctctgggcctatccactccctccagcatccaaatggttagtaggtagttagaattaaggttacctgagtaatgttgtacaagctgctgaagtgtttcaaactgggcccgggtggtaatgtagtatccaccattgtcaagtttgcgaattttataatgtttgacatggtctcctttcatatcatcccaatcacggatagaaagtgaataggcacctggtaaacgtggaaagcattagcagctccaatcatttagagtatcagcttgctttttaggcctcattttcttgactctgattaataattaccaaggatgcacacacacatgtacacacacacagcatctccactcagtaacaggaagaagatgcttcttgatgttctgcaaatgtcagaatatattagcaataaaatgattctgcccttgagactgaaagcttcctggacatttttcttaaacacactgttcggtaccccttgttgcataatacagcgtagactcaattccaacactcctttcccccaagggtaaagaaggaccacgatgaatggctgagcttgcttcccttgtcttctctacccaggggcatactgggaggtagcagcagcatgtgcaaaagaaatctaaggcttgtttctctagaagtgagcttcaagcttctgctttacaacactttttacaggaatggataatctggcaaattaagctagaggccactactcttttcttccttgacctgtctcctcttgtgggttgtaaggagttgttaaataatgaaaagtccaacagttggaggaagagaagtgaagtcctcagttatttaaaaaacaaaaggaaagcaaaaacaacctgtatgactggcacctgaggaactaagatttcagaaaatcaaaattctaaaggacttctgaaaattctacgatcttgtgtgcctggagcagtgtagctgcatccagcccgtttcaggaggaaggtcttgatttggggcctctgtagttcttttggtgctgtctgcagttttagagcctggagggaagactgaaaacaggactccactcacaaggcagggagggtatgtgccattttaaaatccttgtacattagagataagcctttcatcccctctgactaatccacagatttgaatgacaagccaacttcttcaactcgttatcttacctttggtggtttcactctcgcggataagaaaggtacctcttgggtttccaaaggacaatagctgtcgctcagcatcttttcggccaagttttccaaagtaccacctttaaattagatcaaggaaagaaaatattttgaaatagtcatttacaaaatgcaacagcataggctttttttttgcccatgaattcccctctcctccaatttagtccttaacctttccctggatgtattttttttctagcttaattcagttccttttcaatctatcctggattctatccctaattcatctctttcactctttaaaaaaaatcagatttgagttgtgggttgttttcctcccctctagacatgaccagaactggtttgtgttaaaactgccacctgtatgcaaaaaaccagaaatctaagaccttgatttgaaatggttactgcaggagaccctttccacacttatctaaaagactctagtctgggcatggtggctcatacctgtaatcccagcactttgggaggccgaggtgggcagatcacctgaggtcaggagtttgagatcagcctggccaacatggtgaaaccccagctctactaaaaatacaaaaattagcttggtgtggtggtgggcacctgtaatcccaggtactcgggaggctgaggcaggagaatcacttgaacctgggaggcccaggctgcagtgagctgagattgtgccatagtattccagcctgggtgacagagcaaagccgtgtctcaaaacaaaacaaaacaaaaaaaacaaacgccaggcatggtggctcatgcctgtaatcctagcactttgggaggccaaggtgggtggatcatgaagtcaggagatggagacaatgctggctatcatggtgaaaccccatctccactaaaaatacaaaaaattagctgggtgtggtggcatgcacctgtaatcccagctactcaggaggctgaggcaggagaattgcttgaatctggaaggtggaggttgcagtgagccaggattgcgccactgcactccagcctgggcaacagagcgagactctgtctcataacaaaaaataaacaaaaaaacaaaactcttgaatctcttgatatctaagcattattgtaactgctgggaaataacaaaacacagtcttaatgtatatgaagataatcaagcattaaaaaaagtcagattagatagatatgatatgaataaaggaatagtattttcaataacttcctccctataagaattctgagaaaaacgcccatgagtacttacttgtattttgttttcctcccctaggtgtgtgaggacttggataagtaaaggcatttatttaccaagcacctggattgtgatctgtgttcatcatcttcttcttcttttttttttttttttcttgagacagggtctcactctgtcacccaggctggagtgcagtggcataatcatagctcactgcagccttgacctctccaggctcaagcaatcttcctacctcagcctcctgggactaaaggtgcacatcaccacacctgctaactaaaaaaattttttttgtagaggctaagagtggtggctcatgattgtaattccagcactttgggaggctgaggcaggcagatcacctgaggtctggagttcgaggccaccctggccaacatggtgaaatcccaactctactgaaaatacaaaaattagctgggcatggtggcatgtgcctgtaatctcagctattcgggaggctggggcacgagaattgcttgaaccagggatgtggaggttgcagtgagctgagacagggccactgcactctagcctggggacagagtgagactgtctccctatgttgcccagcatggtctcaaactcctgggctcaagtgatcctctcgccctggcctcccaagtgctgggattacaggagggagccatcacggtggaccctgtacatcttttctttggcacaactgtaagaactggttactgtacacctttgagatctgtgcccagtcaaaaagcatgcccttaaaatgacttggtgttgcagatatttcaatatattatccctgaagaaactaatgatactctgtgccactttaggaggcatcacattaagtcacctcaagacttttgttatttgccttatatcctccccctgcactttcaagccttaaccaagcctggcaattagttactatttcagcactaggtgctgaatgagcagcaggtgcccccaaaacccaagggagaatgctggagcattcaattggaatctgtgtgtgggaaccatttttagaatatttaactgtgaaagaatccagattctaaaatgaaatttcaattcattatgcttgaatataggtatcatgagttcactgtcaaattcttttgtgaattaagtttcactgaagaaaagagacattgcgtattagctcctcagtgacttttagaaacaccaaaatgtgcaacaattcttaatctagcattaggtggcgtaaagactagtacgtcaattatttgtgagaaatggctttctgggtttgtaccaataacccaattagaatgccgtgtaaaacagtggtgaaaaaggaattgttagaacaatggattgcaccaaaacaatagtattttaagataatgatagttaattgcatatgtaaaaccgaaggcattattttaaaaaataatattctttaaaaacaaaatatttaaaaagttgaccattataaaaataacttaaatatatagctgacaaattcccagttaaatcagggtaatgctacattttggtggtactttttattctgaaagaacacaaagatgtttgcaaatctgccctaaaatacaaattaaatacaaataccttgattcactgatgacgaaacacagtcactaggagaaagaaacaactaagaaccactgagtatttgagagtgggaaacaaaacagatcctcttagaggaaatacaaaggaattaaagaatagaacaatccaactggggatttggctagggtgtggagtctaatccctcttgcactacttaaacaaatccatggtgaaattaaatagcagagccaaaggttgggcttggtgactgacttttctcaacttcctttttagagaggcaagacccaaggtgtcaggaggaggccaagttcctgcatttgggaaatcatggctccatctctccttccctcagggctggcaaacagccactggcagttcttccccttgggagtgcctgttaatcctcatgggtcagaagaagggagaaaggttatcccttttagatcccttcagcctactgaacaccttcctaaactgctaccagttgaatagttgggccaaataactgctcgtcactgtttactaccaaagaagccaactgaggttccaaatcactgtagtatttcccaagttggggggacacactgtatgtgagtcacttttaccgggcatagaaggtgtcttttcagcactcttttaatatttctgatcacacttaggagaaaaatcttagtttaatctgtggcaattacttgctactctcccctctcttcccaacagagggagtggactgcgggcttagaaacttgggttggcaataatatatgctctagctagcatttcatatttttatggctacttttaatctatgacaagttttactggcttttcatttagggtattgatagaaagttttctttcaaaataagtgagcaggcttcaagagaaacattaagttaataatagtgcaagtattacacagggtaaaaaccggggcagaaagcctgaaaaactcagccttaatcactgctgtgaatttcttctccctcctgcccaatgctgatggcattttattgcggcaatcaacttttaaaatcaagtagttaagtgaaaacaaaatgaaacatactcttctgcctggatagagtcaactggagccacataattgctgggaatgtaacctgtctctccagttgtcaaggagcgggcttcccaccaatctccttccctgtaaataaaaaagaaaagtaaatatgttgaccatttcaacagcttgcagttagagactcactgtggtctgaagtgtataactgtcacctaatcatcctgccacccgatttctccaacctattcctttactctgaactccaacatagtccccctgtgaaggtcagaaggttccagttcgagtcagccatgagatgaacccacagttgtctcttgccttatttgtgaattaagaatgtggaatcctggccatgagaagtctctcttggtagggggcattttgcttggttagtgtccttaacttggatggatggaaaaggaatccagcctcagcctaattaagcagaacatgttagctgcagatcatctgggaagggaagctttttaggaggtctgaggtcaatatgagctgcacagtactgcttccctattgtaagcacccctctctttcaagttcaaatcatgacattagaaatgttaacatcttaacattgggaggttaggaggtctgatgagggatgaaggcatgctctaaacacgtgcctggcttgctctcaaaaagatggggagacacctctctgcaggtagaatgatgctacagtaggatcaccttccccaggcattttcagtctgaagtgattccatcaaatgtccagagcactggcctgaggctcatgggcaaggggtgaggatgggaatggctgcgtgtgctcgcacaggtgaagcacagaaactcggcaagggagtgagatttttagtcacgccactttgtactgccttaggctccatgccacagcacagcagtgtggtatcaatctggggagctctcagaggaggtgaaaggggatcttgtagctactctcatcttaaagccagtgagtacattaagcagttcaaattcatctgcttagattcaaacagggctacctgtgatgaagagcaggaatggagtgtgtacctcttcccattaacatcggggaggccatggatgtggcgctgcggctctgacatccactgagtatctgcagaaccttccaccagcctgcagtcaacgacatgattgccctcaagcaaatcagacctcccagcaaatctgatctcctggggctcaggaccttcttttcctccttttttggtccttggaggcagcaagcaaaacttcaggcattttaaaaaaaaatcgttcttttggctgagttctgtgtcaaagctttcagccaggggaaaaaaaaaatgtgttagcttctggccatggtaaagatgctccccagacagatttaatcaggtagagaataatcagcctccacattaaactcaagcattactccagaggccgctctctaaagctggactctctgagcaaggtgagcagtgagcaacgcctccagataggatttaatagagcaacagaacaaaggtgaccagccagcatgtgctgggggtgctgctgtgggaaaatgtttggtggcataagtaacagaatagcccacaaaaaaaaccaaggtgccagcaaaggtttttaaaaccttatgctttaatttagtttcctaatctctcctttttaccctattacaaatccagcaaaagtacagtactcatattcagaaagttctttattcataaaatttagttcatgtctagatttattcataatcttaaatttagttcatgtctagatctttgttaggaaatatttatacatactgaagaatataggtacagtatatatgaaccccgtgaacccactgcccaacttaagagctagatcgttaccaactgggtgggatctgcactgtgctgctcccctattgtaagcacccctctctttgaggttcaaatcatgacattaaaaatgttaacagtttgtactggtctcatttctatgccttccaaaaggaatacatacagttgtaaggatatcatctaagaacatatgtggaagtttatttttttctttaaacactgtatgtgtttaaggaaaatggctttggagacataatcttcactttaatatagtgacaaggtttactgctctgaagttccactagatggagacatttcatcattaaaaataacaatacccagctcctccccctccaccctctcccgcccagcctgggaaatgctccaaaatggcgaggaaaaaattaagtgcttgtagcagaggcttattgttttttaatgcaagataaccttcatcaagttagttctaattgaattaaattaagaaaaaaatggctagcatcaattttagggtatctgagactgtcaataggggcgggaagccaatacattttgctgcaggttgggacaagcccagccttattcaggtgatctggcattaatgaagtcatttccaattcaaatctagcattaactatctcattttggtctaggtacctaaatagtgtagcacagatcagaatgcaattatcagctcattctgaagtcatgaatcaggaattcatgattttctcacttgaccctattaatctcacaagggttttcagctactcatgagaaagataaaatccttgatttctctttttctaggctttctagggtcatcttcttcatcaaaggagacataaagtgacaaagattcaatgtttattatgtagtaaacctcacatgttgagcctagagaggctggtacagactcaaaatattcattgagagccgttgagcgagtgaattaagtcatctttttgatacactagaagcaccaattcacctataaatagatatactctatattcatgttgatttaggaaaataggatctctactatgttatcttttatttcttgagttactgtgggtaattagcattgttaaagctgtatttctttaaacggttcttatagttcagatttttcagtttgcacttggtgagatattctttgttatcttgctctaattcaaatatatgatttaaagcctggcgctggtttagaatggcttttaaggttttataacagctgtctctgttcctctgatttaaagacttgctaaaagattctgtgcccccaccacaccccacaccaagaaaagtgtctacccccaaaccccaaagttgctcgtaggcttgtgggccccggagctgggagccctagagccttggagccagggagtagttatttgccaacagaagtcagccttgatctgctcagtagtgtagcattttatgtcggtaacaattttatcaaatgcttgggtggggctctaaaccaggatttctttttatcacaataggaaaaaaaaaacaacaaacctaccctcagctgtgaccaatactccactctgtgtaaaacatgtattacattttaaagagtcactgttcgtagatggtaaacgactagtcttgaaatgtgaaaacaaggaataaaatggatgaacttaaatactttgcaaaaggggttcaaatttaataatgtcctaatacatgacactgagcacttacaacgggtcaatgaagcacctttgccccttgctgggtagcaggaacaccgcctctgggtacatacatacatgcacatcccacggtgtatgttgtactttaacaaagccagccctgtggcctccagcgccaccagggctccaccagggaagggagtgggaggacacacactaggaggtgtggcagctgccctggcagaacagagccccattcctccctctcctctgaggaccagagccagaggcgggagaggatgggggaggggaggagccgtgtgccatctgcttctgtattattgctttgtttttccttcacgattttctcttccctgttattacccttgacttcaggatattgtcttgttacacaaaccttatttttcttttctataaccttgagaaagggaattttaaaattccactgatatggaattccattggcagaaaggaagaacattaagaggaagagaacctttgtaatattttcctctacaagaacagggttggaggctcaaaggactccgtaaacatcaaaggccgtgcatggaagtcacaaaatagagattgagacggattggatcctccttaagtgtttctctaaaatttcaatttggtgacactgcagatcgtttccagattaacaaaggaagaagccatgggactgacactggcagggactgactttccaacgccctccagcgtaatgcacagacgcacgtgcagtgtggacaaagcctcctgagagctgggtctgcactcttactattccttggttcttgcagttgaaagtttacaaatagtcttgaaatttctaatcaaccttggcatgtaggggaggctaaggggcggaggatttcagaattcaaagttaatggactccaacaagcagcaaaataacagcaaggaggtatacccagagagatcaaagcccaatcccctcctccccagccccagtcaactctccaaagcttcctgtcacttgaaggttcccatcccctttgataaagtatctgggcctttcccagatcaaacctgacactgttctcaggatgcctccctgcacctcgccctgggctctgccacctgccagctctgtgctctggggcagtttcctaatctgggcctctggctcctcagatatcaaacgatgacgtcgatgcatacctcagacagtagtggaagaatgcatgagaatgtttgtaacttagctcatggctggtacatcaggagccttcaatgaatggtagctgtttattattttttaaaaacttcctgtggctacaggaggaggactcctggggggcaggtaacactcttcttgacctggctggtggccacacaggcatgttcagcttgtgaaaattcagcaaactgtatactttttgaaaattgtggtaaaatataggcaacataaaatttatcattttaatcatttttaagtgtacagttgagcggcagtaagtacgttcacactgttgtgcaacatcactgtgtacacttttgatacgtgcacttttctgcatgtgttccaacaaaaagttaaaaaaacaccaccccacacctttgttaatgatgacaatcctaatatatgtttgaaaaccctgtggctatgtagactgtgccttctgatgtctcgaagagagtcgttggccctttatggcagtattcagttcttgctgttgaaaggcggcatattctcactgcatggttctgtgagccagggggcattcaagaaaagggtgggctttccaaggaggcagttttcaggcctgaaggaggtccctgtggcaatcagcactcctctttcctgggatgtgcagtgtgaccagggctgcctcttactccctctggcatatccttctgggaaagctgaggagcctggctccaagtccttctgccaacatggaatctgatttgctcagagagcagaggagaagcaaccagacttggtggcatagaagaacttcctggtgtgcccctcagcccctgggtggcattctttcccaaccaccgggagcactcatagggacgctggagatgcctggcttgctgatgtggaaccccacccccccacactttcttcagaacctagatttttttctgaagggcctcatccacatacactgcctcaatctaatagaggcagtatttataaaccctaagaaaatctgacccgtgtttactcttcttatggaggtactgaatgtaggatttgaaaagtgagtgatcctcactcttgaaatctccccactgcttgtttaactgttgttcctcctggccaacattaaacaaccatgcagcatattcattcaagagtgggtaaaatcacttcttctagctccaaaagattccagtcactcccaaatttttgttatagggaaacgcctccacaggcttcaccaaagaaatgtttagcagtttataaaataaagaacttgttgcaagcctcaagtgagggcttagctagtgtaacatctgaaatgtgaagaaaatctcaaggcagagagcacgaaacgtgggtagccaaggcttgtgccaatcacttgaaactgtaggtttgtagaaacactcagggctgtggagagcgatgctggtgattttacaacctttaaacctaaaccaaaaccaataaacatggactgtgctagtatttttggtactctccaaaaatctccttggacacacagtgccataaaatactgcactgtgtcactgactcttctttttctcaaagtatattgttgtaaaccagtgaatttagcaaatgttcttttagcatttcagacatctgaagagatgcagaccagaaatgcaagaccccttcccaacctgaaaggtatacatgcttctcctccctctccaaacttacgagctgttcaatatttgaaatttttctcctttgtgaaaactcaggtcatcttctgtccgtgcttcatagtcataaagggccacaaagagtgtcactcctgccgaaacgaaattcacaagaagggagattattacacaaggggaaattaattccaagaaattaaatcttcactaaaatctcattctcacaatctacatctagccagcactaataacatgatgaagtgttgtaattaacgtgtcaaaaccacagtcacagggctgtgtttatgccttggtctttgtaggggaagccttactgtatctgaaagaaacctagacctgaagggcttctttctgtaatagcttttaatgagggctgaggagcagggaaatattaaaattgcatcccaaacaaaagggcagcgtcagcgtcagggttcaggtttgcagggctctgcagcagttactgacatcctttgctggtcgtatcttctcctccacttggagcctatgttagtttctgggtaaaatgcaccaccctttctcctggtaaaacagtaacatagaacgtaataggaaatgcctcctgcagcttggggaaatttagagaagaccgtttctgtaatattcaccccaattagaggatgtactgcccttggcatctgcagttcattttgcagttttgtgctgctcgccccactgctgaaaatggaaccctctcccttgtcctccccctaccttgaactcacctctcctcacactgtcttgtagcactcactcttcctcacacccaccctatgtcctctcatctggctctctagagaggcccttcctggtttacagaagtttgctagcagcagcagagaatatccagtgtcatttggcctaggatttcctccatataattaggcataattcttttttttttttcaaatagagacgggggtctcactatgttgcccaggctggtctcgaattcctgggtgcaagtgatccccctggcttggcctcccaaagtgctgggattataggtgtgacctactgtgcccaacccaacaggcataattctagcatagtccccagtgactcctgcctcctagtattcagtctcgtgcaagcccctccccttgagtgtgggctggatctaacgacttgcttctactcaacagaatgtgcagtcccttaagtgactaggcttcaaaagatggtgacttccgtctttctagcagactctctctattgccacttcagcttgtgtactttgatgaagcaaggcgccatgctggtgaggcccatgtgaccaagaactgagggtggcctctggccaacagccagcgaggcaccgaatcctgccagcactacatgagtttggaagcagatcattctcagctaaactgtgagatgactatagcccagccaacgtaccttgattacagcctgtgagagattctgaaggaccgaactgaccattcgcagattcctgacccacagaaactgtaaatttaggttttataattttaattgatgtatggacacacataaacaaaaaagcatgaaggaagatttggatccaagcggtgccacactttatgtcatcactacaagtgttcaagtgtaaagaaaaccagttttgaaactatgaaattcctgattcataaatacacagttatttctattttagtacatataagataatacactgttattaaagctcttttattaaggcaattgcatatgtcttaaaagcaatggtaaattaagttgccttccaaaactgtgtacttgtctggtcagctgtgtatgatcagttatctacctcagagtctattttcttttgtgctgggacaggttgctggccctccctgtttccacagcccaaatcctcctagctcagaagctagggctaagcagttatttcttttgagtattttttagttcttacattttatgcttgtatttgatgataaatgtcagtgacatttcatagtttccaaagtcctggctgctctgagaagtgtagattctagtgaaaattacatagtcataagataaatttgtttttgttttattttttaaaagtcacggtatcactggttctatgctccctggaatattactgctttgtgaaagcccaggctgaacgcagcaccctctgtgtacctagtacagttataaacctgggtctcccactagttgatacttctgcattagttaaggcagaaatttgatagtttggttagaggggaggggaaatctgttgccagaaatgtctaactaagtgccatactcgtctgggtaagatttgggaaacataacctctgtatattaaaaaaaaaattagttaaacatcatatagtagatagccattaaattataaaaaaaattatgaagaaagatcttttgtacccgattgaaaaaaagagatatagagatatctatatgatcaagagagttaattttttttttttttttttgagatggagtttcactcttgtcgcccaggctggagtgcagtggcataatctcagctcactgcaacctccgcctcccgggttcaagtgattctcctgcctcagcctcccgagtagctgagattacaggtgcctgccaccatgcccagctaattttttgtatttttagtagagacggggtttcaccatgttgggcaggctggtcttgaactcctgacatcgtgatctgcctgcctcagcctcccaaagtgctgggattacaggtgtaagccactgcgcctggccgagatttaattttttatttttgttttactagtgccacagacttgccagtggtaacttatttaccccattcaagataactctgtagttttctttcctaggacttgttgttaaacgtcaaaagacatttttgagctgtatgtttgatcagactgttagcttttctgttttatttcttttaagaacctctgaataaaaaacatctgaaattgaaaaaaaaaagaaattaaatgtgttttgttttaagctgctaagttttgtggcaatttgttatacagcagttgataactaatagtagttccctgcagtctgccttttcattctggtctctctgcacttcagagtgcctgctatgacctacagaaatgacagggagcccacttttttttttttcttttgagatggagattcactcttgttgcccaagctggagtgcaatggcgtgatctcggctcactgcagcctccgcctcccgggtttaagcacttctcctgcctcagcctcccgagtagctgggattacaggcgcccaccaccacgcctggctaattttttgtattttttagtagagacggggtttcgccatgttggccaggatggtctcaaactcctgcgctcaagtgatccacccacctcagccttccaaagtgctgggattacaggcatgagctactgcacccggccagagtccaccttttttaccaagctgccaatttgctgtgtaggtagttccaagggaagaaatgtgtcatggcactattcaaggaccacagagaagagtggggcttgtctttctgccccatcccaagtgggactttcctcaggagagttagcattcagaggtctgaccatgcaaagctaggctcatttggcaactttccttctttccttagatttctttgaaaggtaagaaaagagattggcttaaaacaaaaatgtgggtgcccgtaaggtcatgcctattcttatttaacactccatgaccagattcccttctttaaaaacaatttaaaaatgaagccaagccagccccactgtgtggaaggcaaggcacatgaagaccagcaccccactctctccttgcatcagctgacaagttctcactgagggcttttatgttccatgttccaggagctgaggggagaatcaaaggaggttacagagaaacacagacgttgttcttggccttacaggactgaaggcagtattgggagaaaggacatgcatatatattaaaaccaaataactcaaggcagaaaaatctgccaacatttgggagtactgtgttttaactttcaaattttataagggatcaggtagcctcttaaacaaagactcctcctgactacggtggagacccacatgctcaacacaagtggccctctctagtgactttaatgaatgatacctgcagacccaggggtccatatccagcactcgtgaatgaatgaacaaggacaatggctgtgtcagtagaattaacagtctgggctggcaaagcccttatgcttctcacggtaggcacaaggatgggggttgtgtttgcctctttttttctcctgcatcatcagaagacagatggccttagactgcctgtctgtgtctcttcaggcacctttgggaaggtgggaaggatgggtaaaggtacttagcacgtattcaacccatgcaaggcctgggttaaaaggaaagctagagtcaccacagcatgagggtgaacataaatacttcttctactgggcagagtgtgctatgctagcagaagagaagtagataatgtccaaaggctcagggtcaggctccttgatacaactacactgatgtgtgatgtgtgttgggtgcagagggaaaaaaaacttgctaatgccttagtagtgcctcctccctaggtgaaaaggtacctgctgccagatgggctgagagatactggattctttcaaacttttatataagacatctgctgccagatgaactgagagatgctgcattctttcaaacttttgcaataaacaaaataattctggaacaaataatgtgaaatatctagttaccatggttcacatactcagagaaaatttggatgactagggatgcatgacataacttacaaatatttcggaaaacatatgtctgagaacgtacgccagatattttacaaagtattagctaagtcagcaaatacacatggcagcagaatatagccttgtggtatgaaagacaaggaaacttccaaaaaaaaaaaaaaaagaaaggcaggctgaggattaggaagaagtgagtgggaagagggagtacattaatatctagagaactcaaaatacacacacccagacccagtcctggagcctctaattcaaaagactgggacatggctcaggcatccgtgttttgaaaaggctgccctagttcttctgtgccaaccagccaggtgaggctgagagtcattgacctacagtgcctcagtagaatgttgtagctcactaacccatatagaatcctcagaaagcagcaacttggggcaccttgcaaccctgtagccaagcattttgtttgtacatcaaactctggcttttcttacaacccctcatctagtagaggagacagattagaaacttacatgtgaaacccctagtcaaagggaagtgatgggaacccagatgttcaattgccaaaagatttaagggtggctgccccctctctgcactctgtgactttgggggcttacctgttcctcctctcgtacgcaaggtccccgtatgagacgaagagttcacacctccaaagacggtgagtccttggcccccggctgcgtggaagttgttgtagttggggatggaggtcacaccgaagctggggtagtgctgaggggtggggtctgtgccatagcggtacccagagctctggttcaggctgccgtccctctcctccgtcagttttgttgcttctttatccttacattgcacacagcccattatctaaattcctgccaaagacaaaaaagggggcacgtaagctgggatgctccctagttgctgggttgctctacagtaaacgaggagtaattgacaaggctcactgttggctatttcaggcctattagggggcatgaggaaaggcagtggctggggagatggttaggaggaagttcagttccttgaccccacaatcgcatttgttccccatatgttctggatgacagcatcatcacggagcacaatgttcaccatgcagcaactttcctcgaataaggcctgtatctcgtaaaattctgtaacagcatacacctgcctacagacggtccaatcatatttaccaattctgcctttagccatctaaaaaaaataatacatgctctgtagaatgagtctatgcaacattagaataaaaacttccatcagggcacaggaaatttaaggaagagggcacaggagtgttggataagccagaatacaaccttcaatcaagtcactagactgcttcactcatgggtaccacatcttcaggcacaaaactggtcaattttaagcactaagatgatgctaagtatcaaaactaagaactagttactggatgaaaaataaaatcggcagaacctaagaggtcagagtatatttgcaggatgtcatgatagtctacagtaatgaaatcacttaaagctgctaattaacttttcaaatttccattagcttttgacatccttcaaaaacattaaaaaaaaatcattcccatgttacagagttagtggcggattaaaaactcgagttgttgccaccccaccctcctcaaaccctcttctcccaggctcctcatctaagtaaatgggaccaccagtgtcccagttgctccagtcagcatcctgagaagcatcctcatttcctcctccttgtttacttcccactcttcctgtctcggctctcctattcaaacacgcccaacttctcagatcctcaaagactccattcccccacccgcttcgggccttggaacataaccttgaacactttttccccttcctctttgatatgtgacgtatccatgtcctagttaataaggcaccgcttcctctgcaaggcgttctccgactgccctgcccttccaggctgggttgtgctttctgaagtgctcccatggcatcctcatctccctccttctggcacccttggcgccatattaaaacagggcctgtttatttgtctcattgcccaatggactgcaagttccaggaaagcgggaccctgtctgttttcatcacagctacattgccagtgcctggaacaataaatagcaaccagatgagtgaagattctgtagcctattatgtttctcttttaccctctctgtattaaagccgatccctcctgtgactttgagatggagtctcactctgttgcccaggctggagtgcagtggagcgatcttggctcactacaacctctgcctcagcctcacaagtagctgggattacaggtgcctgccaccacacccagctaattttttgtatttttagtagagatggggtttcaccatgttggtcaggctggtcttgaactcctgacctcaggtgatccgcccgcctcggcctcccaaagtactggcattacaggcgtgaaccaccgtgacaggcccctcctgtgacttttatcagcagtgtaccttgcattttaaaatctactggtatgtgtgtgagaagtgaagaagattcagaaatacaagttggttaaatggtccccctttggacttgcaataccccaacaagccaacaggggtcaggtagaacaggccagtggaggtccctgccaaaaccgcaaactagcccatttgggaccaaagaatcacataagaaacacatgccatcatgtgtaataacatttattcactggggagggcacagctggcacaggatgggaagggcttgaggcagcaaaggagaaggcatgcttttctatactatcttgcaaaccaatgcaggaggtgccatatcagaagagtgctccctgggcactcttctgagcactgcttttctgctggactgggtgatgggagcagtatcagactgttctaaagctctctcatattacacatttcaataaatacttattgaattgaatgtcagttcttgagaatgaaaatgtttggaaaagagacgcctactgcttgagctgagctcaccaaatctggaacacatttactcctaaatcatttgagattaacttacagtataccgtgcccaacatgctttgtaacttatggtaaatggatatgattttaacaagtttccaataggaaatgcaagctatttccaaggcatgatgtactaaaggaatttcatcatttgttgttgatgttgcttcatcagactgataacttgctcatataatattaactctttcgtggtggaaagttgctccacatttctgcaaagaccagacagaaaacacttcttgtcccagatgttttttctttttttccatgaatttcactgatctactgtaattagagaatgtgagacctgaatcacagactcatatcacttacagcagtggttctcagctgggggtaactttaccactcccctgcaagagacatattgggcaatgtctggagacattttgggttgtcacactcagaggggagggatactcctgatacctactgggtagaggccaagaatgctgctaaaacttcctgcaatgcacaggacagcctcctacaaacaagagttacctggccccaaatgttaatagtgtcaaggtcaagaaatcctgatttacacgaaggaaagaatttatatctacatctttgaagcagtttaacagctgtttcccttacatggatgtgattaacatgcaacccatcatgctttcttcaggcgaacaggcatgttaggtagaagcaggcagttttaaagagtgacatgaagtgctctgattttctctagaagcttgtgcactgtgatagagaaacagaacctggaagtaatgagaacactcattgcaaaccactcttccaactccagcaaaacaaaataagccccatataagaaccctgaagaaaacaggatcctacatttaaccaaactaagaaaaaataatctttcaaaatccactttaaaaaagaaatatactataataagcaactagcagcttatctataattttatgaagtaatagagaagaaaaatcatcagctccttgaaggcaggaatttttgtttttttttaactgctgcatcttgcgtggccagaacagtgcctggcacacagtagtcactcaataaatattagttaaataaataaattaaaaataatcaaaatcattttggagaaaacaatcctcttttatagaagagacagcaccatcaccacttcacgcatttgacattctgagttaagtaatgtttctatacagatcttgcttactcttttctcttcaatgacacataggaagaagtgaaaataaatcagtaaatgcagtttcaagtcattaaaagttaatcacaatgaaaatatttatgtaggaacttgtggtcttctttctcccccgtggggcagtcagactaactgcttcgtgacagaagagtcagaagacgctacatgagctgtattcagtgtgcccaggctccttgctacaaggcaaacttttgatcattcatgctaaaataaaagtatcctttattatgcagagttatgtgctgtggctttaatgtccaatgctgtaagtgcatcgtgacatagaatgtactaattcacttgctatagatctctggggcaccgggaaacactgaatgatgccatcgtgaatgtggagccctggagttactctgatcaggaaaataccacatgccatgaactcatggctatagtcttctgcaagttatcatgcctagaaaaactggtgaagggcattttcaccaattggatcctgtgcctgtgatcaaggtgtctggattacagctgtgaagcctctattctccaatccttttgcaaagggaggggccctttttctactaagcaaataaaacttgatctatttaaaatttccctagtcctgtggttctttacagatgtgccaatagtgttaagcaacctgggaagaattgccggacacaggattcaaggaacgccgcaccctgctcccataagcagggcagacattatcaacagatcacagccctttctgctgccatgctatgggagatatgcttctccacatagccctgtagtgattgacggaaactgacctaaaggatagattcaatcctttactaccacaggcacagggtgcttcgatccaagatgagtctggttgaacatacactccctcctcctgatgtagacagaccacagtccagtctacaagatgcacattaaacacagacacattcatatttcgtcatgtgccaatcaataaagcaatgccagtaagcccaagttataagcttgcaggacgtgtgataagatttcaggtgtgtgcaggagctaggtaccaaaatgggaaaaaggccactggcagtcttctgcacaagcaaattactttctcttgagacacatacacttgcaggcagaggaggaatggcaggaagaggaagtgaaaccgacaacaaataactttaatttcaggggtgtatgctcttttgtctcagaagccaacctaggtgggtgtgaagaagtgacagcccttaggcataatccctgcttctgacagcctccagcagactttggagagtgacaggtaaagccacatttggcccgtacttagaggtggcatgtttcctggtatcataatggaagtataagaacaaggaagggaactgaactaagaacctagaaaccaaatgcaagcaactgagatgggggcagttgaaaaaagaatttaaagctgaactgcagatcaactgcatggtttcacacttttctcggaaaaaagcaaaaactggaagcttatcaagcaaacacactttttcagtcagcaggaatagcattaggaaaaggataagatgtggcagagacacatctgaaattatttgacttcaggatagaagattcatggcagagggctcttgatcctcgcaaaattagaaacacccataagaatctacttggggacttttgctacattctcagtggagagagttaatccattgaaagcctaggaaagccttctttagttttcccctgtcattactgggagcagaaggacattcagagacagttgagtaccacatcagcagcaatgaggttgggccacagaaactgtcacccaaatttcctaatttcccagcacctttcaatcctttacaatggggcttttctcctctgtagcatactgcatcagatgatcctgacaccccatgagagagtgcaggcagtgctgccttctggggacagacgggacagaagggccagggaggactggggaggctggacagaaagcagggctatgctggccactcttgggatcacaagcatttcccaaggtactgaagcagagaaaaagtcactgctgggttggccctctggagatgttaatacttgagggatgaaacactttcagcactgatgctgggttcagccaatggccccagcccagctatgaaaaaaagcatgcaggactctgccaatgtgggaaagtcctctctttgctgccaactggagggagtgaaaatatgtgccttgctaaatgacattgtggtagggagaattctgagctgtcccccaggactcctactcccggtgtatgtgccctgcaaatccctaggatttatgaatgatggggtagtcactccatcatcgggttgttatttggcacagccgactttgagagatcatcctgggtggacctgacctaatcaggtgaacccgtgaacggtatgccagttcctggaaaagtagattaaaagtgagagaggccttcattgtgggggagattctccacagctgcctttaaagatgaaggggctatgtggccagacacatgggtggtcagagctgagaacagctcggtcaagaacctgaatgaacctggaaatggattcctccctagtcaagccttcaaacaacaacataatcagctaacatttgatttcggctttgctgagcagagaatcccctccgtgcctggatttgtgactgacagaaatgtgagctaacagatggatgttgttttaagctactaagtttgtagtactttgttaggcagcagcagaaaactaatacatgttttggtgggatgggcaccatggggatgatggctccaatttcagcagtcatgaccaatatccaatcagtgttccctgtagcctaggtgcaggctggactctgcaaaatgctgtcccattaaaatctagtaacaactctaaaacacaggtattactatttccccacactttacaagggaggaaaagaggggttggggaatttgtccacagctatgtcagtcatagagatgggatttgaaaccagatagcctgattccatggccaacacacagagtctctatactagagctatttcctgaccatggaatcctggccagtccatgcaagggtgtgggtgtgagggctggaggtgttgagggaaaaatcctatagggaagaattggttccacagagctcaatatctcacacattatgatatggtttggttgtgtccccagccaaatctcacctcaaattgtaatccctataatctccatgtgtcaagggcaggaccaggtggaggtaatcgaattatgggggcagttccctcatgctgttctcgtgatagtgagtgagttctcatgagatctgatggttggttttataagcatctggcatttccactgcttgcacttactccgtcctgccgccctgtgaagaaggtgcctgcttctcctttgccttctgccataattgtaagcttcctgaggccttcccagcaatgcggaactgcaagtcaattaaacctctttcctttataaattacccggtctcaggtatttcttcacagcagtgtgagaatggactagtatacattactaacggaggcactgatttcagggactaggtctcacctccatccccaatgcacattccattcccccaagacagtggattctgtagagatgctggaccatactaggtgcagtgagtcaccatcttccttcgtgcggtttggcatattaatgactatttgggccgatgacactgaagcagcccttaatttcctcatctttcctagtcatggcaagggtattcataagtaccatgaaggagttggcactggtttccttggtataaaaatcagctttcctattgcacttaaaatatgatttgctttacaggcaaaactttctggaacatatttactgcataaactgagatacacatataatgcctccaccaagcacaaaataacagctttctactcttggtgaagcctgtgagggagagcccctcgccaaatgcaagtattaaaatattacagtctctgaggtgagaagatagatgtaaaagtgggaatatacacaatgcagacactagccacatgcaatcatgggagaacagagcctacttaaaaatcaaacccaagctttgcttcagaaataagtggagttgaacccattcgatcatttacgcatgactttgcaaaggttctctggagggggaagaggatcaaccttctctcataccgcacagcaagggaaccaaagtaatataaatcactcttaaaaatgtcatgttactttaagaataagccatactgctggcacctagaatatttttgtgggtccccatctctggcttttcttgttcaaatggcccccaggctaagaggcagctgctcacatccctgcaacaaacatgttctttcctttctgcatagccttccatttctcgagcccgaagactcaaaagcgctcaataaaagagaaatggaagcatcagaccccagtggtgagatttaagactgcagtcaactgaatgctggaaccagtcccaaacctaaatggccaaatgaggctttaacaccaaaccatggaaaggctccaagaaaagagtaagaacattttcttcttaaattcattttgctctggatctcagggttaagacaagagtgaaatggtgatgaaaacaaggatgatatgttttaaccccatctatgccaaaggtttcagaaagaattagagcacaggttgtaaagttttttcaggctccaccccctgcccgcaagcctttttggaccatagaaaagccccttgtagttaatatttttaaaatttcatttaaagtgagatataattcatataccataaaattcaccctcttgaagcacacagtccaatggtttttagtacatttacaaaggagaccatttccattatctaattccagaacattttcattgctccagaaagaaacccatgcccattaagcaatcgctacccactcccttctctccccagcccctggcaaccacgaatctaatttctgtctctatggatttgcctattcttgacatttcatatcaacagagtcacatcatatgtggtcttttgtgattggcttcctttgcttggtataatgttctccaggttcattcatgtaacatgtattagtacttcattcctttttatggctaaaagatattctactgtatggatataccagatgttgtttatctattcatcaactgatggacatttgggtttttacgttttggctcttatgaataatactgcaacaaacattcatgctcaagtttttctgtggagatatgttttcaactctcttagattaatatttcaatatataagaaatttatacagataagagaaactctaagtttaggaaacagaaacatatattggcaacaaaaaaaggaaaaacaatttgtgaaacatatgggagaatattgcctttggtagtaatcagagaaatacaatttagattagtgagatactatgtatcacttctaaattcacacattaaaaaaataagtatactcaatagtgatgaagtttccttgaaatgaatatgactctcttacattgctgatagaagaccagaaatcagtgtaaaaccatttggtaaaccaatttggcaatataaaaaattcttaaaaatgggcatactcggccaggtgtggtggttcacacctgtaattccagcactttgggaggctgaagtgggtggatcacttgaggccaggagttcaagaccagcctagccaacatagtgaaaccccaactctactaaaaatacaaaaattagatgggtgtggtggcaggcacctgtaaacctagctactcgagtggctgaggcatgagaatcgcttgaaccaggaaagcagaggtttgcagtgagctgagatggcgccactgcactccagcctgggtgacagagtgagactgcctcaaaaaaaaaaaaaaagggggtcgggggtggcatgtcctttaacctgtaaatgtgtgctaaagacacgccttttaaaaaaatgacatgaagaggttctatgaagtattatttatcatttgaaaaattagaaaacttgttagttgtttagcatgagggcaatggctaaagtaaattgtaaggtatgcccataaagacaagttaagcagaaattaaaacttacatttactgaaattatcagcaatatggaaagatgttcatgttatattaggaaggatcacatgattgcaactatataacaaatgcctagaaaactctttggaaggaaacatgctgagattatggtggtgtgcagatgataacactatgggcaactgttctttctttgctctctgtgtcttttttctcagatttgtctataccaagaatgtactttttttataatgagaataaatcacctttatttttctataagaaagttccctttaatattatcagttactgattgaatttgtatgtaagttgaaacaactacacattgatgaagtatactttgtcaactgaaaaattaagagggagagactgactgattccaaagcctgttgagaggcaactccttctagaaggtgtgaagggtgaaaggtaccaatggacagtgagcctgctgagcgtgtgctcttaactaatctgtgctggaaagtaagcagtgaggcgcagtgctgggagtgggcggtgagtgcacagcaatgaacagccatagatatctaattaagggcacgaaaaaggcaaagccacatgcagaggatcctgtaggggacaagtgtggaatctgggataaccgaaccaaaagcagggtggctggattagtggggttttgagaccctttgggccacacatcctaggtacttggggacacccactaaattcagaatgacggtactcactcaagtctaccttggcacctaaccaaggcaatctgattcctgaggtgtctgtaggagctctctgtgagtgaggtcatgaagaccacgcatgggcttggctctaggaaggtggagaggatgaaacaaagcacttttgttctttggatgccaattggtgggagagggaagggggcctgccctcgctcttgttgccttcaccctttcctgttgggacactgagctgggcattttaatgctttgactttgagccactgcccctagaacctggggcaatccaagcagggcacagaacagtaggcaacactggttcatgtgacctgaaaattttcagaaacactaggcacagaagagatgtttcttcctgatgttgatatccaatcaagtatcttcctaccctccttaccctcattctataaaaacaatcaaccagagaaaaagagaaaagaaaaacaaaaacgtgggcttctattcatgaccagcaaagagaaacaggaaggtcagtgtcacatctgggccacagtggcagagcctagctttctgggctgcgcctgtttaaggaacagtggtggcagaactggccgagggcccaagggtcagggtgtcacctggcagagccacaagaaaacacattagcacaaagcggctgtttgaataggcgtcatcaatgccccctccccaagtacgaggaccgctgagaatgaaagccgaggaggttcactctccaaggccgaacaaaacccgccctgccaatcttcccagtctctatagaggttcctcgccagatgattctgcaaatgtggcctcatcctttcaaaaacagtgcattctttttctctttctttaattcactagttccagtcaagaagatccaattcctttaaagacacagaaaggactttgaagaaggagatttgacttcttttgcctttgagctgatagcacggtgcttgtggtctccatgtctcccattttcgctgatcatttatctggttatgaagtcacagcccaatctaaatctaccagcctgagaatttggctgtgaggccacttgcactgtgtttttggggcagaggctggtgtctttcctttgaagaataacatgaagcccagtcccccggcccctgggtctttgtgttggcactttattcaggctgccagaaatcagcaacaacagcagggataacttttgcatcccctgccgtggtgtagaatttcaaagcttcttgcagctgttttggtgtgaatgcagataaagtagccagtcagaaagcatagtctatctaattccacggcctctatggggacagaatggctcaggaggacgggaacaaaaggagcagagaggcagactccagccagcctcctcctacactttattgcctgaaggaaaggaggatggtctctgccttccctgatgttggtttcctcaccctgggtgagcccagggtggttgaatatgtcgtgcgtgtctcagtaaagttttcactagaggtctgcatttatgaatgcaaattgagtgccaagagagacacagaggaaattaaaggaggaacatcagtaagaggaagagaatgtggaaccaccagaaggtagtgatgctttccccagcagcacacaaaaaacagtatttgggatgacaagctgtggccactctgtgtgggaggaacatgtgctacatgggctagaccacttgtggatgacctacttaacacctgatggaaacccagtcagatttttcttaacaaatccaaaaaaggtaacactgggtttacataccagcatacattctgcgaacactactgcttgtaaaagttatggtgaagcaatttaatagtgacttttcacttggcctatgaatgaggtagagaatacaatgtttttttatactgttgtcctacagagtgattaaaccttaagttcactccttaaaaatggcacagcagttaatcttccctttttcctaggtgcttgcaggattctggtatcaggcagggttgccctgggtctaaagggacacggccttggcaatcttgcagcccaaatccacgtcactgaaagtaagcgagcggtggagggtgaaggcgggtgaaggcaggtgaagggtgtgcaggctgcctgctatcccctcgctgtcccaccaaatccaccccaccctcctccatcataatagctttagtgagcctctggctttgcagctgaagactgcattctcagactctcttgcagctaggtgtggccagatcacttaattctagtcaactccttgtgactgggtataatatattcaactcctgaatccttcaaaagggagctggtcgtcctccactttccttcctgcttcctgtgggctgggaagtgggtgtggtgctggtgaactggcttcaacagacagacaatggcaacccaacagggaacagcaggaccacaggatggaaggaacctgggccccggacagcttcacggagcacagctgctcgtctacccgaaagcacccaccactgaccccaacacgagaggcatgaatattgatcttgtgtgggccactgcttctttgggaggagatgggggagggcatgcagtgggatctttgttataacagggagtctgcagcaacacacggaggaagtgaatctaatacagaggtcaaagggtggctgtgtgggccacgtgtctccccactcccgagaaccaataagaacttctgattacctttgacacaaacagttaaacttgaattaaggcaagttagtaggataacaacaacagtaacaataacaatgcctaccactttttgagaacttattttctgcttgaccttttacatatgctatctcatttaatcctcagagcaaccttacaagtatattttacagtcaaggaaccttgggcccacagaattggagtaactttcccagagttactcaggccgtgggacctggacatgaatctagatctaatacgcttgcatcttctacctactacaccatgctgttttttgagaagcgtgctctgctcctagccattttctaagtccagcttagcatttgttcccaagtctccgggacatcttagtctggaattaagtcttctgttttagagaaggtctgtaagcagtgcattagcccagaaccaggatgctgagtagccctgtggcacagagcgtatcactctgaagttctggagcccagtttcctcatcagtgcattagcccagaaccaggttgctgagtagccctgtggtacagagcgtgtcactctgaagttctggagcccagtttcctcatcagtgcattagcctggaaccaggctgctgagtagccccgtggcacaaagcgtgtcactctgaagttctgaagtccagttccctcatcagtggagcaaagtgggcttccaagccaggcacggtggctcatgcctgtaatcccagcactttgggaggctgaggtgggcggaatacttgaagccaggaattggagaccagcctgggcaacatggagaaaccccatctctacaaatatacaaacattagccaggcatggtggtatgtgcctgtagtctcagttacttggggggctggggcgggaggatcacttgagcccgggatattgaagttgcaatgagccatgttcgtgctactacactccagcctgggtgacagagtgagaccctgtctcaaacaaacaaaaaacaaacaaacaaacaaacaaaaaaatgtgagcttcaacaaggagccctccagggttcacaccaatgctgaaggagcccaaagaccttttgcacacattgagcagaaccactgagtccacagacagacaggcagctcttggccctcagctgaacctcaggaattatgaggactcatggaatgacctgaccaagtgctcaggtttggctctaaatgctcagatgacccctgctgtgccagagccttgagaaggtacattatgagagttttaatgatgtgagaagagctaggcattgctgtgtcctacagtttttatttaattttttgccctatggtttaaagtactctttcttactacagttttcagaagacctatgtcctccactttcctttgttgctaaaatgaagaacaacttatgatctggctcaaccaactctggcattcatgacatgctgtggtcttgaccctcctccctcatcacagggaggctccacttctctctggctctaccctacagggttgctaggtacagctgttctccttctgagctgctggagatgaagttagaagaaaacaataacaagaatgaagaaacgaccccccctaccccaaacaaaagttactccgaaatcaccatagtaacaaatcaccagttttcaactgtttcatttcctttgcatttttgtttctctgcacatacccttttatttatattcagccccagctctagcctttattcaacaagcatattttgatcccctttatgtgacaggcactgtgctaagggctgccggtataaagtcaagtacacatggcctctgtcctcagggagctaatatatacttaagagggagacagacaagtaaatcgagggactcaggttggagaggggacacagagggagttctaattcatccaggtcagcaattgagaaagtgactggatattagcccaggcagggaggagatgggcactgcaggcaagggaatagcatatctgagggcacagaggtgtggaacaccatgataccctcaaagaaccgtaagtgttcttacggcttatttgatttatggccatatttatggagcattcaaatatgtgccaagcatatttcgaggctttgggtgctaaggctgaagaagacaggctccctgctcaaaaggagcttatagtttaatgggattgaaatgtgtagctgggtaagtggctgagcttgagaagcagtcagaagccaaatcttaaacaactatgagtccattctactgagccctcactatggtgcctaaagctttcctaggtgcaatatgcaaatgacctttgatccatcaacatcctgtgctgggtattatcatcatcatcaatgaagggaggtaaagttatttgcctaaggcctcagtgctaggtttaactgcattttaacccagatctggctaaatctgagacctataagcaaaagcatttgcacattatacaactgatacttatccagtattaagcaggagtgaaactgggtcttgatagacacatactgaagctggggagaaaagagaagcatgggggggtgccagatcaagaaggcaagggtagaaagagactgcatgcaagtggctggacagggaggtatctaagtaagctatgacttcctaagtggaccaatgactctatccattctagctacctgtctattcataattcatacctcacaaatcatccccaactgtggcaaagccgtagcttttgttacatgtgagaataaagatctgaaaccataaatggctgcagaggtgatctactttggaactatataagtgacattatctgagagccctggcacacaaaacacttcatatcttttggggctggtaggagtgagaaataggcttgcacagttgtgtaagtggctgcctaaacatgatgaggacaggtaacaccacagatagacatctgcaatgcaggtcatcagaagaaagacaggaatgcccactgaaaagggcatgtaacaagtagaatccaacaacagaccggtgtcacaagaggatcctgaaggagtggctagggttagaggtgcagatgaatgtgaggtcacaggggatcaccactgttctcctccagctgtggaggggtttgctctgtcaagtcaaatacgaatgtctttatcatgatgcagaagtggcagttacacttcagttttgcataaaaaatataatattaacacattctttgggctagaaggcagcttattttttcagcaatgacagctctactcacatatacaggcttagaacagtcagaggatgtaaactcttgctcatccaccagcaagagtcatcaatcggcagctctggcagaagcactttgtcccagcactaagcagaactggcctgtccctgagagctccgatggagctgccttagaagattccaggtaatgatggcccaagggtggcttcatgccctgccccagttctggctcaatacaacccaaactgacccagcaagtaatgatggtacacacatgaaataagcccaggaaacagctctgccataattctttgtgacaaaagctgactcgacatgctgatttccagcccaagtgaaacaaaatggtcctgtgtacaaccagcctacacattctgagtattcaccgttccaccaggtttattccttaatctggacgcactaaatgcactcccctctaagtcccttcatcattttctagccatcttgcttctctcttaagacttgtattttctatataggttcactgctaaaataaaaatactgctaacaattagtggatctgcataactcttatagaagagactgattatttataccatttctacttttccaaacccactaaactgttccctaactttgtttttcttaactatctcaactgtttgaaatctgtttctgttctaacatggttgctggttaatcatccattcttgtcactatttgttttgtgcctcaaacactcgactctttaaaataatggtgtggacagaggaataaacaaacttagtttctcctctactcttacaacatgcttctgacaccagatgtgtgggttttgtttccccacatatcaagcaagcaagcaagcaattttgcagtggacacagctggctgttctccagttcaattcaatttggtgccaatatctacctagagatagtgtcagatcctacaggttgagggcttagtttcacaaaactgctccccacttaagacatgagtcacaggccccaggttgtggtatgtgcttctaacccaccggctataaatcgggatctccacaaccccctccttgggtttgactcatttgctacagcagctcacagaacccagggaaacagttatgtttactacttcattataaaggatgttttaaaggatacagatgaagagatacacagggtgaggtatgaaggaaagggcgtggagcgtccacggcttctgtgccctgccaccctccaggaacctgcacatgttcagctatctagaagctctccaaactctgtcctcttgactttttatggaggcctcattacataagcatgattgattaaatcactggccactggtgatcaacttaaccttcagtccccttttctctccccaaagactgggagataaggctcaaagtcccaaccctctaatcctctctttcccatgaccagtccccatcctctagacgtttactactttggagattccaaggattttaggagctgtttgccagaaaacagtgaccaaatatacacttcacaatatcactaatggcctcaaattttccttaattttgactattttcccataaaaaaacaaataaacaaataattttttctttggtaccagagcatttttactttcctgctaggccaggtgacaaaactctcactcattttcaacctaaacaacacaacacccatcatgaactgtcatcctccatttctatattgcaattccaacataaagtgatgctactggcagaattttcagtctgttaggagcaagtactggtgaaaatgtggaacaagagctccacacacaccgctagcaggacgtcaacaattttacattactagtgaagatgaagatgtacctatcccatgagcagaactccactcctaggcataaaccccaaagaaccatgcctacctgaaacaggaaatacatgcaccctgagggtttaaggtgaggctcaggaatctgaggtatctgcactttttataggtccactggtgatgttacctcctcccctgcaggggtcttggactgaaggcttacaacctcaactcacatctgtttttggagtcaggtgcccccaaggctcatggctgcagccaggcaaagctgctcactggagaggggtaatggggaattgcacatccatcggagatgctcctccctggtcaaaggtaactattctgaggatctgggaaaatccagcacagtatcagcatgcttttgctcaccagctgcctgctcttccctcttggtcacccctagctgtctgagcaagatgtggctcaaaactcacctcacctagtgatgggcttgggtcggcattggcatcatcctcattttcaacacaaagacctaaagtgcccacccagccctggtgctgctatgaatgtgatcctccctggctgaaagaggaaacatctaggtggggctttagaaggtaacactgaggggtgagccctgtgaaggctggcctttattaagcaatactttcagatgaggatgagaaagtagaataaagaacttcttcttggtggggcggggaggggctttctgccttctggtgtgaagctgccctccctcctcctgctctgttctccctaatgaaagttgtataatggtgctctgtcacctgcacttccatgcattcctcctgccaagaatggcttctctccccatccctacatgaagccgaatgcctaactctgtccattgccatcactctcctattttgaactgaagtgaccccagggcaaagtaccaatgaccatgttgctatcgttcttttaggtttaaagatacctacaaggtgtcaaaagctctacagattccactgggcacctgaaacctgtcctgcccttcggcaccagcagtgcacggagggtggagacaatctgtttaaattgttcactgaggacagtgcagggctctggcaagatgcacatgcacgggagatgtggaggctctgttgagaggaaatggagatgatgatatgagataaacacaaatggagtctggaatggggctcaaggaggacatacagggagcccatctccccacaacttggccacatgcccacagccctggcagggttctggctcctgcctggggatgctgtggtcccactggagctgcctgctgcctgcccagccgcctgtctcatgagaggccccgccgctgggcagttcattatttgagtggcatgtgggagagaaacagaagtgatttttcttataatggtttcagttccactccatcagttttgaggcaggtttccttccacttctctcctcctcctgctctcttcctttctcattccctcagggtgtcagaagtgtacaaagccatgattaagatgaagggtttctattttgagtaggtggttaaaaagattctggtttcttccctgtaaaatgtggattatgccaactactataaattactgatagaaagttactgatacttgacaatcttttgttgttgttgttgttaagatggagtctcaccctgtcgcccaggctggaacccaaaggtgcaatcttagctcacggcaacctctgtctcctgggttcaaataattctcctgcctcagcctccccagtagctgggattacagatgcctgccaccacgcccagctaattttggtatttttagtagagatggggtttcaccatgttggccaggctggtcttgaactcctgaccttgtgatccacccactcggtctcccaaagtgctgggagtatctcactttggcccctatctagtaaaagcttatcaactaaaggttttaaataattgaaaatgctcagttaaataaatacagatgaaaccaactaatagactcgagaaaaagtcttcaaatgaatcctactcttggtcaaggacttcccctgttgggaattatcctgagaacaaaaatgtgcagaaagatttaacaacactcatttcagtgctgttcatgataataaaaaaattggatacaatctaggcactcagaggattaacaaagtagggtatcataccagattcctatgcagctgttaaaaatgagaacacagcaggacattaacaatcctgaaagatattaatgaaatagtgaagggaaatatacaagtcacaaaacacgaggtagaaacataactactttccttgcttccaatcttgcgctctataccctctatgacagtcagagtcatctttttttaaagttactcccaggcttaaaatggtttcctattgtctttggaatgaatttaaatgatatggtcatcctgctctggccctggcctatgtgtctagccccatcttctgtggttccctcttcacacctcctccccagcaacactgcacacctttctgttcttctttgaacacactctgctctgttttacttcagtgagtctgcacaaactttcccctttgcctgaaatgctcttccccaaaatactcacacagctggctccttctcaggtctcagcccagatgccacctctcagaaaggtttttcctctttgggaggtggaggcaggtagatcatttgagcccagaagtttgagaccagcctgagctacatgacgaaaccctactttacaaaatacaaaaattagctgggtgtggtggtgctcacctgtggtcccagctacttgggaggctgaggtgctcaaggaagaacccttgaggcaggaaggcagagattgtagtgagccatgatcgtgtcagcctgggtgacagagtgagaccctgtctcaaaaaaaaaaaaaaagaaagaaaggtttttcctggtatcagatcttaattgcccattgcctggtcactctttcacatcactgttttatttgcttcatggcatttaacaatctcagaaatggtctttatttaggtgttttcttgtttattatctacctccactcatgagaaagaaagctcaatgggagtagaggctttgctggatggtatacccataatgcccaaaactgtgcctggcacagagcagacactcagtggatgctaatggctatggtgagatgtttatgtatgtacacacagagtaatgcatacgtgtgcatctgcataaaagaaggacaataagagcacagcataaaagaatatctcaggatgttgagttttggatggttttaagttttttcattttgtttatattcattttttataacagtgtgttacttttgaaataaaaaataataaaccagttttttttcttttcccttttaaagaacatggtcattctaagaaaatggtgacaacagctggcttaaaactagaaccacaagatgccagaattagaaaagatcttagaggacatttggtccaatcccacctctcgtttcagcagaatgtgcaagaaactagtccagtgtatttttcactacactagtggttttcgaactttatgagcatgagaatttcctgaaggacttgtgaaaacacagaccactgggcctccccctgagaatttctgatgcggttggtctgaagcaacatcaagcctaagtcctgcgttctgacaagtcccagggttatgctggctgtgctggtcctgggctacactctgagatccactaggctatgccatattgcctcttacggctcccttagaaatgtcttgctctttctgtaggaatgatagtgattaaaataatcccccatgctaaggaaaaccctagctttcacacccccttccagaagttccaactgaaaaagaagggaagcaaacagggataagtaatttttgagagcctcctctcctccaggcattgtgcgggatggtctacattttacttgtttgtttaatcctttttactatagaaaatctaacctcagagaggttaaggaacttccctaagagcaaaccaccaggcagtgacagaatcagatttcaaatccaagtctatctgactataaagtttatgctcattctccaactttcagaatgaaaagctggtggcattcagagtggcaaatcaacatcttccagtgtagaaaaaaacacccttaagaaattgtaatacatcacgttgttaatggcactaaaagcatatacactgatattaacatccaatcatttctctgggtctgagggccaggtttattcattaacatgatattcagcaacttctaaccccaaaaccccagagtaaagatgatccaagttgatgcctggcttattattgcaagccttctgtgaagtaagtgggagagggggaatttatcatggatctcagcttccaacaaagggaagaatttgcacatgttctgtgcaaaaaggccctaataggctttgcaactgaacagaactgttccactctttgaagaactaagtttaaattcaaaggctaaaagccaaacacaaagatgggaatatatcatttaccatcttatgtcaaaagtaaactagaaactagttattgctccattcccatttactgaagaggacataaacaagggacagagaagtccgggtgacaaggtccccatgcctacaaatacccgtgcaaccaatgagttacaatttgtcctacgttttggtcacacacgaccacaagtttgagaaagtgctataaatattgagatcacaaaggggcttgataagaatctttttttttttttttttgagagggagtctcgttctgttgcccaggctggagtgcagtggcacgatctcggctcgttgcaacctctgcctcccggtttcaagcaattctcctgcctcagcctcccgagtagctggaactgcaggtgcgcgccaccatgcctggctaatttttgtatttttagtagagatggggtttggttatgttggccaggctggtcttgaactcctgacctcgtgatctgcccaccttggtctcccaaagtgctgggattataggcgtgagccaccgcgcctggccaagaatcttttacatcgtagttttgatcagaattccaaagaacaaggttaacaaaaatgtggcttcctctatctgtatccctgtatttcttactttacatcatgatttttctccacatgttttataacagatccctgaggcagctgtataaatgggttttacatgaaaataaaatgaaatactttgagtaattctggcgaccgcatcagagaaatgagggattcaactgagacagctcacgtgatcagtcccttcctgtgtcctgtgccaagggccctcggtgcctcttcttttggaagctcattttctaattgtgaccaaggaaactcctgtatatttggttagcaaagacagccagtggagaccctgaaaggaagataagtgggaaagaaggaacagagcagagtaaatgcaaaaaaggacaagaggatcccagagatcggtaccagcactgtgaaaatctgattccaatggtaactttgctccaaacacaattatgaatatgtttaagatctggagtgactgtggtctccttggtgcagcaaatcagtaaggtggaccacattcacggcccctcatttgttaatgtctgaaaagatctggctctcttactcccaataaaatgcaaaggatttcatttattatagaaaaaaagtggcctgaaagatcttgcagaatgaaccctgggtctccaagccgatgagctgtctttgcagtcagcttctgacttaggcatctcacatgggacatgagattggaccgcacagtattacgtatgagcaaattctctttctgctcccaactcttgcccttcatgaatagctggagaagagccatcttgccttccccagaggaatgatgcagctgcagctgcaaatgcagcttcagcagccgttatcctactgttaaatgtttgcttttaaatattacattggcccagcaaaaatagctgtctcgtcttagcactggggacaaagcttcatatctgcgttagggcccacacctgtgtcctagcagagatttcagaaaaggcattctctaatttctctctggatggacagtgacttattccttaagtttcataacatatatttctgcagtggatggctgctcttgattctcacagatttcacagtggccttcagcctgcagtggtttatgcagaagacaaaagaatagctacttggcagataatactcttcaggccttagggagggcactcagctggaaagatctgtttttgctggagatcggaagtgcttttccagcaattatttgatctttcctgggaacttgttctttggaacaatctcccagtctggtgggaacacatggactcctattctggtcccagcattatcactaaccagatgtgtaactttggaaaaatcatcaggcttttactacacgtcagttatctcatttgcctggtgggaatgatgatccatcccctgcttaattaatgagatttttgtaaagataaaacaaagtggtatatgcaaaggtatttagaaaattttcctagtgaggaaaaaacccccaaaatacaaatatcacctaacaataaatatgctttttatatcattagtggtaagttttcattttttctcttagaattaggtaggaatacccttatgcagaggagaggtagaaagtacaaccccggcaaagaatattgtcatgttctccttattgcttggaaaaataaagcaaggaaagtgggactggaatactttaacatccgcccagaaaaatctgcttttgctagggccacacaacattctggttcttatttgtctcctctttggtggtcccacaaagaaggctactgctgcagtgttgaatgaatgagtgagtgagtgaatgaatctatccatccatccacctacccacccattcacccatcattcatgggcaaatactatgtatccaagcagtgtgcacaaaatacagacgcgaatgccatctctttcactgaagggtgtccagcccatgggagaaggcagacaaggaaaggacctgttctctccaatgtagtaagcctgcttgcctgaagaaacacatacagtgttcttgaagcttgggcatgtgactcatccctcctgcaaaagctgggatgggttctcagaggatgggcatctgagtggggcctgtgggaaggactggtgaaaaagggggtgcgcaaggggatgggcagggtgctttgcaggctgcagaacagctcttacaaaggcatggattcaggagagaggagcatgccagggagcagctttgtttggtgtgacacaagccaagaatgagcgaatgcaggtaactagagagttaagcagggcccaaatgtgaaggagggagcaggccactgtagtttctgagcaagagttgcacaatggatttgtatttcagaaacagtgcttaacaacaggcagcatgttctggagggagaaggtgagcaggtaagtgaaagatttaaaatttgatgtaaacatctgcacattgcaacacagaacactttacaaaacatcctggcttaagagcattctcttccaaattctgaattaacacagcccacaatacactggggagtgaatacacttataccttccaaaaaaatgccttcagtaatgtttcccctgtgcaacttatacaacattgatttcccatgtaactctgggataatctcctgggaaaaggaaggcactgtatgtttctcaaatgtgggtgaccactgtgtattgcagcaccaggaagagtctgaaaggaacccacgtacctggtacaaaaagatggtgatagtgatacctggtagctgtctttcaagaaaatagttcataagtgaaagagaatttctaataatttgaggaggtttagcaaggcgtgtggattttttagttccctcttcttttttttaaagtttaggcataatttatccacagtgcaatgtataaacagatttaagtttacagttcaatgagttctgacaaacgtatatacctgtataatctaaacccccatcaagatctagaacattttcatcaccctagaaagatgcactggggtccctttgtagtcaattccatcccaggcaaacacggttgtgatttctaccacgacagattagttttctctggtctagggtttcatataaaggtaatcatacagtatgtattctttgtgtctacttattttatgtggcaagtttttgacatttgtccatgatattgtatattcagtagtttattgctgctgagtggcatagtagtttttattgctttatccattatagtagcttttattgcctagtagtattccatggtatgaatataccactacttagtagctttttaacagttctctcttttgctaaataaagtatgcaactgcctactcatggcaaagcaaaaaagaaaaggcatgggtgtgtaagttctggtgaagtcaccaactattctctatgctatcaggcattaaggttatgagtggcttcatctttagaatcctccaacagcaacaagggctaaaacgtcaggtaaattaggacaaacagagagagggtagagggagggaggcagggagagaaaggaaggggggaaggaagagagagagagaatgagagacagagagagagagagaatcccttatattgtcttagtgctatatatttggatcacaggagcagataacacacagccctcaaaagagagacgctaatttactgagaatttatgtactcaatataaatggttaggtacataatttagataactaaaatattctttaaaaaattaaaatgtgtccacagaaacctacacatggcctgggattctacattgtttttccctgtaactgtcaatactctcttgtccaagtagcactttagtaagtagattaagagagtccagcagtgaaaggaagtggctcaaaagcattttcagaattcaccagtttcctatgagatacttgcacccatgagtgtcaggtagctacttggtgtgatttttgttatattcaaccaagagataatacctggaagcttcaaggaaagcagatgaggtcttgctgaaagggcttattaagcagagccaagaggcaagtcaaggaaagaagggagttaaagtctcacagtgtaaaaactccatttccttactctgtggaactgtttaaagcagcatcacaaaataaacaaaataacatctaaaaagtgtattctgtcttctcctgcgcagctgtcacaatttactatgaaaaccagacatgaacgtgttctgatgacttgaaacacattatttgggtcagctcctccccctgacattatacactgcctgtcctctgaagtgaactagtcgctttgactccagcattcccctatcattggaagtgatgttggtttgcatggctatgctaaagacacaatggaaacgaaaagctctcagccctgggtggagccggattcaattccaagaataatgcagatagtgtccttaaaaaaagctggcaggcttcctttccatttttcgcaccagatatacctatttgctatttttctgaagcaatttaatatttgttgagcatcaacgatatgtcagatcccatgcttcatgcttcattcttacgaatctccaggataggcactattattgttcctgcttcaaagatgaggaaaataaaacagcctcagcgtctatactcattcattactattccatgtgtttccttccctcagccagttggaagtggaggttgggagctgtgaaatatgaggcacatagaaagcaagatgaagacatagaaagcaaaatgactttcctctttgatctccttccttacatattttaacattacattctgtaattaggtcaaagcgagacatacccgtgttgtgagctacagctgaagtttaacaattatttcttagaagattgttaattagactgacttggggaataggttttggaatacacattcattctgatagcagttatagcacaagacatctcataaataaaagccatttagaacattatccacaggaaacggctgcagctggtaagggaacttttgacattaaggaaatgcagaacttcatggaattagatgaagacaggaatattgtatcacagaatgacgctatcttagcaggagctggaccatgttttcaacagacacactcattttatagcagttcatgcttgctcacctctctgggttttcaggagacatgcatggcgtatcaagagcaaaaattcaaagaaatgggaactagtactcagagacatttttgatctcaagggttaggggcctgtggtttggtgtagagcttggacctgttcatccatatagacctgtgctaatagggtaagcaagcactaaccacatgtggctggttcaagatgagatgtaatgtaagtataaagcatataaccaggtttcaaagacagcatgaaaaaagaatgtaaaatgtttaataaattttaaaatatgattacatgttgaaatgataatattttacacaggtcgtcttaaatttaaaaatattaacattactttcatgtgtttctttttgctttttaaatgtggctactcggtaatttaaaattaattacctgtgttgcctgcatttgtagtttgttctaagtctatgggaaaggaccggtatactcagtaattgaaaagattaatccaaattgaagatttggtgcatttgatcaaaagtggcaaaccaactgcactgcaatatgtttcctaggaggtgaataaaatgactgaacagaaacatgcattctaccctgacctgctggttacctaaggtaaaccactcactcttcctgggcctcagtcactataatggttcatccagatcatctcggacacttcttctagtgctgacatttggaatctgtggcaaattccttagggcaggtaaatcatgagtgaaggtgaactttaaaaaaaccttaatatttgctcaatattcatagccccaaatattgcctgctgatctctcacatgtgacatgcctttaagtctctctggagcaacagctaaaattgaatggcaatgataatcatgtttatgatacacagactgagctgccctacggaaaagaggatgcttgctctatgtaccccaatgagtgggttttacttgacaagattatattagtaattggtaattacttttgcaccagccgaatacttctaagatggaaaaacttaaatgcaccttaataatccaacaaaagcttattaaaacatgaacacaaaatattctaaaatatcctcccctgagggagggagaacagaacctggtcctcttttagttcaggttctaccctatttcttttcatgttcaaagcatgtaattatctgctagaagttattctgcatctcccaggcaaattatatactttttgcatgattgtagagtttctcctttttcttttccttaaaaggtaaaaaacttaaatgtagataacacaattataatagggtaaaactttcagcacaatgctagataaaaacaaatattttaaataaatatatgttcaaaatatatgttcaaaatctgtgtgtggaaacaaatatggaattaagaaatgacagggataaatgacctacatgatggaaaactcgcttatgatggagacctctaggaagactgcatgatttctcctggaaaaaaaaaaaatcccataatttgcatccccacatctgtagaatttccctgttacatccagtttaagtctgacatctttaacttctgatccaagagtgacagcatgtacaactgctactaacatatatgtccgttttgaagtagctcctgcctttatgtacttggctccagattccttccattctgactttctgcaacataaccgatacagtttgcatgtatgtctccgtccaaatctcatgtcgaattataatccccaactttggaggtgaggcctggtgggaggtaattgggtcatgggggtagtttctcatgaatggtttagcaccatcctccttggtactgtcctcatgacagtgagttcttgtgagatctggttgtttaaaagtgggtagcacctttctcctagccctctctcctgctcccaccatgtgagatgcctcgcttcccctttgccttccgccatgattggaagcttccggaggcctccctggaagcagaagccgctatgcttcctgtacaacctgcagaaccacgagccaattatacctcttttctttataaattactcagtctcaggtatttctttacagtaatgtgagaatgaattaatacaatgaccataaatgcctgtaatagaggtaaccaagtaaatatttgttgagaaaagaaattttagggatgcaggctcttcctctctcctcctttcctcattttcttccctcctttcctttctttgttggccagaccacctagattcatgccagtacaattcatgtcatttttttttttttttttttactaacattgaaggcaagttgggaaattttgactgaattgctgaaacaaagggcatgcgttcccgccattccatacttctaaggaacttattttaaaaagcaagaaaggggcagcaaagtcacagaacaatgaaaggacacaatggccaccttcacttttgttgagactggagagatgggagtcgtagacatgaatgagtgcaagcctcagtgggtctattgtgcaaaataagttttacttgaaaatggaaaaaatgaccctgcatttctctttgccattatctacagagtcacactggaaaaaaacaccaagagaagcaaagcaaaaagaatagtttctattggcctttccttggcattgtatacttttattcctttattcttttcttgctcaacctcattcccaactattttactattttgggggcactggggacagaacttctgggaaacataacacgcattagtccatttgttttctctgtgaattcttttcagcatctttgtgtagcaacaggaaggatgtgggctccctttcagattcaaatgaggcaaatcagccctggctcaggttgacaacatcatgtttatgttacactgtggcctcagaacgccagaactgctgtctctaggtagaatggccattttgtcctggggcttaatgtctatttttaacatcagatccctagcccatgtctcacaaaaacaacaaacaattaacaacaaaaaccccccaaaactgctgacacagtataactacagcatactattttattaagagaattctgagttttagagttgaaaagatcagtgttttcaaggtattcagagatattttaaatcatataggacagatgtgcagaagtggcagtgtctccattcaaattctttctttttttttttgagacagcatcttgctcggtcatctaggctggagtgcagtggcacaatcacagctccctgcagcctcaacctcctgggctcaagctatccttctacctacgcctcccagtacctgggactacagttgtgcaccaccacatgtaaataatctttttttttggtagaaacaaggtctcactatgttgcccaggctggtgttgaactcctgagctcaagcaaccctcttgcctcggcctctcaaagtgctgggattacaggcatgagccaccatgcttagcttcagatatttcttaagcttttagaatgtggtaggaaaatcctaccatgtatttttctcagatttatattcctaagcatgtaaatcaaggagtaataaatttataatataaacaaatataagactttattttataaaactggatgtttattactaaggcttctaccaaaagttcaaagcaaaaccatggaagagaatgtggagtggtgctagacaaatatgttaatactgaatttgggaactgagtctattattaattctattagtccaacttcgtgatcttggcaagttatttatcctctcttaaacctcaactccatccattcctccatctatccatctacccatgatccatccaacaaatacatcctctctactaaatgctcagcccttggtgaattaaaaagatgaataagctatcagcccactggagcagcttttgataaaacaagtgtacaaataattctatgcaagacaattgtcagttggaagttgtagggtgctaacaggagcttagtggaaaaagaagtcacttccaatggagagatcagtcaaggctccattgaggagagacattttgttgtttgagaaagaagcaagatttctaaatctagagcagggttgagacattcctggccacaggaaaagccagggcaaagatgggcatcagggaggcatggaagacatttagggaagagtgacaagtccaccaggtggaatagggtctgagtggggaggcagtggctcctctgatcaggcaagcagccaagagaggacttggactgaatttggagctcagaggggaggctctgaagagttctaagcaagaatgacacttggtctggcagctccatgcagaatggctctgccacaaaagcacctgaaagatgctaggaagaagttttagcagtccagttcagtgttaataatcttgctttaggagggtggtggtgagggtgggatggagggatagacagggctgtgaactggtggaatggaactgggcacttacttatctctaatattcaagcttccacattctagtatttgacagtttagtgtaagtgggggaaattaacttgaatgcccccaaaatagaggcaaaaatagctttggataaaatttagtcccatttctatatatattgaaatctcaatatcaattagtcttacagaaaaaactggtcttgcagaagaagtgtcaaggcatgatatatgaaagacaagctgtatttaggtaaacctactaaagtgttttagcatttggtctgatcctccatacaggatgctttcataggaggaatagtcatgccactttctattttgacaggggtcagagaagtgtggttctttacagatttcagtaatgcattatccaaaaaggcctctcataatacctttgggaataagataggaaaatgtgggctagatactagaacaatgaagtgaattataatatttaagtggggctgattggtgagctcaggtccacctagaaggtggtctcaggaggcctaaaatggggctctgagctcttcaaaaacttgtcaacatcttagatgaagatattgaaaatttgtatggtgaaatattcagatggaacaaacttttgaagggacaggagtgacaatctcaagatataaaaatatcttggtaggctggagtattaggccacaactgacatgataaaattagtaaggacaaatgtgagggcctaaaccaaaaaaaaaaaaaagttgcctaagtacaggacggtggacatgtggtttagcagcagcatgtgtaaaaacaatttgtggggaagtgttagctgaaagtaatttcaatttaagtcaattgtttgacatggctgcttaaaagtgtgatctaatgtggtatttactgaaatacagcattagctccggcctcacttaagttgggattccagaaacactgagaaacacaggtgcttttgatataaacatgttgggtatagttgcttaacaaaccaagctcagcttaaccagagagaagttttgctggtcatcatggaggccctgcccttagccagactgagctagggaggttagtaggaagaaacagtgaaggactcaccaaactagaagctacacttacccattctatccattctagtaagactgaactttgatttttttaaatgcaatgataataaaattttaggcagcaagagacagagcccggtcagaaggacaatactgttcctctattccttatcaaattcaatgctaggcaatatgaagatatttcttttatcgtctgtctgaatgtggaactcttctactgtctgaatatttctgggccccaagttggggtttactttcttgatggttgggaagaatcatttgggtgaggggtactgtgcccatgacccacagccaactcccggcatgcacagtagggcacctctcccacggggaaggaggtcttcgcaaaccttttactacctttcttcaatgtataaactgtgatctctggaactttcagacataacacttacctcatgtcggcaaatgagaagcaagtttctccttattctctattagaaacatagaaagcaagccagcataatttctaaaccaagttggatctttctttaaaaaacaggaaatttgttgctatgcgttgttttccttccttgagcagtatgctgtttatcttcaggaaaaggatcacacagatcctggtgtacatgcttatgaacaacaggcaagggttacagtcgctcattctcatttgctttccttgagggagagaaatcgtatgatgggttcagttggttttggccttaatatacagtagtttcctgagaggcttccttaataggtgcccactaaaacattccttaacacaaacacacaaacacacacacaacctgagtgtgtgtgtataatctgacagtctctcaaagcatgaccacacagaatttagaacttgttaacagtaatacgatgttaaaaggactcgaaattctgttgagaaaaactaatacaaacactggaaattgttgtgcttagacaagaaaatttaagctgttttttttttttttttaaagaacggatgggttgtatatggcagaatttcttcttaggatttgtttctaataatgagaatgtcccaaagatggtaaagaatatcttgacaatagagatttcttggcagaatttggatgaacaaatactggctggactagatgagctttaaggctccttcaagcacaggaaaatcatagctatatgattttgatactttttttgtttttctaaaatagcccatagtgtggatgctaacaaggtaatctggaaacaaatgccttgagacaagggcttctgagaaactggattcatagctgcttagaagccaaaataaaaaaaaccagtattttgagggaaactggataatgccaatggaaagttctttaatgttcttcctggaaaatggttataaccatttataaagcaaatcatcagaattttaagggcaaagtgacacatacagtgagagattttaataacacctctcttgaagagattgacagattaataaggatatagaagatgtgagcaacagaatgaagagatttaatctaatgggcatatttagaactctgtccccacagcccccatcggagaatatgcactaaagaaattcacggaatatttaaaaagaattgaccatgtcctaggccacaaaccaagtctcaatgcattttgtggaaatagtatcatacaaacaacattcccagaccacaacagattttttaagttagaaatccgtaacaaaatgattactaaagactctcattcatttgggaattcaaaatgatgctgctaataaaactcatgaatcaaagaagaaataattatggtaattacaacattcttataactgagtgatgataaaaatactccatattagaatatatcagatttcactacagttttatttagaataaaatacttaaatcttgtcctagaaagaaaaaaggactgagaattaatgaacaagtatccaactcaggaagtcagaaagtaaataagagtacatccaaagaaagcagaagaagaaaataataaagggtagaaattaaaatcagaaaacaaagatacactagagaagatgaacaaaggaaaagctatttatttggaaagactaataagagccaaatctgatcaagaaaaatacagagatgttacaaataataacattaggaatgaatgagagaacataactacagattcagcaaggattaaataacagcacactactatgaagaaatatgtgccattaagtttgaaaatttcaatgaaatgaagaatatcacagaaaaattcaaattattattctaacaagacagaaacctgaatagtctaataacctttaaaaaactgattcattagttaaaaagcttctcatccttccacccaaaaaaatccaaaaaccaataaacactaggttcagatggttttagagaaaaaaaagtaaaaaaaaaatctgtgttttagatcaaaaccaaaaaaaaatgcaggagatagaaaatggaaaagcactaggactatctcagaaccaaatccaagatggtaggaaaaaggaaaattatggaccactctcagatataaatacaaatgtaaaaatcctaaataaaatatcagcaaacagaacccaacaatgcataaaatatatcacgactaatgtggatttttgctaataatgcaaggatgatttaactttaaaaaatggatgacaataattcctgtactatccgattaaaagagaaaaccccaatgatcttatcaatagatacagaaaaggcactcagtaataattaacacatttataattttttaaaatagaaacttttagcaaactaggatcagaaggggactttcataatctaatagaaagtatttaccaaaacccagcagtaagcaccatactcaatggtgaaatgctaacagccttccctttaaaatcagtaacaagctaaggatctgtgctatccctacttcctatccccgctatccctacttcctatcccctgtgctatttcctgcaggtcctagccagagtggtaggaaaagaaaaaataaatatataaaagataaaagattgaaaaagaacaaaaacttgtaattatttatagatggtatgtctgttacacagaaaaactaagagaatacagataaattattagaattgataagaggtttcagcaaacggctaagtattagtttaatatgaaaaattttatttctatccacgagcaacagtaagacaaagttattttaaaaaattgagcactgtgcttatatttcttgaccttcatctcctgctcttcaacaggcacctcaaccagataagcacaggataataaaaaaatttaagacaaacaagtaacctaattatattgtaaaactctgagaggcagggagtataatttcatggaagacctacaggattcctctctattctattcccatggaaaaatttcacttaaaaaaatgaggcgttgtagatggggttactttgaactgtggtgaatcacacttattcactggaaagacacataagcaggaagtccaggcctctgcaaatcaaactctgcctaaaaggaaaaatatggctgataccttctcttctacacagcttacaataaagtcagcaggaagtggccctccaaaatggcatcccacatcaggaaggagatggatgctatgaagggagacattggtcaagaggtaggcaaagctcttaagaaagctcttgaatgcttggttcttcatttacatgaagataatagggagagttacttctgttgaaatttcactacaacaaaacacaggatgtcatttaaattctaagaacttcttgatccaattgcgttccctgtactcttactgtatatccaggtatgtccatcggcatgggggcctggtcagctcatgtttttaacagtcttagagaaggaaactatggcacatacgatttcttttttccacagaggggttgacttattaccatttttaatgaagtgacaaaaaaaatgagataaaagggtagagaatgttctatattcacgtggatcttgctggacaactcactcaataaaaacatggttatctgaaaacactagattctgatgttgtttttaaaaatatgttaaaagcctaactcactggaaacatcaaaataagcaaagatagtagactgattttctgtttgattaaatatagtacatacctataatggaatagtatatagcactaaaatcatattgcaacataaatttagtgactaaaaaatattcacggtgcactgctaagttaaaacaaagtaggatataaaacattaagtccaatttgaaaccatgttttaaacattcctaaatttgcaccgggaaaggacattcaacaaaatactaatgatgtgcgtgactatctctgtgtgatgggttaataggtgacttttgttttgttctgtatctttaagtactttacactaggggtgtatattaatgtggacgttatttaaaaaaatccaccataatgaaaatgcctagaattcacatcatatacatttttggtggtcaccaaaacattcacaaaccaagtatagtttcatggcagtgaaaatacccaacaaaagccaagtgtcctgctgattgttagactggaggacgaccttttctcctgaactcctgttctccactgggcatttgccctggggcatggctcagtgcccccaggagacactgaaatggctcagtgccatcccaacaagatgtttccttcctttggcttactctcataccatcagcgggggacagtgcagactgcagcccagcatttaggacggcaggacaggaatgaaaattctgggcatgaacaaagctccacttaccacctccagaacgccgcttctctgattagcaactttctccgatctgaagcgtggcttcccagccttccacaccagtggcctatatcttttccaccaatctcccactgcccctcacacactctccagccaggatggaatgcacctccacataactgtccatgcagttcccacatcttgtccaccggccaggcccatgcgagtcttacccttcacgtaagcctcccttctcagctcctcagacctgcgctggtctccccctctctcagctccttggcttatacccaacacttgatcatttgcaggtgagacagtcacattgtttaactgtttcctgtgcatggcagggtctggtaagggttggggccaagaatctctttgattcttcccattgccttcttctggcttctggcacaggtctacaatatagtaggttctcaaaaccagaacatagatcttttaaggtggagtgatttcactggcacttttcctgacaatgattttgtcagcaatctcttccttctggtctgcctgtctgcctctctttttatgcttgtctcatccttaagagcaaagaatggcatttttcctgctcactcttctcagctcataaacaaatggcttcctctctactccagccctcgtgcagtggtgctaaccgaacggaggctgtccacaacggtgctgggtcctctcgcctgctcactcccaggcacccaggcactcggtgcccattctcatcaaggactgtggatcttttggttccccccctaggggttcttgcccttcaggactttggtgggctatgttccacattcatttactcacccactcattcagcacctagttccttagtgccttctgtgtgccaggcactgttatgtaaactcactgttgtatgtcttgtctccccacctacattgaaagctccccgacggcaacgattatctgctacgattatttaattgtcaccagagaatctaacactgtgttcagaaagtgaaaaatatttacctgactgaaaggagaaggagaaaaggaataaagcagaaagcttcagttttcattcgattattctctccgctgtggtttgactagagatggcgtaaaaagataaggcaaaactttgactctagcagactgagtacagccttcatttttttttttttctgggcctctgtccagaccaaatgagacagtgacgtatgtgaaaacattctttacgttgcagaatattttacaaatatgaagtgtcatcatcatcacgatatgcgtcacccataccgtactgtgaaaagtttgattccaaacaataagcaaccaaatcaccccattttgcaagctcctgcaaccagcagcataatacagccagaaaaaaaagctgacagcctgacaaaacccaaatggaaaattaaaatgagcaagaacagccacacacccaaagagagagcaaacccgcactgcttggaggaggaaatcctctaattgcctccacactcctgctcgcttccatctgcttgcatttaaggaaacccaactactgggctcctcgcagctgtagagaaaaagataggcatcctaagtgcctggatggctgcagcaggcagggaccgacaagaggacagaagatccacaggcaaggctcaacagcacatctaaaaacaaatttaatgtgtgttatgcaaaatggcaaaccagctcccctggctgtgaggtcacatgaaataataacggaactccttctcaggagaaaggcagcagtggcgtgtgtgggcaggaatgctgcagcgcgctcctcacacaaagaagcccatgggcctcccctcaagctgggagttgcacggagcccaggctgcaattaggtttcttgtggggaagtgactggagacataggcacccatgttcctcactgtggggtaactaaatcgcctttggcaaaacttcttaagtgcaattatagtttttagaaatgccaaccttttgattccagtctcactttgaccatttctcccctgctcttcctatctgaatctcaccagtcccattctccagtctgccctcggccttctccctttctggactgctgaccacctatgctcaggaccttactgtgcctccataatcagagggatcccctaaggtgcaaccaaattgtataatttaaaaaactccacatcttggagagcaggcagttcattgtgagatgatgaaactgtggtgcagagatgcaaagacacaagatgtgttcacatcaccagccagtggcagggacagggcctgacagcagatatctacaactcaacatacataatacagaaaaaggacactagcacttggtggcacttgttacaagccagagactaggcagggagccttcacattctttatctgagtccaaacctgacattaatcctgtgagctggactaagaagttaagccactttcccaaaatcttgcagccagtaatgatgccgatgagattcattcccaggtctgattgcaaagcctgttcttccttctagcctgtactgccaaaagatttcagggtgaaggaagctgatggagtagttaactcatgagatgggttcctctttgtggctgtatacctgctcgtggtctagtgaaaggagaacagttaatgaatggtatgaatggcagtgcactggaattctggaagatgaagctggaaatcagtaggaaaggttgttattgaaaatgccttggtttcctggtgtgaccatagttttataatttgtggggaccctggaagattctagagaggtgggctttgtatctccaagtggctccctcctccacagcagtctaaaaccagaagggcagagccttccggggcgacaaccacttggcttcaagcactgaagggtggagtggatgctgccatggcaggcaagcttaggaggaagaacagtggctgctgggacctccaggacgctctgcagggttgtgaaagggggctgctagctgcttgcccagggtctccttgtacttttagcaaaaaaaatgctctcgagaatcccctggacaggctatctgcatccaatcatcattcccaatgctgagactgctcagcaatccctggtcagctcaccgtcaaagcaggacctgcattacatcatggaggagtgtgggtggctcgatgttttttatgtgaagaaattggttatgcccttccgtgagaaggaacagcttcaacacgtaggctgtgtgtatgcaaaatgttcctttgggtaaatggtaaaaagaaatcatcatggaatcctatctaagtggcttgaactggaaaaaataacttgttcattttatctggctctggctttccacgagcagcagcggtgaggaagcttcctgagctgttggccacagctgggggccaccctgggagaggctttgcttctgcatctggttttctcagttccctaagacctcaccagttaatgctcattacttatacctctaagtaatgtctattttattgtaaacgataataaaattctaagccccccaagtgactaagtggaccctcctcttgaccatggggatccaaagaaacctggaaaactagttcaggccatgaagggaaggtgggggtcagatatgccttgttataccctcctccctttggagttcaggcacaactggctggcatgaacattaaaacagagaccctaaggctgacagaacagactcttatagcaatatgatactaactccaacctgacactagcataacatcacatgacagataacaggccctaaaaggaaatcaaagtattttaccctaacatatatttccctgatgtattttgaaatggccctgcaaagctgtgtctcttgtgggggaagtctgcatgcaggggtgtccaaccttttgtcttccctgggccacactggaagaactgccttgggccacacataaaatatactaatgataggtgatgagcttaaaaaaaaaaaaagtccttgcataatttttgtgatatctgccacctgccaccacaggtaactaaaaaagtcctcgcattcaaatggctggacacgggtgagaatctccttcccttactaggtctcttctgtgactctgactcctttgataagagacatttacatttatgctctccaaagccttcttcttggaggtttcatccacatgacaagaatctttatctttcaggccccctgaccccacttacctcaactgatttcaactcttcaggcaaagcttaattctttgaaccgattgtcaatctggaaatatttaaatctacctatgacctagaagtcaccccctccttcacctcctggacacacactgccttcgagatgtccagccttgctagccaaaccaatgtataccttacatgtgtgggtttctgtctttgtaacttctgtttctataaaatgtataaaatcaagctgtaacccagccaccctgggtacctgttcctcaggaccccctgaagctatgtcatgggtcatgttccttaaccttggcaaaataaacttctaaattgattgaaacctgtctcagatactttttggcttacactttactatttttaaggtttactatttttaaggtcaaaattcaaccaagtctcaaagctctctctttggagcggatatcaacaggataggtatctgaaaatagcttgtttgtcttgtccactgcttgagagttaagacaaagtttgcttttgttggaaaccttccaacattttattgtgaacaatttcaaacatagttttcataattttacactgaatatccatatacttaccacccagctttaaacattaatattataacatacgtgctttatcaaatagctatgcatctattcatgctacaaaacttttaactatacattttttcatgcattttatttttctgaagtgtagcttagggggaaaagcatgcttttcaaacatgagtgtgaatgcttgcttgagcacttactagctgggagactttgggcaggtgtgtaatttcttagagcttcagtttccattgttataaaatgtgggtaacaatgcctatgggtgctgtgcagattaaatgcaataaggtgtgggaagtgccttgcacacagtcaattcaatatgcagtaggaacacataaccaattttcagcgctcaggctatgctatctatgaaacaaaattgaattggtcaaaaataatgacaacaattatccagctataggtgaagcaagaatggcagaatgttgatgatcactgttggagctgggtgaggttgcagggagtccagtaggctacactgtttactttctatacatttgaaattttccataaaaaaaaatgaataaaatgttaaaaaagaaaattggtcactggattttgtcaagcaaaaaaaaaaaaaaaagaaaagaaaaaaaaagaaagaaagaaaaaagaaaaaagcgatttgaaatatttaataagaaacctctgaggaagtaataagaagtagtgatactggggttactggtgcagggttgggggccccacatctcactctcacggctgtggggcagcatggggaggaggaaggacaagccttgggtattttgtaaaagctccccaggtgatctggttcactcctgagtgagaactcctgtgccggcagaaaagtgtgaaaccacactttccagcatattaattgtgagaataagtactttgcataatgcaaagcttgtgcctctagctaatttgcaggcagatgacacagcgtgagaagcctctgatttagtagaataagaactatttgtaaccaaacagcctccctctgttaagtcaggggtaggttaaccaaggacctaattagagtgcattctcccacgtcacttatcaactgtcttaactcgtagagctaaggggttcctttagtgctttcagaattgggaatctggagaaaggtggaagaaaaaaaaccccatggacaatgttaaacagaagtaaaaggaaagatgctcttttaaaaaacaaaatgtcaccctcctgttctagttcctgaattccttcccttccctgctgtggctcattctctcttgttcccctttgctggcagctggaggcaggagggtgctctgatggaaccgctgggtgagaaaatatgtgtctggagccctctcggtggggccgaagcagcgtctttgtgggctgggatcatgcggaggcagctagagtaggcaggccaagctgggccaccgcaagggagcaaggccatttgctatcctgtgggtttcctgaatgaggccaggaacgaatgcttgtaacagaggagacctgcacacagggtgtgtgcacacatgagcacacacactctcagaggatcagaagaatttttatacctatgtgtgatggactgaattgtgtcccctcaaatgcatgtgttgaagccctaacccccaatgtaactgtatttggagaagggggccttaaaggaggttgatgaaaaataagttcaaagaggtagggccctgatccaatagggctggtcttcttataggaaggggaagagacagcaggggaacttgcagagagaaaaaggccatgtggggacaccagagacagtggccatctgcaagacgaggagggaggctcaccagaccctggccctgcctgcaccatgaacttggactttcagtctccagactatgagaaaatatgattctgttgttgaagccacccaggcctttcccctgacataaatgcccacctggaaggaacctttacctatttctctggcgtgtgttatctatgaatatgttctaagacttattcataacacttcagttatttttaagcacctatgatgaaaaagacacagtactggacacagaggtgaattttctagcctgatggactaggaagaagtgacacttaagatgagccttgctggataagcagagactgactagaaattaaaaaaaaaaaaaaaagatccttgcagcagattagacttagactctaagcgacagcaggaaggcatcccaagaggttagaaaatgagtgttcaaagccctccaagggcacagagatggtttggttttgctacaggatcacatttgaagtgaaagagttagatgtgttaaagaggtgggttggacagacagatcataaaaggcctcagatgccaggttaaggtgtttaggcctttcttgggggaataacaggagccttgagaagttctgaaacaagagaatgacaagattgatatatgtgtaaaaagggaaaagtgaagagacatgacacagagtaagcacttatgagtgtcaggcatcatgtcagcaccacacttcttctcttttaatcctcaaaacaataccattttggacatgagaaagttgagtcacagcagggtggtcacttgcccaagaccccacagctggtcagcaatggagctcagatgcaagcacatgcccagtagcaaagttaatgccctgcccttcctgccatttaacctcaagctcacctcccacaccatcatctattttcctcccagtcagaatggctatcttaacagagcctggaatgtacattgcttttagggttggaaagcaggcagattaaccacaaaaaatttccaatgcacagggcacctctagaaatatcattcagccttctaaacaaagccatatgtaaaccagctcttgctgtctatattagtccattctcacactgctaataaagacatacatgagactggataatttgtgaaggacagaggttaaattgactcacagttaagcatggctgggaaggcctcaggaaacttacaatcatggcagaaggggaagcaatcacatccttcctcacgtgatggcaggaaggagaattgccaagcaaagagggaaaagccccttataaaaccatcaaatctcgtgagaactcacttactatcacgaaaacagcagcacgggggtaactgcccctaagattcaattacttcccaccgggtccctcccatgacatgtggggattatggaaactacaattcaagatgagatctgggtgatgacacagccaaatcatataatgtcttttcctatcacaacacagtcaaagggtcaagttgggaattctcctattgtgtcctacaatatcaaagtaaccaatgatcataatttacacataaagctgcaaaaatatataggggatatagttgtcctaggtaagcagccaccccaacatcgactatatttttaatgcaatataaacagctgctctcaaataacctctgctccccaaatccaacaagatcacccagtatccaggaaaatacaatgctgttttctgtgtctacctttaaatgacaaagtaagtcatgctatgatcatttgatcttttgacatagctgctcttctaaaacttcaggtatattgaaaaacaagagtaaaaatcaggtaagaaagagttaattcccttaatatataaaaatcaaaacataccatgccagtagaataattcacattttcttaaatgtgctctccttcaagggcaaagatttttggtattttggaagcaatacttacaaagataacttgggcactatttttttatttttcttttagatgaagtctcgctctgttgcccaggctggagtgcagtggcgcaatctcagctcactgcaacctctgcctcccgggttcaagtgattctcctgtctcagcctccgagtagctgggactacaggcatgcaccaccacacccagctaattttttgtatttttagtagagatggggtttcaccatgtcagccaggatggtctcgatctcctgaccttgtgatccacccaccttggcctcccaaagtgctgggattacaggcatgggtcaccctgcctggcccttaggtgctatcttgaaaattacgtgtgtactctaagatacaattgtggctaatggtttgttagaagagagacaaaactgctaaaagcatcacttctattctggcacctactgtgtgccagcactgagacctgtgctgggactagatagatcaggataagcaaactgaatcacatcaggggttgttaaaatccccttaaaactaatgagggtgtaaaaacttttttttgacgttagaatcaaattctgagagctactcctttgaaaaacaggcagcacacttttcacttccttgcctactcacacctcaggaatcacgtgctgtggcttttctataaaattttcacaacacagcctatctcttctaccttcaaaaagcaggggggtggaagtgggaatatgtgcatgtatgtgtgtgtgcacacatgcgtgtatgtggttgttggggattcctccctttttgctctatagatatacttttcacactgtggcataattgttggatatggttcttatccattaaacaaactccttcgaggtatatgctgtgtctggatgtatctctgttttcccagactaggaacaatgcccagcactgttccttacatgtttactgagtgaatgaatgattgtttcaactgtgagtttgtcttcagactccagaacgtttgacagtcaatatactcctcatggtagggaaagtcaaaactttcaaaaatttatatgcatgtgtacaaacagatttcaggacaagcttattgaggtgtaatttgtatacagtaaaattctccctaagtattgataagtggatacaattgagtaagagcaggtggttcctacacacttgccagggccctgttctccgggactccgaatgaatggagggacagtggggcctgggaacctggatttttaatatcatctcaggtaattctggtaaaaaccccaggtcaagagtccctgaagcagatgatgctctgccactatattttatatttcctttccttttctcatccccaggcccatccatcactctcagtcaactattaatattgaggatgaaaccaaaacatttctgctcagcaccatacttggaaacaaaatctaggtactcagccacttggctggagtcaactataatttctggttatttagcagaaatacagctgctaaatgacattttgaaatgaacatgagatatccacttaaagaaatgaaaaggctttgaatcagcatgggataaaaggattgtgatttgggggctctaagtgtgtattactctagggaaatggtggggaaagagaagaaaccaagccactcacaacaacactgttctaattccaaatgcaaccccacacctgaagttttttaaatggtggattttaggggatctgtgaatagtgaggttgacatcaagtcaaaatccaaaggatacagcactgaagggaatgtaagaaaattcatttgtattacaagagggctggctttgcagtgccatccttcagttactgaaagatatcaaaaaacatgatctcctctagccttcacttaactgagaatgttggaagatgtggggttctggcctctaattagtaatatgggacaatcttttccctatttgaatttcaattcttacagctaagggtttgtattttagtaaagtctatcacaacaaactccaggagtctgtcgccattcttttgtcattttctcccctgagattgtgattataatctaataattcaagtagtggggtcagtggtcagagacttgacatttagtggaaatggaatctaacctttactgatatttcattgtgagtaatactcaaaatgggactgacatattgggagactatttgactagttggaaaaaagaaacctaaccactgttaatcaaaacagaggtataactggtataaaaaacagacacaaggcctgcttgttctgctgtggtcctggggagattactagctagtaaatattttatgaatccattgattaagatgggactttaagaaagaatgaattaaaaaaaaacacacacaccctggctttgaaaaatgccaatgaattacttctaagagaaagaaaattatggaaactctgctgtggagaagtttaaaagtatgctttacactatcatttacaggcagtgtatgttggtctcaccagctgccagggctggtagaaaactgctgagctagcagttatgaccaaaccaagcatctctctgtaattagagttagctggagagggggagaatggcacaaagaggacaggaatatgtggttttagatggggggagggcaaaaaagcagatcaagtttctcttgagatttaaattaaagaacatagctgggtgtgaccttggactatgtcttctgtactgctgtgctgcccaacaccatagccagtagccacactgggcacatttcaagtggcttgtacaaattgagatacgctgtaaatgtaaactacatatgaagtttcaaagacttagtacaaaaatatctcaataatttaacatactgactgtatggtaaatgataatattttggacatatattgggttaaataaaatgtaaagtttaattttactcatttcattctactttcttctaaactggcttctagatagctttaaattgtacatgctgcttgactttggtttctattggacagtgctgattcagacctttacttcttcacttgttaaatgtggctgatggtgggaagctggggtggttcagatgggaagaaacattgtgggtgacaaggtgacaggtcagggtaaagcattatggtgactgcttgtagactgaaaactttagcttagggagtatgaagaacaatcacaagagacccaagctaatcaggtctgtcctagtttattttgtgttcttatatatctgtgactgggtaattcataaagatgagaggtttatttagctcatcattctgcaggctggcaagttcaagtagcatagtgctggcatctgctcagcttctcaggagggccatgtgctgggtcaaaacatggcagatatgtgtgaagacgccaaacctaggaggggtgtcctcactttggaagaaccctaaccattccctcgagatctaatccagaattgggagcatgagaactctctatcgtaagaatggcatccagctgcccatgacccaaatacctcccaacaccgccacagtggggatcaaatttcagcatgagatttggtgggaacaaaccatagcaaggtttacctgggtcctcctcaacctctctgtgcttcaggcggttaaagtgtaaaatgagaggcaggaccaaattcttgcatgatgaagtaagtctagagaagctctttacctgcaccattcccggtcactccaaactcaagaataattctggtaaaaacaagtagaatgaccaacagagatctttagcctctgcctggacccatctggagagtcactgctatttatctgttagttctgcttcagtccctctcagggactgagctgacagagttcctgtgacatgttaacacagttaaagacacaaagaacaaagagtgcaagatgggaacaacagatgtcacacccttcttaaggagtcagaaaaattcaaaacagcaaaatcctacagatgatatgtagaaggaaatgtatttgttttcctttaaacttacatatgaaatacctactattgtaatgttaacctaccaattaaaaaatccaagattttataataacaccttaacctattaagtaatccagttaaataacacttctatgaaacccaactttccccctcttcaaaaaatcaaacatcccccaaatcaaaacactatcacttcccaagcatattaatttctgtgtaaaagaggatgttaaaaacaaacatacaaacaaatgacaatgaaattccatttataaacaaagccttggcctacccaaggctgcctcagacagcagtaatgctggtgctgaaaactggcaactgggctggtgagttccgtgtatctgaattagtcaccgccattgaaaagtcggaatggttaacataaagatcccggtttccagtcaggcatggctcgtctgaggtccagcagtacctgccctttagaggtgcatagcttgtgcttctccagctgcagtctcctggctgactttccttgtttagggacctactcagtcaggcaggcacttgtggcctgaggcaagaactgtagtagtgggggcagggatggggggcatggccagaagggatgagagggaacatggaattgttgaaaaatcctagctctaaacctgacagatatggcttgatcttactctcccatagagtctgggtgaccttgggcaagtcacttcactagtctaagctgtaatgtgggaagaaagtgaaaaatgttctacacatgaggagcctgtgtggtacctagcatgtagtaaatgctttgctaaagttattccttcttaacccaagggcaagaaaaaaaaatgtttagcctaatcacagcaaaatccaggtgaccatcaaggaaatggctagaaaaccatcactgcaaaaatatgaaggcccaggtcatacactacgaataattcaggaagagaaaggaaagagtaaaaaatatcagacaatattccaaagtaataactgaatcaggtgaggattatccatggttactcaagccactggatgaaaggaaggctggagcaggatgttcacaaatgacccatgtatcagactacagatgatttattaactcaaggtgcaccttgacattggttaggtctggttaccatcttacccaagagatgaaacctagcactgaggatggtggaacaaggtgacttcttctgctccctgatgtgatataatatcaggtgcatgacatcatttataaagtattcttggcaaaagatgtttaacctccacttaataacaagcctctagatctaaccaattttaggaagagaagagcatgctaaacaatgctgtgaagaagcagacaagcccagagtgtaaggcactgtatagcacagcgaacttgaacttttcaaaaagtcattgtttaaagttatataatgaatgaaggaaaagttatcaaccaaattcatcaagtgtatttgatcagttacagattttggggtgggggcggggaggtaagttataaaatattatttgggactgtattgttgaaatttgaatatgaattgaatattagataatataaaattattattaaatttttaagatgtggaaatagtactatagtatggttatataaaagaatgtccttattcttaggggacgggtggtgaaatatttagaggtaaagtgtcaagatgtttggtacttttaaatggttcagcaaaattttatataatatgtataatttatatatataattagaagagggaataaagcaaatgctgcaaatgtagaacaaatggtgaatttaggcagaggacataaagtgtttgttttacaattctcccaaccagcaagtttgaaatttgttttataattctcccaaccagcaagtttgaaattttccaaaataaaaagttgggaaagaaactgggagagaaagagagggagggagggaaagaggggagggggagggagagggaaagggagagggagagggaaagggagagggagaggcagaggaggagggggggagggggagggagggagggagggggtagagtgagcgggagagggagagggaaagggagagagggagagggagagagtgggaaagggaaaacgagagggagagggagagggagagcgggggagggagagcgggtgagagagagggggagagggagagggagagggagacgcagaggagggagagggagagggggagggggagggaaagggaaagggagagagggggagggagagagggggaaaggagagggggagggggagggagaggggaagagggaaaaggagagggagagggagaaatacaaaacaggaaaggaaaaaaagatgagataatatcactactccttctctccctcttttagaatcccttcaacatctatattcaggtcagttgccctgggttccttttcattcaatatggttttatttttaccaatttaataaatttcattgtgtgctcatcaaactgatgtagccactgtctcagctcccttactggctgacatcaaaactaaactttaaacaaaactccaacagctcctgtaagggttcaccagataggtatgacgtttaagataacaaatcaaaaacttctgaaatcaacacccaatttgctatcacgatggtttttaagtcaggtggatgcgaggctgtgggccgagcatcctactgggctctcatcttttccaaagacagtactctctctcacacctgcactggacactgatagagataggacaggtacaatataacatgctggctagccaggccactggggttttagagagcctgtttccatatggagtgggccatgcctgagttctgatgcctggggcagcaatcgcatgacctgcagaatagccactctggattcaactttcagggactgagagctcccaatgaagtggaaattaattctgtgatgcctttaacacagagagggctataaaggatctggattcagatagtgcgggtgtgcacctggctctactgcattctagtacaacctcagagcagtgtttctccataggggtgctatgaacactgtgttagggacagctcttcactgggcaggactgttcaaggcactgcaggacatttaccatccctgccccactttctcttgcatcatgtgccaatggcacctcccagtctttgtgaggacaacaacaaacccctccccatcccccccacacactcccaaatgcctcctgccttagacatcagctaaattatctgagcctccaactggtgataacattgcactgcctaggaagtggtttgggaagatcaaatgtgctgcagctttttccccccctacttattaaggggatggagtccccttaatttttgagatgcagtctcactctgtcacccaggctggagtgcagtgacgtgatctcgcctcactgcaacctccacctcccaggttcaagtgactctcctgcctcagcctcctgagtagctggaattataggcgtgtgccaccacatccggctaacttttgcatttttagtagagatggggtttcgccatgttggccaggctggactcgaactcctgacctcaagtgacccacctgccttagcctcccaaagtgctgggattacaggtatgcgccactgcacccagctagctgtttacaaacttaaatgagctatgcctacgataccctaatatgcatctgcacaagcagcctgccatcagaggaaaggctgtggggtgggaccaaccacctggatcccaggtgggaactattacagtcttatctctctagtcatgcactagaatatgtgacagctacttgttctgaaaatgttccccttaataagtgggaaattttggtttataagtgttgctacagataaaaactacagcatagtgtgaattttagagtgaaagcagatggcaaatacttgggtgattgtagcagaggagcaggatggcctcccgcaaagcaacttcaaggaatctggtttagaatgttgccagaactaacctggaacgaaaatgatacttttcttagtgagcaagtgatacaatgactgtggaaattactttaagaaccaaggttacacagtaacacagaagttgacaccctaccctcctatgcacagggctgattttcaaaatgatgtgctttagggatctgttctttaaatatgtaagtgacgcttatggaagggaatcagtcttaaaggcggggccagactgctgcatacaacctcaaatggaactgtaagccctgaagaaaagctgagaatggagactggaacagggattctcacaatttcgtgtgcataagcaccgcctggagaggctgttaagaataaagtcacacacccaccacagggattctgtctgattctaccagtctggggtaggccaggatctgtgcgtttaatgagctcttaggccagttctgaggaaggggcccacaggctgctcagggagtctcagggacacctctccagagggctctctggtgggattctccgcctttaactctccccatgggatattcttgctctcatgttatggccttcatgactcagaatttaggtaaaagcatttctccagcccctaggtctggttggattttgggttacaaaattgtccattttcactcttcatctcagcttctcctccccctgtacacacattgtgtaaataagaagctaattttattttgcagaccagacagcaagttctgacctctccttgaaggccaaaagtctcaggtattaacagagaagttaataggtagagtgggtgaaaggcacagtcttaaagaacaaaagtaaaagcagatacctaccctgggtcacaagccaacagcaaaggcatggaaatggcccctgaggatcacccaggggttggagtggagcaggggcagtgctggctgggacacaaggggttgcaaatggatagttttcccacagatacttacataaaaatatctagtgccaacacggtgtttttatcacctccctcaactctgtttattagtcagtgttgctgaatgcctccaaatcccattcatcttaaaaacagtagactgataaaatctctgttatctctggacttggccatctgaaatgagatcttttatcttccatttctctggctttccagaatacattttcatagcattcttgcaaaagaaaagactatcagaaaaagaaaaatgaagggtagtaaagttgagagaatattacaccacagcttttggtaagaaaatatttatgtccacaagcacacaccacaccctttctgggaagatattactggcctagaagccgggtgagtgcatcccaaaatatacttcacaaaaagcaccattaccctcccaaaataggccctataattaggtaaagtcttttgcagtgggttgtcctatatcataaattgacatatgttgctttaatctccctgcttcagcaaatgtagccatattaggctacaaaagctctcagcgactcacatgtaaaccagattgtggtgtcactagcaaactgatgcaaataaacagctctgtgtaccaaaatactcaatctcaatcatctgtaatgagatctctctcctccctaagcacattttcatcacaccagaaccgccttgattcaaaaagaaagactagcccagactgaaataccgtttaatcttagaggtcatcaaatgactaacacatctgaagaagctggggttaaaatttaaaatacgagacaatctctttgtgtaaatgctgggatcatgttgtgtgagtcttgtttttatctttagttgaccgtcattctgtataagccgtcagaggcccatctgtctgtctgaattcatttaggtcatttttcgcttggagttaggggtaatagaagggatagcctcttagcagcctttccactctgatgattttctgaacgaatttaagttttttagctgtatatttacataaatcaaatgttaagatatttccatttttaaaccttcaaaataataagtactttataaatatttacactttaaaaattacttataatctcagagtttctcagcttggtattactgagatttcgggcccgattattctgcatgtgtgcacgagtgtgcgttactgatctacgatatatttcaagacatttggcagcatctctggcttccacccactagatgccactagcacacaccctcctccctcccctaactgtgacaacccaaaatggcttcagatattaccaaatgtcctctgggagggcaaaactaaccccagttgaaaaccactgctctatgtatttacgtgtttatatatcattccttggcatggccagaaaaaagaaacctaggcttttcaaggcacccacaagtttagtttgaagaatttcaaacttcctatgacttgtaatgaaaaatcggaatctgtgacacagcactgcctctaaagatccatcaacagcaccatgctgcctcagactgagggtgccaggacctggcttcatttcagacaaggcctgtaagaggatgagctgcgcctgggctctttcttgcactgccaccctccctacttttaggagctcctttcttagaagactgcactaaataaatcctttatgatccatgaccagacacttcatactgattgtgaaggaagaggattgggtgtctattaacagcatccacagaagcaatgcaccctctgtgctcctcgtgggccagacctgtggggcagcgtgtctaatgctggcctaggtgcacaggagaggtgtggggaagtagaggcctcctcaaggagctctgccagatggggagggatatgaaaatagcatcagaggacaaagaggccaggcccgggagatggtaaattcacccagagaagaaaagatgaatgaggaaggacagtgtcttcaaacatttggtgggctggagtgttagaaagtgagtggacttacttcgaaggtgactaagagcaataggtgattcaataaatacttaacacatttatgccttctatgtgacaggcactatccaggcaccaagactccagggaggaacaagaccaagtccctgtcccatggagcacatatactgtattaatagttcaatataaggactagattgcttttctttcctccctcctccctctctcctttgtattcctcactttctttttttcttttttctttctttcttttgtttttgttttttttttagatggcgtctcgctgtgtcacccaggctggagtgaagtggcgtagtcttggcttactgcaacctctgcctcctgggttcctatttttagtagagatggggttttatcatgttggccaggatggtctcgatctcctgaccctgtgagctgcccgcctcagcctcctaaagtgctgggattgcaggcgtgagtcaccgcacccagcctccttactttctttttaacaagttgggctaattgttcaatttttaaatgctggggttttttttctttccatttttaaaattcaggtctaattaacattcaagagaactcaccctttctattatacagttctgtgagttttcaccaaagcatacaactgcataaataccaccagcactaagatacagaacaactatataccccctcctcacaagggtttccctgtaggccctaactgtccttttaattgaaccaaggtaccctgtgcaacagcaagctcctcatctctggaagaatttgaattcccttgtcagggatcagtaggagacatttttttttttttttttttttttttgctagcaggggattgggccagacaacccttgaagccatgtccctctctttgattctatgaaatggcagcacagtcacctacagacatctgaccttaaacactggcccatctgcaatgccacggctgagtttcccaaccacaggtaaaggccccacccaaaagccaaattctttcagtcaaagctcaaaaatttcagcccagcaattggatccctgtgaaggctacgtaataagcatagacaaaaacgtaaaatcaaaagaaaggtttggaaatgaaagtttaaatatggcaactgaagtccaaccaatggtatcatctacccccacccttctttcctcataaatgtgattcaaaatgacattaactccaaaaatgaacacagctcaaacaaggtgacctcactggttgtgaggatggcaggaagggaattatttagccaagcttgtctaagaatgggtcaccagggttggagaaggtggtaaatgttgcagggattcccacaggttcttatgaagtgaatattggaggaggggttgtggtgagtagctgggatgctctagcaacatcaaatggatgtaaccggcccatccccagctgccttcctgctggaaaataaatatgcctcttggtagcctgacttcaatgggaaatgtctagtctccaaacaaggctgctctgttcctaagaatgactggctttattgaacacttactatgctccagcactacctacctcattttattctcacaacaaccctatgatgtaggtaacatgataagcctcattttacagaagaagaaacaggctcagagaggttatctaacaaccagtaggtatagaacttacattttaacccgggtctcctgatcccaaagactgtcctctttccctgctagcaaggtctgggtggttgctgaattgaacgttcttggtctcccaagaccactgttatgctggtctgtgggctggctcccaggcaagctggacttgtagcttcctttaattttccatttcctaagctgcctgcttctctttcttttaatatatgggtcacacggatctctctgctttggagaatttattttattctttgggtctgcaagtttattactcttatattatatggctggcttagcacataaactgccaagggtattctttaaccggcatccggaaacttttctaaatatacacttattacgttttagaaaaccccatattgcttaatactatcagcaataacaagaaaaagtatcacactgtcagaaaacatcaattcaatgtcacatttaattatagaactccattctgcctgagtttagtgcagaagtaaaagatggacagaacaaggcaacagcttcccttcgtgagcacccttttacagcaagaggcattagaagtaaatgcagcaacacttaccaaaatgtccgccaacgatcacaaactttatatacaccacatgtcttctacaacagaggcaggactggtcctgaaaaacaataccacaacaaaagaaaaaccacatcattaaacagaaataattgaacacatattatgtttctctctgtaaactgcaacctcttcctctgcttcgggcacccatcgatgtactaaattccacctaccagtttcctctgtttttcccaggaagatgaaaccaatttacaaattatctcagtattcactaataaaaaattttaaaactggacaatgaaatataccagaaactatgcttataaatatctgaatgtttagccctttgaaatatttgaagacaagagaacaatggaaaaatatctgcagttgaactcacaacatattcccccaaaccaattcctcttttctttctttccagtaatatcctcccttcttgccagctagctgtgagaccctggacagttttcctaacctttcttttctaggctttattatgtgtaaaatagggattactgtactgacctcatagggttgctatgaggattaaatgatatcaactaaagaacatacacgacatagaagggcttataacagcctctggcacacagtaaacactcagtaagcctgagctgttatcatcattctcccagtccctcgggcctgtaaactaacaccgccttcttcacctccactgcaaaccttggcccagtccagccccgcaagaatttcacagtggtgctgggaacacattgcttctccctattctcatcgttacactccatctggtcagcatcatgcctggcatacactggtctcttggcctccagtttcttcccttcccatccaactctcatggctgcacaaggaatcctttctaaacacaacctacacagcctgtctttcctcaacggatgcaccttccaccacttcctatgacctgcgaatttacctgtcgagtcatgttagcctggcactcaagctcaccccagcttttcgacattatcctatcaaatgctgtaacgcccagaggcctgtccggcctctgagcctctaggcaggccatccctcctctggtaggaggcctggccattgtcaagggcaggggctctttaccttttgtgctatggcagtctaaagacatctttctcagaatgatgtttacaaatgcttgaaactaatacatgaaatgcacaggagtcaaacagagtatactcttatacagttatcaaaatatttgacaaaattgttatgaacatctttcaatacttaaataatttccaacaagtctaatatactgtaattttgaagtactattaggcataaatgatacttcagaatatctataactatgaaaatattcataatttctattaaggacaaatagctaatgctactttcataatattaggaaatgtacgatttcagataagggttagagacaatgatgagatcatgtttttccccatccaacttcatcggccccctgaattacatgcatggacccagctttcaggcctagcttcattctcattgacttttccaccttgattttcccaaagcagtattatcttatgcctctttatttttctctttttaaaagtactttatttgatataggtactttaaataaatgtactacttttaaagtcagccttttaagttgtcagggaaggtcctatcttcttccctattttaaaactccttccacagttaataatgcctcgccttatcacagcacagcagggaggcgctcatcaggactgctgagtccatccacgggtaatggtgcaatctgcttgtcctacatgagctcaggtaatcattaatattatctcattgctccttcgcagcctatgaggtcctaaacatgtagatgggacacctaagcattctatatttagactataaattactgaagttaggcaacacaatgttgtcttgtttaatacttctcttttgagagtgagtgattagtccatgctgttgactgacagatcacctgggaacagactagctgttcaatcattctgtcaatatagagggcgcctgtgtgacacaagcataatgcctgccttcctggggcttcaagtctagcagctttccccagctagcccagagtagcagatactctctcaacctttcaggtcctttgaatagacaagacacaacttgtgatttcctaagtatgggcactttggtgatccatgctggtgaggccaggtacagttgctctggcctctacaagagaccacaccaagctccagcttcccatcagtctcacagatgtgaaccggtggttctgaggcaggtgggacaaatagactgagcagtgaaattccatgtcccctcctgggtgatgttgtctttgcacatgaggtccaggacagcaactaccacagtgactatcttgggaaggtctactcagtgcttgtccacatacttcatgctaagcacgctgagcctgtgattgtccagcctcagcgtggacactggtccctccatcttatcagcctttttcctgaacagctgcagctcaggaatcctgtgtatcttttgtcaagcacaacaaaataacagaacagttcttccttttcaaacgaatagagcataatgactttctccactgaaaaccacttataagggcattgtgaccatttgctttggcagaaattcaccattggcagcatttttcatacccaatatcatgacaagtgactcttaggacaagtgggggtgtactctccctccccaataaccatgactgatgagatttccactcacagaacaaaggctggatttggcacactctttttatacttaaggctatttcaatccatttcatttgagtttgttctttttgagacacaccagatatatggtattcattaccaataaaaatagctgaatgataacaaaacgggtggcatgactgtttaatcttttgtttcaagagctgcaacgcctgcatcaccataaatgaatgaaattttcgtgagtgctcccacgtaacaattctgcttttaatacatatcacagactattgtatgactcccggtataaagttaaaatgctaattacacactgaaaacaagcatctctaatatagttctcatctgcatgtggtcattccctctttcttcttcccaaaagagcccccatatttctgcacccacagtgctcatgggcacatggcagcacgcccagctgggagtgggggcgggacagtccaaggttttgcagtgtgctgacctgcaacattcgcatcaaccaggagcttgtaagagctgtcagctgaggcctcacccaagccaactgaatcagaattgattttgaaagtttccccaggtgatctgtgtgcacactgaagtttgagaagcatcgatccaagagatacccattcctactgccagtgattggtttaagaataagcatgtggcccaatttaagccaatgagatgtgaagaatgtttttctgggagcttctactcactcctttgggagaagctccctccttctgaatgtagtgtggaatgcgccacctagaacttccacagctattttgtttcagtataaggataaagctggtccagagacagaacaaacacagggaagcagagtgtaggttactgcattaggttggcgttgaagtctgtggcatctctgtatttccaagaaatgtcttcttgtttaggactccttgacttgggttttcaattacctgcagctggaaaacatcctgactaatcagtctccaacaaagcattataaaaagaacagaatgccaaggccctgggctcaatcatatgagggacaaggcagtaggtccagagatcaaagccatagttgagaaactcgttttgctcagggaactgaccccatagtatttccagtcctgataaccatggtacatttgcacatttccaacagctttctaaatcagccagtctaaacgatcaactggaggaaatgctgaacactttccaaattattttaaccaggatggtcaacagttgccctccccagaagccacactgatatgtcatttcctgcaaagacaatgggagactaattgctcagcttcagactctaacagggaagacaacctgtgatatgtaattactgaagggtaaaaaaggaaaagcttgaggctctccaaatctgtttctggatctgctccaattacttggggaaaaggaaaaaaaataaaagagccagctggtctgggaaaagatttgagggactggcagttcacttgggaagccacccatacgtattttatacgtatcactggtacttattaaagacctttctgaggaaaccaaatagaccagctattatacaaaatcatacgtggctttggtctaattctgcttcacacatagaagtgacagagtcaaggagaaatggatgtctaaatggacattatctctttggtgtgtcctaacttcttagccacaagagcatatttctggggttaggtttgttgtattgacttgatgaagaaacgtgctttctatcaaggagtggaagaacattgattggttctccacaggatgttcccaggttctgtctcctcagaactcgttctctctcaatactgttttgctatctctttcctggtacatacaattccactgtcccaactgtcatcccatgggataagtttcacactacatctctagatctatctcccatgttcccagctcctctgccaccccctacagatagtgccttgagggcacgaattttgttttggttactgttattttcccagtgcttagcacagtagctggcactgaatatgaaatgtttgttgaatgaataaatgaaaggcttcactcagactcacagaagttcttgccatcaccacctctctctgactctggcctctcttttccccgcttcccaacacacacaaactctggttacagcacttctcatgtcactcccagactgtctcagctgggaaggatttagcagcccaaccctatgctttacagggagaaaacgggtccatcaaggccaagagacttgcccaagttcttattagtgggtggcaaagacaggaattttttttctttttttcttttttttttattactatactttaagttctagggtacatgtacacaacgtgaaggtttgttacatatgtacacatgtgtcatgttggtgtgccgcacccattaactcgtcatttacataggtatatctcctaatgctatccctcctccctcccccgaccccacgacaggccccagtgtgtgatgttccccttcctgtgtccaggtgttctcattgttcaattcccacctgtaagtaagaacatgtggtgtttggttttctgtccttgcaatagtttgctgagaatgatggtttccagcttcatccatgtccctacaaaggacatgaactcattctttttttatggctgcatagtattccatagtgtatacgtgccacattcttttattttaaattatttttttattatactttaagttctagggtacatgtgcacaacgtgcaggtttgttacatatgtatacatgcgccatgttggtgtgctgcacccatttacttgtcatttacattaggtatatctcccaatgctatccctctctcctccccacaacccatgacaggccctggtgtgtgatgttccccttcctgtgtccaagttttttcattgttcaattcccacctatgagtgagaacatgcggtgtttggttttttgtccttgtgatagtttgctgagaatgatggtttccagcttcatccatgtccctacaaaggacatgaactcatccttttttatggctgcatagtattccatggtgtatatgtgccacattttcttcatccagtctatcattgatggacatttgggttggttccaactctttgctattgtgaatagtgccgcaatatgtgtgcatgtatctttatagcagcatgatttataatcctttgggtatacacccagtatatacccagtaatgggattgctgggtcaaatggtatttctagttctagatccttgaggaatcgccacactgtctttcacaatggttgaaccagtttatagtcctaccaacagtgtaaaagtgttcctatttctccacatcctctccagcacctgttctttcctgactttttaatgatcgccattctaactggtgtgagatggtatctcattgtggttttgatttgcatttctctgatggccagtgatgatgagcattttttcatgtgtctgttggctgcagaaatgtcttcttttgagaagtgtctgttcatatcctttgcccacttgttgatggggttgtttgattttttcttgtaaatttatttgagttctttgtagattctggatattagccctttgtcagatgagtagattgcaaaaattttctcccattctgtaggttgcctgttcgctctgatggtagtttcttttgctgtgcagaagctctttagtttaattagatcccatttgtcaattttggcttttgttgccattgcttttggtgttttagacatgaagtcctcgctcatgcctatgtcctgaatggtattgcctaggttttcttctagggtttttatggttttagatctaacatgtaagtctttaattcatcttgaattaatttttctgtaaggtgttaggaagggatccagtttcagctttctacgtatggctagccagttttcccagcaccatttattaaatagggaatcctttccccatttcttgtttctgtcaggtttttcaaagatcagatggttgtagatgtgtcgtattatttctgagggctctgttgtgttccattggtctatatctctgttttggtaccagtaccatgctgttttggttacttagccttgtagtatagtttgaagtcaggtagcgtgatgcctccaggcaaagacaggattttaactcaagacccagcacccctgctaccaggcaactgaccagttcaaaaatcttcaacggtctttcagtacaaccttgtacagggcctggtatgcagtaggcatttaatatctgttgagtgactgactgaataaattaatgggtctcacgcatatgccaatgggttttagtttttctcaaagtggaacactcctcaaaagacagacaatatccttgtatataaaatgaagatgagaggagctactctctcctctataactgggggagcagctggcacaccagacttcttcccctgcagtgcctaagccagctcccaggaaactcagggcttggtgacactgctagaaagaccaatgacttccacaaacttttcagctttgcactcaaagccatccaccatcattccaaacccaccacatcagccgtatctttcattttttcctcctccctcatgccttgccttctcagagcacttgctgttctcacttgtccctcctcggagccttcacctgtcctatttcctctcttattgtgccctcatctccacctgcaagaatacagaaccaacctgtccctcaagccagctctcgtataaatccctccctgaagttcttgcccagttcccccactagaattagtcttactctctatatacctctactgtacaacttttcacgctatctgctgcaaggaaaatggccaggtccttgagggcaagaatgcaggctaaatgtatcttcgaaccattggcaccttgtctgacccaatgccttgcacagaggagacagttctagtcattctgttgcattcaaagggcttcatcctttttcgttcacctctgtgaccaaattacatacattttgtagctgagattccaattcttcctctagcatgtatagactgatgatacagctaacacacacttgcagggcccacttgctaaggaactgctgtgtgagtctttgttgagtctcattttcgaaagcaaagaatgggggtgaggggagacagggagcatgaattccactcccctccaaagctctctgtgcccatggctatcctgtgcaacatgaggtacaagctgggaagcttgtgcacaaaaataactgtcaatttaaaatatagtatagtcctacaacctgccatgctacaatattctctgcaagcccaaacttgattgtctgaaaaattagagttccaaatggtgaaataaaccattaaacaaggaagcatacaaacaaagcccaattgccagggaggaggatgggaactagaaaatacagggtttcctaggaaactgagcttacttttgactgactgtggccttccctttcactggatatagtgggtgggagggaggtgggaggggtgctctgagaaggcaacactgacccatctgcttcccctgcctgcaggggctagagtccttctggctacactccaacaggagggcagactcaagcaaggttgtggttgttgttttattatttgcttgagtgggagtaaacagcagagagagaagaggaggaggaggaggagagatgaatagaaaaagagataagcatggaaggtgctcagccagcagaaaggaattaatgaccacagaatgagggggcaggaaggtcacaagctggctgctcccttctcattggctattgccaggtctagaggggatcagaggctcactgttgagcaaggcaccaatataagctcatgctcagctgccctagaggccaggtgtaggggtcccagcatccatggctctgaagctggactggagagataaagatttggggctcattggcacacatgggtgggcagagtcatgcaaatggatgactggatgggtgggggtagggctttagctccccatctccaatccccatcaacccccaggcaatagtagtagtagcagcagtagtactgatatcatttcatattattattactatatttcaacgttaaggccatgagtacccagtttatttggggaataaataaaagaaacaaatgccattggaataatcagttgactatctggaggaaaaaacaacaattctgcttctatgagactcatgagaatgaagcatacagttataataatcatgtctttcttttcttactggtaatgagtccctgtcaggtgatcacatcacatgtatcaggaaaaaaagaaaataaaacaaaaactctgttctgtagtgtacttgaattcttccgacttgcccttttaaattaagctgttcctaagatctgcaatccacagtctgaacagaaacactgctttgctatgatgcaagcgcagctgctggacacgtctagctctcttccaaccggattactactcccaagtccctccaagtagacattctggagtggctctggggaaggcccatgaaatacacacagtatcacaatgctgccaagatcaaagttaataatgatgtgtgcagagccccttgagtttaggttggctacaatatcagaatcccagaaccttggggctgaacggaatgttaaagaataactagtctgatagtttttaagctattctttagtatcagaactgtgtgtgtgtgtgtgtgtccatgccaaatgtgtaacaattatgccaaaagatatccagctagcacaccacatacctggagaatccattataatgggaaccattttatttcaaaaaaaaattcttttcttgttattggtagttctgaaccttagatacacacacacacacacacacacacacacacacacacacacacacacacacattctgaagggctcaactccaaaatattagataaaagtgcaacagaacagctctggttcaagagggaaaggactcaaactcctacctccatggccatcctcctggcctacctggtacttctgggtaactctaaagtcctaagaacactgaaaatctcagatcgagtctcccacccctaaccagtatctgagtcttctctcacatctcttccagcccacgtgcacgttctcaatgttgcaacactggagaccaagggcatctaccaggggttccctaccaaggacctgttttatccacctgcgcctcccacattttgaattatctcactaacattgcattttaaagtaataattgatttattttcccagctctgatttggagtcagggagatcttgatctgaatctcagttctgctaagcttggtaaacttggaaaaattcctcaataatgtgaagtagtaagcctggtagaagccttccttctctctcttggctttttatttcatcaacacaaatctccatcaaaagaatacctaatacctaggaataagtccaacaaaagatatgtaagactttatgctgaaaatgacaaaacgttattgagagaaattacagaagacctatatagagggttgggccatgtacatgggctggaagtccaatatttttatatgtcaattctcctcgcaattgcatcttaactgaaccaccaattttttttgtttttaaactaggtcttttttttctgatggaaattgacaagcagattctaaagtttataagcaaatgcaaagggccaaaagccaagttaatcctgaacaagaggaacagggctggaagacttattctaccagatacaaagattcactatagagtaatagtaaaagtgtgacatttgtgcaaggccaaacagaccaagagaataaaatagaatgtccaaaaatagagctacacagtcacctaacttatgcaaaggtgacaatgaagtaataaatgtataaaagtatgcataaatgtataaaaataaaatataaatgtataaaaataaaagtaataaatgctgggttcactgggtagtatagattgaaccgtgtcccccaaaaagatatgaagttctaacccccaagtacctcagcatctgacttatttggaaatagggttgttgcagatatgattagttaagatgagttatagtgaattagtatggactctgaatccagtgactgtccttaaagaaagaaaaaaatctacacagagacatgtggggaagacggccatgtggccacagagacagaggtcagagcaatgcagctgccaagaaaggaatgccaaggattcctggccaccaccagaagctgggaataggcaaggaaggactcttccctagagccttcatcagagagaccatgaccctgctcacacctcgattttggactcctagcctccagaatcatgagagaataaatttctgctgttttaagccacccattttgtggcacattgttataatagcctaggaaatgaatacaatgggtatccgtatgaaagaaatgaatcttaacttccaccgtataccatgcaaaaattaattctggatgaagaatagaactaaatgtgaaaggcaaaataataaagctcttagaagaaaacatagagaacaccttcataccttgtaataggtaaagatgtttcttaaaagagaacacaaaaagtgttaaccacgaaggaaaatataatttggactatactaaaattaaaaatgtcttcatcaaatgacatcaacagaatcaaagggaagccacagagtggagaacataattgcaatacatatatacaacaaataactctaaaaatcaataaggaaaaggcagacaatccaataaagaaatagacaaatactcgagaggacaaaacagaaaatccaaatggccaataaacatataaaaagatgctctaattcagccatcaaataaaagcaaattaaaaccacaacgcattaccaatacacctacaggactggctaaaatgataaagactaaaaccatgaagtgctggtaaggatacagagcaactgaaactctcatacattgctagtgggagtgtccactgataactggcagtttccattgaacacacacatcctgtgatcccagatcctgccatccagagcctatcctacagaaatgctacatatgcttacccactgatatgcacaagaatgatcctaccagtactatctctaacagccccaaactcgaaataactcaaaaggccacttacaagagaggggctaaatacatcttgatatgttaaacagtattacacagcaatgaaaatgaacaaactactacttataacaacatggatgaatctcctaaatataatgttattctattgacacaagacagtgcaaactgggggacatccaggctgtcccctagtcttgcggcagcttgacctctgccatctgctaggtcctctcctgcttctggtcaattttatttatataaagttcataatagataaaaccaatctttcttgttagaagtcatgctatcagttacccttgatggaaactggggtgtattgggactggatggggacctgaggggactcctagtgtttaagtgacattctttttccacctggccgctggttacaaaggagagttcactttgtgaacattcattatcagtgcacttaagaatttgtgcacttttctgcatgaatgctacatttcaattaaaaaaaaatcatctcagggcgaacacgatgaaaccagaaacaaaacagagctcttataagtatcgaaagcaaaaaagcacagcaatttaatttaagcaagataatttgaaaatttgctgcactaaaagcttagaagtgccatttcattaaattacgttttttaattcactttaagatgaatgtcaggccaaagctattttattactatatgttaggatggcatgaagcaaatagtctcaaaataaaataatacacatcatttaaattttatcttactgattttttaaagtgaagtttcggatattcaagcccatttttttttttccacattagttaaaaaccgtttcctggggccttggtttacagtctgcgcatccccagatgagaaagcccttgggataaacgggttttccctctgtggcacaaagtaggcactcaacattgctcttccagagtcagtccataagatcggctcattcctgccaatggaagcaacaacagctcagcctgcctttgcactgtcactctggataaatgcataatttctgtcagtctgaaatagtgaaaataaccattcccacctttgtgaatttctggggctctttagatccccctctggaatatacatggtcatgaggtccagagtcttcacccaggctgtcccccagtcttggggcagcttgacctccggcttctgctaggtcctctcctgcttctggtcagtcaatccattatcattagccatgtgctccacagagctgctccacctaccactgaaataaatcccttggagcatagaaaccgcgtggtcacactctggctttctcagacacttttgttctcttggaccctctgggaggggaggagatctacgcaggcaccgagatggacatcctgagactgcaggcagcccccacaggaagtgagaggcagccacacacacctcggcttgcattctgggttgcgaaagaaaccatgtggggactgtggagacctcactcaccctccagcctgcccctacctgggagaagatcccggggcagggcccctgccactgagctgctctcctccatccgccatgaggacacccgggcctttctttggtcactctgtttccctggatattagcttcccaaaggagagccctccttaaattcaagctctgttgtttttgcatagacttttcggtgtcaactctattcctaacttcaccatctgacaaaaaattgtgtgggtcctttaagaaggtcccccatccctaattagagttctctggtaagaagataacatatgctttttaaataacttttgatcatgaatgccacagagattttcctactgaaaacacagaggaatcacaagggtcaaataagataatcagttcaaaatgtacatggacagaggaaaatcacctaggtcaattcctcgagagtctgcagccagaagactgaggctctaccagcaagggcagtggtgggcagcggtcagcaacccccagcctgcggatcagatctggcctgctgcctgcttttgtacagtccatgaactgagaatggtttttacatttttaaatggtcacaaaaaatcaaaagattatttcatcacacatggagattatacaaaattaaaatctcagtgcccgtaagtaaagctttattggaacacagccatacccactcgtttccatattgtctatggctgctttcacacacaacagcagaattgtcttgatagagactgtatggcccgcaaagatgaaaatatttactatctggccctttacagaaaatgtttgccaaccctgggctaaggtgatgtctgtgtttgcagaaggatgtccactctgattcttactgttttgtgcctctgggcctgtctccacactaagtcacaggcaagtcctaatgctggtttcaatttcacactaaccgggtaagccaacacaacccgctaaagcacactcttttaacctgtggtcccgagtcaattcaatgggtcacaaaatttaacttggttgattctgcccagcattttctttaatgaaatacagataaaaatatcaagggaactgttattgactgaattgtatccctccaaaattcatgattgaaaccctaaaccctagcacacatcagaatgtgactatatttgcagacaggcctttaaagaggtaacagagttaaaatgaggtcatatgggcagaccacaactcaatatgactagtatccctataagaggaggagattaggacacagatacacacaaaggaaaggccatgtaaggacaaagagaaaagacagccatctacaagccaaagagagaggcctcaggagaaaccaaacctgctgacactttgatctcggacttttaacttccagagctgtgagggaatgaatttctgttgtttgagccatccagtctatgatactttgttatggcagccatagcaaattagtacaggaatcacacagagcattattttgtggagtttttgtttcactcacacatgtggacttgtgatataaacatgtattaaattatttgtgtcacaccaaaataaatggaagaacactctaccagagggagaaaaatacatgtttggtagcaaaatcagaaacagaagggtgttctaattgaaccaagacacagaaagagaaaagagtactgaacatattaggcactttgcatatattatctcattttagtcctcacagtaaccctacgcaataggtcttcacctgataaagaaactaaagcattgagaagtaacctactgaggtggcagagccagatctgactccaaagcttatgtattatttctcatgatgaatcaatttctatttctatattcctgagagtaggttgagattgtagttaggcaataaataagggaaacgatttataaataataatagctaacatttactaaatacttactgtgtgccaggttctgggctaggcttaacataaacctcactttatccttattaataacccaatggcttagactctatcactatttttttcagttgaagaatctgaatgtagaagaaatcatttaacttggccaagatgacaaagctggtaagttgaagacccaggatttgaaccttcattagtctgacgtttgagctagagctcttgcccaccacaaatgttctcttttaattgtatttattgccaatctaagtacagccatgtgccacataatgaaatttcagtcagtgacagaccacatatatgacaatggtcccctaagattacaatgctgatattttttactgtgctttttctatgtttagatacacaaatatttaccattgtgttataattacctacagtatttagtacaataacatgctgttcaggtttgtaaccagaagcagtgggctataccatagagactaggtgtgtagtaggttataccatctaggtttgtgtaagtgtactctatgatgtttacacaatgacaaaatcacctaatgatgcttttctcagaatgtatccctgtcctgaagcaacgcgtgactgtacataactatctgctggtggtctccaattgaagaaaaaaaatgcatactttttatcatacatccaataaacactaactgagcacatattatgtgccaggccctgttctgagagctggggatcctgccatcatggtgatgctatgggtaagaaaccttaatgatgtaaccacaccatgctgattgaaatcccctcgtgggtaaggggagtggcaggtaagattcaggtgggttgaaggcacaggccaatgaaattgcagaaattgtagaaaatgagatgatgagtcaggattactaaacagaaatttttagtaattttatttaatatttattgtatccaggttcacctgtcatgtggtcatgtcttatctggaggtttttcaatggcaggggctatatcatactttaaaacacccacctcagtgcttggcatagtgcatagtagtttgaatttactatttttttaataatgttgtttccaagaaagatgtacagaagttactcagggattttcagatgtaatgacaagagtcagacaatccttggaaagtctcagtagtggaggatagatcatgctgcatgttatcagggtcatgagcaaagaaataaatgtttaactgaaacagttttagttaaatcaaatgggaaactagtacgatggctaagcaatcagaatgagtgcctggtaacaaaaatgtgaggacaaaaaattaggctgagtgaaaggaaaacaggatacggaatattaagatttttaatgtatttgtggcaaataaatttttcctaaggtttttttgcttttaatttagaatttttatgtatagaatttttatattttcaccaaacctagtaatcctttcatgaagaaataaccagagaagtgagcaaatattttcactccagaatgtttagtacagcattatttataatctcaaatatgagaatatttaactgcatagtaataggatagtgaatggttaaataaattagtctgctcacacaatggaaaacttcagttattattcaattacattagaaaacaatcacaacttaatattaaatgaaagaagcaacaagctcaaaatcaaagtttcatatatatatatatatatatatatatatatatatatatatatatatacacacacacacacacatgacacacccctcccaaaaacgacaaaataaatacatcttttttctttttttgagatggagtctcactctgttggcgaggctggagtgcagtggcacgatcttggctcactgcaacctccgcctcccaggtgcaagtgattctcctgcctcagtctcctgagtagctgggactacaggcatgtgccaccatgtccagctaatttttgtatttttagtagagacggcgtttcatcatgttggccaggctggtctcaaactcctgacctcaggtgatccgcccgcctcggcctcccaaagtgctgggattacaggtgttgagtcaccgtgcccgaccctagtttaaatacatcttaacattgctatctcaatatggtgtgattaagagatattttcattttcttctttatagcttaccaaattttctacaagtaaaattttaaagtcaggaaaaaaaagttatttaaataagtttaaatcaaagagaaagtatacacatagcacctctactgtgcatctctaatttgctgaagaccttagccaccagaggcctcaaccacactggcacatgtcgcaaattctggtaatgttattttaaataaatatattcatatattcctaaactcgcctgcaaagaggtttcaaaacagattcagcagtggccaagggcagtccccaggatgagatgacacattttagtgaattctttgactttgacaatacattcatttaacaaatatttactgagtgcctgtcatgctcctggcactccgttaggtaccagggggtcaaactgggtccccgggaacaaatgacccattgggctgacatttgtcctacataccctgatccttgcaagatgcggtggaagtctgggctgggtagtaactgggcagacctgttctcaattctcccacctcatctgggctctgacccttcctggatgtgtggctctgagaaaggctggcttcacctctctggctctggctgcctcatttgtaaaacaaggataatcctgacccagttcgtggcactgtggtgaagaataaacaaaaagcgttctgggcttgtttttatctatacagtgccagatggattctacatgttaatagctactgttgtttccttcctttgaaaattgtatatttactctttaggaaacataaagggtcagaaataaagttcagtgattaaagggatattccatatttttcttcctcagaatatccagattaacaattacagaaatgaacacccatgtttccaaccacagccaaaagtaaagtggaactggaagatcttgaaacgttcaggaaccattccaaggacaaatctaggtgagatgctaccagtcattagggaaatagttcaattatgatgagcacttcaaaaatctaataagattcacttacagtttttcctctctcccttttaggaagggtgattctaaaaaagcaacgttcaaaaataaacaagtttttaaaaatttaacatttctaagaaaagactcaagggcacaggaaggatgccaaccatatgtccaaatcagaagtaaatgtgcagatatatcctgtctctctcccaaactgaactcacttcccaaacattgggaacatttgtaaaaattagaagatgaggtggaaatagaggtggggagagggaaaaatacagagacattaaaatgggatgtgcctagttgagatgtttccctttactggctattgacatgacttaataacaagtgtaccaatacactgacagagaaagtgcaactctaaccccctggtgttcgcattttatgtgaaagattaaggatattttcccagatacatactactaatttctgacatcttccgtctccttgtggtcctttcatcaagtaaggattggtaaatggtattaataggttcagacagcttcacaatatctggactaaaatccccctacccctcagttctccgtttcatgatgctgcctgtccagagccactgaggcagggcagggcacaagtggttcaggtgaatggacatctccactgccccctgtctgtgaggctgtcacttgtgcaattcccttcttactgcacccatgccttgtccacccttgttatgtgggagtcccgcacacgccagctcccctgtggaaacgtgcagggaaggcagccacgggtgacatttccagcactggttaaatatggacaaacctcgcagcttcccacccaggtagggcagtcctgtacaaatggtaaccggcagggtttattccgaaggacacgagtgtgccatgatatattcagtagttgctgtacttttaaaaagggagttgtaaaaattatctttaaaatgcttgttgatgccctgtgggtatgagtcactttgtgaagcaggatcaaaatggattctctattacgggtttctgctggctctttgattctaaacaactttattaatgttaataggagttatatacacatcaatgagagaataaattcccagggtttagtggagcttccattaatgatctgtaataagcaacgtaaaatgctttcaaattttctttcaagtaataacacggtaccccagaagagctgaaaatgaggcacaggtctcagcacagggtaggaaggatccgggggatgggagaaacaaggctctacagcttgtgggaggctctgtgggacgagtcctcacagccactcacgggagtggagcaggagggatggacacaacttgccgaagggatattgaatatgaggaagggaggaaaagaaaacgtacaaaaagtgagcttgatgcagaaggaatttactatgatctaaaacgggaacgactgcaaccgcgcttcctaaatctgtcacaggctcatcccatttttttctgagcttaagttaatactattcactggcttacaaaaatacccactaagatgaaaatgggaatttaagttccaaggatgatgccacagaattcctaatgaacaggttattttgcagtgacacagagctctgcctcaaatgtctggaagcccagctttagatttaaccctctcctgcccacatctccagttctctcctcaactcttctcatgggaaatcaaatgccagattactgatatccccagaggatagcaacccatgggggctgcagcagacagacaagtataaatggcaaatgactaacttccatgatttaagaaaagaatagagcaaaatttgaatctaaaagtctaatcactatttgctcgttcatacttagtcaccttacacttccttacatttcatcctgatgcttcacagacagtagaaggacctctgccaacaaattacaagtccacaacattaaggattagatgcacagtgggagaagaatggggatgtgtacatttagccactgagagtctagtttcatacctgagagatctggaaacactgtgtgcaccgctggcgatgctgcaggtggccaagcaacgctcaaaccactggcaacaacagggtagtatcttgatcttctggctcagtggtcacttcccacacagcagattttagagcacttcaggtttaagggggtactgaatttacatattccaaggtaaaccatggccatcatcatcaaggcagagctccatacaccgtgtacattttatttagaattaggtggcttttcaaaggagctccccatttttcttttatcacctgcctagttgccaggaagcagaataaatgccaattcttacgacatgtagtttaattgaacaaatatatatagacatttgttggctagggaaatgattggttggataatgctggaataccaaaattcaacagaacttccgtaccagccacttagacacatcagtgaatacgtcgttcactctcaattctcagtaaactggggagtctctccagtagtccagatcctactagaaaaacataagccacttataaaagtagcaagtgtatctgagactgtgacaaatgaaaacagtgcctgggttgtgcactgtttttgtcttactccttcctctcacttccattggtattagacatacatatatatgggtgttctgtggacaaaccatatgtgagcattctttgagaaaatggctttgcctccatctcagctccccacaactcctggcttaaatctgttaggcaccaggggaagatctctgtgtaatgaatgactaaacaaggtgcaagacactggatagatgacaatgaagggaatagagaagcaccagacaccatctcagcattcaaaatgtttgtagcctacttggcagataagcaatatacatatcccacattaactaacaatgcaatactgatatggtttggatctgtgtcccagcccaaatctcatgttgaattataatcccagatgttggaggtggggcctggtgggaggtgactggatcatgggggcagatgtcccacttggtgctgccctcatgatagtgagttctcatgagatctggtcatttcaaagcatgtggcacctccccctctcctctcccacttccccctctcctcttcctcttgctctggccatgtgaagtcctggttcccccatgccttctgccatgattgtaaatgtcctgaggcctccacagaagctgagcagatgccaacatcatggttcttgtacagcctgtggaactctgagccaattaaacctcttttctttataaataacccaatcaggtaatcccttttttttttctttgagacagagtctcgctctattgcccaggctggagagcagtggtgtgaccttggctcactgcaacctccacctcctgggttcaagtgattctcctgcttcagcctcccgatagctgggactacaggtgcctgctatcacacccagctaatttgtatttttggtagagacaggtttcaccatgttggccaggctggtctcgaactcctgacctcaagtgatccgcctgcctcagcctcccaaagtgctgggattacaggcatgagccaccgtgcctggtcccaatcaggtaatttttcatagcagtgtgagaacactctttctggctgaaaaaaaaaaaaaaattcattggatttacaatgcagcatcttattcctttgtgggacaggaacgtagtagagccacagtccacttaaccactatttaccaacatagatgtagagtgggtttcttaaataaactgggaaaaagtcctagatttctcaatcatacatgattttcttggctaggaaatcgtataatctgggaccagaagatgaccagaatctagttcttctaagggagaaaaatggaaatccagcagcctagctgtttacccacttttctttattaaaaagcctccacctgctttgaagactgttcacaagatcctccaactgcctcaaaacatctgcttcccactaaccctcaaaggccatttggagttccaaggccaagctcctgcttcatcccttgagcactgcttttggctaactggtagtattaatattctggatattccaaatcactctgcccttcaggggcactcctctgaaagtattaattcaatcacttcaaatatttgggcttcattataacctttttttctctcccaaatcatgccacttttatggcttgactgtggaagtaaggttttaccccacaatcttttttttttaagtcaaccggtaacattaataaatgtccaagaggttttcttattcctaaactactctgaattgaggactgcaaattataaaactgatcagatcccagccagtttcattcatcatatatcctcagctgtttagtttcacattctgtttcatattctccaatctgtgaagagtcaagtataaatactgttagtatcatggaaggaagtaatccacttcatagtgttttgaaccagtgactcctggggcatgggggtgtggggtaggtggggaaagaccacagagataaagggttaacacagaaacttgaataacagtctttgcttatggctttgactggctaacatttaacaccattgctcctgagattaaaatgaaacaacttgccaaggataatttcattcttgcagccaacagcgcaaatgtagagtttcctgaaggaataatctgcggaaatgcacagcttcccaaagcagccatggtatgttaatatgggatattttgctttccaaggaaacaccaaaaaaatatccatagtgttaggaatggagcaaaccacatgagaagagaacaggaaaagcttcttctctcccagaaatgacctcctcccctcaaaatggtttcccacgtgctaattgactgcggggatgagacagtgtggatacagctactagtttcacttaagtcttcttatgctgaaacccacagtttacatcaaaagctgctaaagtaaaccaaataaaccaaaatggaacatttcattcctgtgtatttaaaggcaggaagagacatcatcgttctgaaaatatacgagggccatgcttaaggattcagaaaaacaggccaaagtcaggcttgaagaacacccacatcccctgtgatcataaaaccctcagattttatgggggaactggggggaactggggaacagagacctcagctttagaagcggcaccctctgttctgggcattcctttcttcccaggtggatgctgtagaggtccccagtagctcataagcagactactgggactgcggctttccagcatccctgttccacacaggaataggatgctacatcgcaaaaccaatgaattttttaaaaaatccagaaggaggtaaaactttaagtttctctttcattctattgagtagctggattttggaaacaaacacaccatgccctaaattacgtccaatgcaataaatggcacaacctgaatttttggtccctagtctttgttcactggggtataacacataatcagcctcttggtaacaaggggatacttaggcagtacttacaccaacagaaaagaaaacgagggctgtgactcataagcagtatgtggtccttcccaccagtgggtactgtggcgttgtgtggaaacttggaggctttaataagaatctgctacgtcagcaccatgtaatataatagaaagaactcagtgaggacttcagaaaccctgatgctgctctaggcttcgctggtcatttctcctgtgatttgagtcaccacatcacttccttagtcctcagcttctttatcaaagtacaccaggtgattcttatgtttcttccaggcctctctgccttaaacctaacccaggggttaacctccaggagtccttttcagcctgcttcagcctttctaacaggcctccccttaatctagtgccctttctgctaccccgagataaacaccacatgactcgaagtgtgtttgccagacaactgtttagtcctacaaggcgttttacatgtatggccaaggagcaggaacactatctttgaaggcttcttttctaccagcgaagaggctggcaaccacaacccctcttagccttggcattcccatcactaaagtgggacagacatctttctcacggagctgtcaaatatcaggttctaagccattgtgaacactgccagatacaattcatgatgtctggataagcgtgaatttcagatacacaatttgggacatacttacattaaaaattatacatcgtttatctgagatacaaatttaactgggtgtcctatattttgctgtttgccaaatctggcaactctacacatgtgagacgctgctgttgttggtcttaggtaccaggctgcctcaccaaaccagtctttacgcagaataaaacaagggtccatgtggttcaggttccttctgccctcctacactggccccctttctgctcctcctatcggcttcacagcattacacatcccacctggctcccttcttcctgaggcacctgaattgtctactgaccacccttccaagcacagccccctcccccttcccttggttgaacaagctggctgaattaactcatacacatgcatcactgatcatttaatgagtcatcagccccctctgaaaccactgctttttctttaaaggtcatttacaacctcaaattaaaatgactgaattacaggccgtgtaaaagttgaagtggaaaaaaaagtaggcagaggggtgggggaagctgggaccacttaggagctggctctcacagtagttcctccagcgtgtttctgcttttcctagtcttttccttttcttctgagcccacaacagctcttgaggcagttgaagaccctgtagataagggaaaaaaggaacggggaagtgggatgggtgcagtaggaagctggggtttacgtgtagactggtcaccacattcttcccacgcagttcctagggtgccccagcactagcatctaatttagattgtagaaaacacaaagcctgactgaactttctcctttttaaccagcttgtgttcggagatgaaatacaattgcacgagcttgtaactcctggaacctggacgttggtcaaatataaccccaggggccataaagaaccatctctctctttccagagcacatcagtctagatggctctgaaggctaaccagaggaggagggggtgggacacacttgcatcagtattactcaagcacccctgactgggtcaggaggacaccccttcggcccagctctgccctcctggaaggatccctgtccctaggttattcggtccaagatgacccttcaccttcatgcccacaacccatcagctaacagcatttcaccaaaccaccaaaaggaaaaggcttgaaacaaagtaaatcacaaaatgtggcaaaacagatagtgtactatccttctcaggcaattagcctcagcagagtgaccctcataggacctttgcaggagatggagctgctgaatgtcccggcccactattgaaggtgaggtaaattattaccaactggggaccaagaaattctgtcttataattttgcaatacccactgcagagagctgctggcacctgggcatgctgactcagtggaatgcaccttcccattatcttcatatcttcctaactatgccgagactagggtgggaaatgttttagatggtaggagtgggagtgggaggctgagaatcctacatgccccaagagcttcacattcttattcaatcctcccaacagcctaggaaggagaaatggacccctgggtccacgcaggatttgaattcatgtcttccggaccccagcgctgattgtcctccacacgctatttgtttcattcagagtgctgagctctgatttcacgtttcccttggaagaatggaatgttgatgccttttctggctgcgctgtgtgtgacagggacagactactcatttcatgggcttataacaagggatctactgagggatttattttaacagaggacttatttataatattttttgtaggaaaacagtgtcttgtatttagttacatttcatatcttgagttgtacttttgtagcacacaagaatttgtttctcagcagacgatggtgaggaactccagggcaaaatagacactgggctttactcctggataatggaaaatggcctcttcagaatcttgtgcagtgagccagggaagtctggtcactcctgctaatggatcagttcactgttgttaacaaggagttaaaagagcaattcttccactctctctcaaattagtttgatttcttgactttgtattatactgtatttttaaaggatagttcttctttacagccagcaggagtttctcttgattactcactcacttacccccaggtaagactaacacatggcacaaaaagcagggatcgagtgccctttatctagtcacctgttcagagggctgcccaggcttgggtgctatgttatcaggttctgcatccagtcaactacaaaaggttaatcattgcaagagccttagaggcatcctaagtgtctccaaatgaataggttgggaggtgaggcctggaacctgcattttcataacttccccagggggttctgaagcacccccaggtttggggaccacactggtatagaacaccctgctattaaaggtgaggtcagggccggatgtggtggctcatgcctgtaatcccagcactttgggaggccgaggtgggcaaatcacaaggtcaggagttcaagaccagcttggtcaacatagtgaaaccccatctctactaaaaatacaaaaattagccaggtgtggtggcatgcacctgtagtcccagctactcgagaggctgaggtaggagaattgcttgaacctggaaggcggaggttgcagtgcgctgaggctgcaccattgtactccagcctgggcgatagagcaacactcagcctcaaaaaaaacaaaaaacaaaaaacaaaaaaaacctgagatcagaggtcagtccctctggaaccactcagctttgctgtgttacaaaggcactgaagcagcaaatctgcaaacacactctctatcaatcagggtaccagcaggagacaggtggcaccctcaaattatcacaaaggggtatttgccaagaagtgagcagggcacaaggcctagtgcagccccctgggctagtattgagggggaaacaggtagggtggctctgttatacctaaaggctgaaggggcaaggtgaggaagcagacaccagaacctggacagaaacgctcacggaagggctgcctgacagggatagtgaccccatttcagggctgtagcgaatcaggagggaccccactgtgggtagatattctgacctccctcttctccctccctccagtctctggacattcttcttgctaaactcaactagaaaccaaagggaaaggaactcactgacgttgtacatagaagtcaattttctggggcacagagcagagtggagagtatttggatacagaggagtatgacgaagacgccaggtgcaaaacttcaaaagcaagcataccagggagtgtcaaaccctcaccaccatcatcacacaggacagcagctaaaggctgtgccacacccactcatggaagcacctgatgctataggtaactgcagagttctaccagtaacttttgaaatgacacaacttcgtccagagaagtcgttcaacaataaattcacaaatgttcttatcaaatatttatggagcacctattccatgcaagaaatgatatcttactttagccatgtagtgaaggtttcaatgtgttttatgttaaactcggtaagtgtttatctggttttatgaagcccccattgcttttttcctaaaagaaacaaaaataaatacactacagaaaaggaaaatatctcagatttttaaaatggaaagatactaagctttaactgcccatactcatggcctatagcaaaagtggccttttaaaaataaaatatatgattttccagttaggttttacctccatcttggcaaacaaacatatgatgtgctttcaggtagtctaaaataaatgggttgaagaatagctttatcccatctttcaagatccacacaactaacgtcagttccactaacctgaaaaagttctcaggaggcatcgcgattgattgccattctctactctatggttaccttcagtgggtaaccaatgagagacatttacatttccctgtatccatgtgcacttttcatcagcataagtgaagaataagcacgagtctcttgagtcctctggattagtcatggtgcttcgtggcatggggaatgatgtgagctcctagggatacaccaggttatttcacaaacacatggcagatgttaggtggcactaacatcaaaccacagaacatgaaccttatttattttccaatatttttcaggcaccaaagtctcagccagatgttgccatgtcagtgacaccctccaacacctgccaatccccctcttcactggggaggtgtggccttaggctcggagccttcaggcatgggcctctcttattttcacttattgattttaatggttatcatttctatcaaagaatatcggttttctacttgagatggtcatataaatttcttttaaaaatttagtagaaaaaataaattcaagggaaaatatatattttcccttaaaaaggtggcacatagatatagcaaaaatcattaaggtagtatacaaatgactaaagtgtggaaacactgatgtaatactaagtacacctcatgaatcagaaaaacttaggttttagttctaactgccctcaaatagggattaatgactgatttccttactttataaaaagcaatcctttcagtgaaggtagtagctctctggtcagatggctgtagctcaaagagggtaataaaaatttagtaaaactgctttgtaatctgaatcctgtcttgttcataatatgacagagatgcctatgataaatgattaaggattaaggtttaaagatttatatcactattaggatgaaaatatgggaatatacatcatgagggtaaggtaaaggtggtctccttgtctgttggcatcaggtctaacaagggggcctttggctgtcactggaatgggaagagaaaaacctctgattcatggaaggccttcactgagagtatcccagggccatccaggcagaattaaattacaagtgcaatcagtcatgggatgtgaatccacttgatgtcggtctggtaaaaatactgaatattctgcggtattgaaagtgcaaacactttcaatggttacctcctgtgtgaactgtaaatctcttagatgttttagttcggccctgtttcatcccaagtcacccaaacccgcaaactctaaccccttgaaaaatttacatttatgttcatgttcctttcaagttaagacctcaggaagcactaaatcaaccaatgtatgctgtcttttttcttcttacaaatacgagtgtgaagcccagtgcctgggtgcactcacacccacttccacacatgcctacacacccctgctccctgtgcctccccgaaaacccaccctgtgggtggagcagaaatgaatgctgcctggggcccttccaggaagaggtgtttgaaacaaagcattctgtccttctgaactcttccttacactcgcgctttgctaaatcccatatgtcagcagtcttcactttggagttagggtccttttcctatccactgttgtttacttgttttaaaaatatttctacaatgcatccgttgttctccattcactatataattgtataatacattggcaagcaactgctcctcaatgaataaaagtgtgttttactaaagaataattggagctgcttggcacaggagccaaccttgcccggcaccagctgatatatgtggcaaacatggctgtcttctgcctgtgcctttgctgaatatacaagtagtcaggagctgttaactctaggagctcagttttaggtacacaagatacagaaagtttttaatgctgtatgatttcatttatgaatttctttagatttactaagttgctagaattacaggaaacaaacagactttaattttacagaagccatcaagtttagaggaaactttcaaaaggaaacgttttaaagatgccataatgggtagtagcaggctgtagggcttggggtatgtgtacagtataaggattggagctgtaaatgtaagtactgcaaacactggacaatgtgggtcaaatggcttctgtgttccttattctaactgaatccagtttcacaaatagacttgtttgaagacaaagggcagaatgtagttttatatttcatgatctctcaaagcacatctgcacatttttgggtgactgccccacccttatccccttctctgggaatctgttccaaccttacttgaccttacatatgatgagggtaggggtgaccttacatatgatggggcaggggtgaacaactgatgcaagggaggctcatccctatactggctaggaacctacaagttgtagcctggtttaaaaagataagttaaactaattagatcgttctgccaggaatttggagttcgaaaatgaagaaggtattgctagtcagctgtgggttgctaaactgtcagattatatagattagacgtgggcactgcagcgcctattgtgggccaaggacaagcagagggagctggtctacagatctggaagaacgggactctccaggcatcacaggtatagccttgaaactgcagcacaaaggaagaaacaaatgtactggctccaagggaccacgtcctaggaccctctgcaccccaggacccagtttaaagtgtagacagtgctcaaaacacttacatggaactgtagggaactgaatttggcccaagggtagccttgtaaagagccttgtacatccttggaggtagaaggaagtcagacagacatagagctaaactggcttaagtgaaaaacagagagcaactgctatcagctctgcatctaagtgaatgagggcactcggaagaacagggctgtggctgggcaggagtgggggtgacaaggcctctgggaggaggcagggcagatggcgatgcttcaggggagtgtagcagaaatgcccatggcaaaacctcgggactctttcatctaaatggatgtgttaatggctcccagggagtgggtttaagagggcttagcgcatatgccttcgtctactctactggctgtaaataacccatgttcttgtctgtaccatctgcttggtgtgcactttgtggaactgtgtgaagaaaaaaagtttggggagaaatggctagaaatactttagttgtatacttagaaaccaaatatgcttacacagctaaattatcactcttcctttatggaggtaattaaatcagaaattttcctttttttttttttttttttttttttttaagggagggaggttggacaggaggaggctataaagcttcctgaaggtcaaagagcaggtcatgggcacagaatgaggccagagacaagtctcctaccaccagtgttaatcttgagttagtcacatttaaccagcctcaactgcaaattcttcgtctataaaggggtgtgtcactcaccttcctcagagtagtgttttgagaattgactaatatctaaagcatgaaattctttagataaaagacatcatgaacatactaaatatttttatggaaagagtcatgccctctgtgaagtgccaagtagatattatacacgattgttgccctcatgtacacattgaaatcgcctcactcatctttctagttcctcaaaattatacaaacaatataattacttaattcattaaacaactattgaatgagcatttactatgctatttacttctaattttaaacctacaagtgcaattgtgttgtaaaatcatggacttactgtcttgcaagtaatttctaaaatacaaagttggatttgttttcaaagttaaataactgatattttccctctgctagatttgcgattatctgtagtttggtgatttttgaaagagttcaaagaacttccccatccaacccagttgaactttaccaaggcctaccacagcagcaatttaagaaagatatactcaccaccagagaacccaacaccttcaggaagactctacaaaacacagcatgagtaaatgactcatgaaatgcaaacttgagagaataatcatactgcactagcctcatttacaaactatatctcatcttgacaatattcccagaaagaatgtaggtcaaatcccaataaatgaaatcccagtgtttctcaaatactttttatggccttcaactttcactttattggaatttgcttggaagaaagaggtattgagtgctgtggttaagagctagcatgcaggactctaacagactccacaccataatgagaagttgcagacttaaatcagctactttacctctctaggcctcagttttgctatctacaaaatggagataataatgacccctatttcacaggatctccaaaaagcagcagtgaatactgaaggtcttagcagtgctagaggaatgttagctattaatggagatgttcactatgtggtaagaggatgtgcgtggatgccagagtgtcctcaaagagatgtgagttgaaacttgcaagtgggttgaggacgggtggggagcccttgctacctctaagttcccgtggctctgacgcccttgccagacagaaggcacagaagtatcaagaaacccgagggagatggatcttccttcagatctgtcccagcatgacatgagctgaagtacaagagttcaggccgccctggaaccagcactagcaaatcttaatttctcactgtgtcccagcgccagagtgcctcactgctgtcttgacttatgttcactctgtaaagagaaagcacatttgctctggaggagttgaaaagctacagggaaaaatcccatgccaacaatcgacttcaaacagtattcctattcaacattttagaaataggtcaaaatgatggggagaaaacaaaacctaacatttggggaaactttcagaattggctctggttttatgagttgttataattctaaagacaaaagtggggaggaaaacaataaagccaaacgataaagccattttcattgatgaggtcccatattctcacccaaaacaaaacaaagcaaaatctgaaacataaaaagattttttttcactgcaagcttctggaatttcctagaagaataaagaaataattaaagttctaaattaaatacaggtaaaatttgatctatgctaatgaaaagttggaaataatgaagaatctgaaatggaaaaaaattctgcaaaaaattttatatacatagtatagaataatatatactgttagaattaagaaaatattatataaacctaaattatgaatttcacccagtggcaaagatattttcaaggatcaatgccaaacacaatacatattttaaaaatatctatttggtctgagccttcaaaacaactccatacttgttctataacaaaaagtgggagatggcaataaaataaaaataattaattttccattaaaatgaattcacatggaagttctactctatatggggcagaaatgcaagcaaggatttgactgttgaacacgtatgcatgagtgcagcgaacaggtatgttctcaacttttaaaaaaattgtaaaatgtaattcctggataatctcaaataggcaaggcaggtaagctggtgaattcacagttctgcatgtgtgtatgtacacaggtgtgctttaaaaagatttcctaatagacttctttgaagagctggcttccctcaaaacaaatttaatataggaaaatttaattttgacagtattcaataacagaactagctcatgaaatccagctcaatcacactggatgagagctggagagctgagaaaggttcagagcagacacctattcaggcagttcatattcggtcagcccagcaacacctccatgttctccaggagtagaagcagcaggaaatggctacagctgcagcctcctgcagcctgtaaactgtttaaacatcttcccaaataacagagaaaatggtcatattatttctgattgcataacaagcaggagatttgaacaatgaattaggaggaactgaaatgtttgtagttttaattgtctaaaatgtctttcaattatacttaattttcattccaataaaaatttattacaaataaatagcaacacaaacaaaatcccccattaaaccagcataaaaaaaatctaggtaactactccctctctttgttaataactaagtatacacatttgctgagattcaaaatgctgtacagtcttagtatggttccatttttgtaaaatatataactagaggaaaaaaatactagaataaaatattccaaaggccagagacattggtcatctttgagtagcggaacttcagtaaaggagttctatcctgttctctgagtacttctttttttttttttttcttttttttgagacagagtctctctctgttgcccaggctggactgcagtggtgtgatcatcgctcattgcagcctcaacctgggtttcaaacaatcctcccacctcagcctcacagctgagactacaggtatgtgctaatttttgtagtttttgtagagacggggttttgccatgctgcccagcttggtcttgaactcctaagctcaagcaatccacctgcctcagcctcccaaagtgctgggataacaagtgtgagccaccatgcctggcatatctgtcttgttcagctactgctgaatttcacttgtggccagaaaataaacagtattttttaaaaatttaaatgctacatagctaggtgataagctaaatggagaccatatatttttaggcatttacctttatgattttttttaagtactccttaaatgcctctttgttctttcatgttttcaaaaatatggcatctattgaaaacaaaaggcaattaatcaagtcatacaaatttaaacatatttaactcaaagggttatctttgagttaaatatatctttgaattaaataagtcttccttatgacatactaacaactagagcaaaagctctgataatagttacacgatgctaaaaccaactagatttaagtcagtagtaatatttatacaatatcctttcagtgaggattcagttccctgaaatagacaacctctcactgattctaacctgaccctgaagaagaaaataaaaaaagatcttcctttttaagagaaataaaattaagactcaaagaaaagtgtactccatagatcataaggaggtcacaatttcttagtagttaaaactcccattccaagcacactaaaaaatcaaagaaatataagttaaaattgcagagtatcatttttcacgtatcaagtttgcaaagatgatgaccaataaaaactattatcatgagaatatggagtaactggcatcatctgacacttccagtaaagaatgtttaggcaataaatacagatcaaacttcaaaatgtgccaactccttgaccagacaattctcttaggaacttattctaaggagaaaataaagtattcaaagacatgttgcagtattggatgttcaatgcagtgttgcttctaacagaaaaatcagcaataacctaaatatccactgagagaggagtttgctgctgcatccccagaatttagcacagtgtctgctacatagtaagactgaaaataaatatttgatgaatgaatgtcaccatgaataaattaacaggatatacatgtataactgaattttatgcaggcattaaaattttgatgtaaaattatattcaacaacatagaaaggagtgattaaaatagattatagattatagattagcttatagagtacaatcccaattacatgaaatcatatatttctacctgtgtatacaggtgggatttggataattttcacctttttctatatatttttctgtatttttgtttttttaaaaaaacatagcaaccacatattttctatttggttgagggaagtcctattctttaaatttttatcccaaccactcaagctatagaagtattattaagtaacagataacattcacagggtaaaatttaagacaatttctttccccttgatttctcaagtactatcgtactaaaagtcctcttttctgtaagttactcctataatatggccaaaactaaacgaatacatggtgtatccgttttaaagcaggtgcaataaatgccctcgtagctatcccactgaaaaaagaatctccatgcatgctatttcactggtttgactttctctgtccacagcccttctgaacccagccttgttaactttctggcaaaccctcatggcccaaggatgctctcctggactctgtgtgcatccaagtgcattcatcatcaatggactccatctgtcggctcctcacacaaagacctcaagttatttggcgaagatacattgctttccttaaatgctggattgagtttaaaagtagacagcttgtgtcaataacaaatggtttctggtaattattgttttcaatccaggataaaatataagtatccctaataaacaaatgacaaagtgtctctctttggattccaacaagagcagcgtgattcctccactggggcactgtctggttacaacagtgcctggctgtgattctggtcagcctctgaaagcaagagtcagggccaacaaatgctccatctatgcacatgtgccctgaagaatcagccaactgtgagaatggcaaagagcacacagatgacctgatgactgacagcctcttcctttggatgccatttatgtgaattccagaaatctgctgacagttatctcatgccatgccaatgcaagggttcaccacgctaagaataagctatatattttggtcttgcagtatttacccccaaataatcctgcacagaaatggcaaggtgaaaggctgagagaaacgaagagggaccactgggagaaaacatacacatctaccacttcccttcatgcaattcctgggtgcaatatcaatccaggtgggcgctgagcacagcagcagcacacacccaacacacaaagcatttataaatacctcaggtatgagggtggctggcttgatctgatcaagctgattatggacttaatgtaaatactctttttaaaaaaaggcatatatatgaagacaaccctatgggcatgagctctgagttatgttttcagtggtaatgatcacacgtgtttgatgttggtaccactaatttgcaagatgcttggccagcctggtggactgtgctgttcaacgcccacagcccatcccaggggcccagctccctccatggtaatgagtacctggtctgttgccttgctgctgccactgctgactagctttctccgatgctgctgtcatgtgcttctacccaaagctgtctgcctttgagccacagctatttcctgagggatgtaaaattcaacaaactgcaaataaacaacacagaacatgatctcatgctgtcatgctgctgcttctctaaattgtaacatcgtagcagctccttgatttacaagcatcatttgaccctcacatttctcttttggttacttctcctcttgagtccatcagcttcctccattgcctaactatgtgtctcttggaccatccggctatgcttcaccccattcagacttggtggctctcaagctcaccaagctgcaaaacgtgttcttgcaaagttcaccagcaacctctaaacttcactgttctcatcccccaggacctgacatttaacactgtcagcagctctcctcactagtcttggctaggtttgatcatcttttctcacccaaactgcctctttccattccctattttggttgggtgcacagaaacccagagtgagttgtctccttctcttctctccccttaatcccctacatccagatgcagcttgccatcagcaatcctggagattcagtcttcaaaaagccttgtgattttcattaagatttagtgcagataaaataaaacaacattcccaaaaggagtctgtaaactacagtacatctacaaatacaaggtatcagtacgggcagaatcattttattccttttctgttccttgctgaagtcattcaaattcttattccaacatttaaatccttccataatatgaactcactttaagtctccaactaaatcttggattattgttttacgacagtccctgaaatagaatattctttcctctctgaacctgtctttaaaacatagtacttgaactgccttccccgagaccatgacccatattaaattgagtttcagccactccattaaccccttaggcagatttttaattagttttacagacgcatagactgtaaaggtctttgtgtagtttctactttcctgtttctttactacttactttgtgtttgtttacatgtttttcaaatttgtgcaggcagggatcatggcttgatatggactgttagtgaccaactgacttcagctcattactgttcataaattagtctcatctcccccactttaaaaaaaatacccaaataaatttaaaaaatattattctcaaacactcacccttggtgtctcatgcagagggtctggcgataagacagttattaagaatatttaaaagtttcatttcaactcaagaatgagaaactcatccatccctgacaaaaacagcttaagaataaattccaaatacccaagtgttattttcttcactccacaaacccgggaacattacaggaccatgacacaagtttggatgacatcctatggctatcagatgatagatgttttcattggtttctccttaaatcagggctgtgaacagtccatgatactgaatgggaacccttagcaagacagctcaaattgtatctgacaaggctcacttcataaacctcaactattttcctaatgaagagatgctgtgttaaggcaattctctttatataaccattatgcatttatattccctttaaagataaatgatatttttatgaagaatgaattgcatacaaaatactgtcttagtgagatgccaaaatacacacccattcaaaatatacaaaacagaaacaactagccaatatttctcctaaccaaaataaatggtgtgcagaattctcttttgaatagtatggtgatcttaatgacaaaagcaaaattaatatattactattaggaaataacctgagaaatagattaactgtaccttataaaaattatactaatatgtttactacagcgcttaggatatttacgtttgaatttaaattatgatataatttagtattctctgcataatataaattaggatgatctaactgaatgtgcaaaaatgccaacattcattcattcactcactgaatttacaggtacgtatagacaagggaacatgaaaagacactattattaccagctcagagtcttaggaaaaacagatgcataattataaaaaaaaatgatataagcactggaattattcaaaatgctatgctgggaaataccaacatttaagtagctggtagatcataaaacaggtaaggtagacatctatttatgcagaccagggtcagtagcagtagctataaaacgatcctatttatgttaaacaacaacaaacaactaggttacatggaaaagggtcaggaaaagacaactatccaggggttaaccatgactaattaactctgagaagcagagtgggaaggaggataattttttttaaaaaagactttacatacctctgtactgtctgaattttaaaaacataacctgaaagttcatgtaatacttgataaagggatcatagttatcttcacagaattggaaaaaactactttaaagttcatatggaaccaaaaaagagcccgcattgccaagtcaatcctaagccaaaagaacaaagctggaggcatcacactacctgacttcaaactatactacaaggctacagtaaccaaaacagcatggtactggtaccaaaacagagatatagaccaatggaacacaacagagccctcagaaataataccacacatctacaaccatctgatctttgacaaacctgacaaaaacaagaaattgggaaaggattccctatttaataaatggtgctgggaaaactggctagccatatgtagagagctgaaactggatcctttccttacaccttatacaaaaattaattcaagatggattaaagacttacatgttagacctaaaaccataaaaaccctagaagaaaacctaggcaataccattcaggatacaggcatgggtaatgacttcatgtctaaaacaccaaaagccatggcaacaaaagccaaaattgacaaatgggatctaattaaactaaagagcttctgcacagcaaaagaaactaccatcagagtgaacgggcaacctacagaatgggagaaaatttttgcaatctactcatctgaaaaagggctaatatccagaatctacaaagaactcaaacaaatttacaagaaaaaaaaaccccatcaacaagtgggcgaaggatatgaacagacacttctcaaaagaagacatttctgcagccaacagacacatgaaaaaatgatcatcatcactggccatcagagaaatgcaaatcaaaaccacaatgagataccatctcacaccagtcagaatggtgatcattaaaaaatcaggaaagaacaggtgctggagagaatgtggagaaataggaacacttttacactgttggtgggactgtaaactagtttaaccattgtggaagacactgtggtgattcctcaaggatctagaactagaaataccatttgacccagccatcccattactgggtatatactcaaaggattataaatcatgctgctataaagacacatgcacatgtatgtttattgtggcactattcacaatagtaaagagttggaaccaacccaaatgtccatcaatgatagattggatgaagaaaatgtggcacatatacaccatggaatactatgcagccataaaaaaggatgagttcatgtcctttgtagggacatggatgaagctggaaaccatcattctcagcaaactatcacaaggacaaaaaaccaaacaccgcatgttctcacttataggtgggaattgaacaatgagaacacttggacacagggcagggaacatcacacacctgggcctgttgtggggtggggggagcggggagggaaagcattaggagatatacctaatgtaaatgatgagttaatgggtgcagcaaaccaacatggcacatgtatacatatgtaacaaacctgcacgttgtgcacatgtaccctagaacttaaagtattatatatatatataaaatttaaaaaataaagacagagacaataatctaaaaaataaataataaatttaaaaaataaaaaaagaaagaaataaacagtagaggtagaggctgcaaagcagactgagagagatgagtgagaagtagaaggaaatgcaagagagagtagagtcagagaggcgaggggaggacaatgttgagagggaatgcatgtcaaccacaccatcattgactgtcaaagaggcagaggagcatgaggacccaagaaagggcttgtcacacaagagaaagctctaatttccacatggctgctacagtggaacagcagcagtggaaatacaactgcagcagggtaaaaacggggtgtaaggggatgagcagtaggtgcacatcacatgccacagggcggctaacacacaagtgaggtgagctgggagcaagtgagattatgtccctctgtgtctttcacgttaccagatgggtacagaaaaattcttgtcaattttacaaaaatctacagtgcatttgcagtgactaacagtgattatgaatggcaaccaacacttgtggccataggctacaggtgtggggacccacagggaaccgaacggaggacccagaaaccacctacagaggtggtcactacacagctccagccccagccgtggctgctgagaggccatgttggccttgtgctgctagatcatcctatttttaaagaaaagccataaatctgcatttaaaaaaatgtgaaatatcctgacttctaaacaccggctcaaatttttagaaaacactggactagacaaaatatgggggccacctcaagcgttacggctttctgtaagcttggcattgaggagaaaatgtcaggcaaaaaattttatacttttttcccccttttataaagaatggaagcttttcacatgttgctgagggccaagatctaagggataaaaatcatcccctcttacttttaaaatatccaatatttgaactaaaaaggactctctctgctttcctttaagattctacacactcgcaggctctgctaataaacatttaatccaagctcttgtatcatgctaacataacagatctcagctaactattacaagtgttaaaatatgtgtctgggtgggaagcccaaattaactggtcattttgaaaaggaagccatgaggaaggacaaaacattctcacagaatatatataaacactcacattgactttcagtttatcaaatttcctgaggaaagaagttcccatttgtagctgacgtatattgtaacaacacacccaaccatttcattagaatgctatttttaatcagttcggcatacattatgcctcaggaactgaaagcaaggagtacataaagtcatcagctgtggatatagaatactcagaagtcaaataacatttcaaactgggcaaatagcttaaaaagcatagcaactctacaaaggaaaagtttcaactgctcttctgtgagcacatggtctttaaaaaatccccactgcaaactttggaaagttgaaaaacatcttttgcaagatgtgaagaatgcatttggtaatgactcacttgtgataacatcactgggtgggccactgccacagaatctatcctaagctcatttcactctgctctggtctcttcatagtctattaaggggcaacgtggatgatggtaaatattagtgcctctactttgaaatgattttcctcccaaggtaactaatacattctcaggcatgtggaaaaagaactcatgcaaaagctccctgtatactagacttaactttctcctgaaatttaggagaaagccttgacaccatcatggatgagagaaatctacactgcatcttgttaacatcagatgatgttgttgcccatgactctgtacctttgtctatctatagtacatttttctctcttgcattcttcgttttcaggtcacatatagttctcctctaacttatctttctgtgctcactctgtctcatctattttgctttactctcccccagtcattactctgaatttcactttttatttgcttaggtttgggtttagctatttttcttctcaggtctcttatgccttctttcattttcagaccctgtcccctccactactcactattcaaatgaacactagctttcagccaaagtgttaccaggtagccacaaaatgaggtcttgcacacttttactcctaaggttatctgaatcaagttcacaaattcataaactgaaccaatgcatttgtcaaaaagaatctttattttattctggtgattaaggaattgtttaaagttttcattacttctgaaaactcctctgagctcccatctctgagcattgcaggcattgcctcagatggtcaggcctaacatgagcactccactggttgtaaaacctgctagaagactgacagagtcagaaagccattgcctctgatgcgtaggaatggtggtccacaggccttgctgggatctttttggactgcgggcagggaggcctggacagctctccatggtcccgaacaagacaaacattccagtgcacaagccctttgtgggaggcaccctcttttccatgtagctactgtactttcaagatcttagctgaaaaccaatttaattgccttaatataaacaccagacagcgagttttattaatttggcaactgaaataacatagagcttctgggatttatactctatagagggtagcaacataggagacagagcacagttttgataactatacagacctgggctcaaatcctagcattttctctatcacaggataccaggcaagttactaagcttctctgactgtggttttctcatcagtaaaatgaagatctcaatacctaccacacaggatttctgtgagcattaaattatataaggtaagatagaagaatgcctagtgcagtgcagacacacatggtcgtgtgagggaatggaagttagtaacacatattcccaggcttactcttcccagctgctcatgtgcactctggctttgccttcctggttcttccctttgccctgacctgtttgggggagttctgtgatgcagaatcaggaggaaaggtgggagagcaggtgggccacagttaggaaaggcttgggggctcatttgtaagggctgtaacgtgtgaggaaagctggagggaaaaagagggacttaaagaaatattgctgtaattctatatccctctatggtattgagaaagacaagtcaagatgtgctattctgaaattactgtcactagattgtatttctttgactcatatcattctgacactggattgggtgggtctggatacattaagagttagggcgagtattctataatttcattactatttaagtatacaaccatgggagtagaagcagtagacaagcaagagaaaaggcgaagggaaaacaactgagctgccaatctcattgaaaaaggaatacagggaggagtgaagacgccagaggactgtcaggttccattacccatccctgattcactgggatttctgtgagttgctagcatttcggtgtttcagttttttcccttgtgaaatggcagggtgggagagctacagcattatggcacactagttggccttttcagagctggtgtggaggtatgttagcatctgggcctcccaactctggcttttactgttccttaagaagtacgcgtgtgtgcacttctatatatgtgtatatgtgtatgtatgtgtatttatgcacacacatgaattctggagctacccctgcacataccattaaatcatttaaaaagaaagccttcaaaagggtaatctgtttatcccttctacattcaaacaagaatatgcctgaatccaaaaacatgactaatttcgcttcctaaaaaatctccaaaggagagatttatagcccccactcccttaatgacatacttgatcttctagtaactcataatggaaaagttcctctttgttacatttttaaaattgcactcttgcttgcatttccaattctccttaccacattattttagttttgcataggacatatccccttctaacaatgacagaatttactcatgtattaatatttactgcttactgtctcatctcttttctcccagctaaaataagtgaccttgttcaccgatttaggccatgtaccgaaaacagtgcctagctcataccagggacccaataaacatttgtaattagaagctgactttttgttctgtttctttgataaaatcacaaacctacagagctggaagggaccttagaaagggacctttagagatgagaaaattgaggcgctgtgaggggaagctgcttgtctgaaattttgcacagaatttcctgagcccttatcagagctctttccagctcatctcagtgcttccacgcagaactgtggtcctggagacagggcaagagtcggccaacgagagaggctgaatctcacctcatttagagcaagagagtcagagagaagaagctgtaacatttatttacagaaaagtaaagtctcataataataatagtctatggatcagtagcagctttcatctaaggatctcagagagcttatgaaattctcatcccacaatgtgaggtatcattatctgttctcagtcaagtaaattaagaagctgagtgttctatggtcttattgcaggctggttcaaagactctttggggctctatgtcctctccatagtttttctcatccttaacaccaagctgcaacagctacaggaacctcccagtttactttcttctagatgtccctaaaaccattccggctcatgcccatctttaagccagtgtgtagaggaacaacactggggatttgaggtgttcaatcatgtaatgcccccttttgggtcaccagcggctcaggcttcctgagctggtcctggagaaaagctgaccacagtgacactgggggtatacgacagctttttgggggtaaaaagaattatttttctttcctcagtttactgcccatgcccccacataccctttccatcaacttggttgaaagttttacccacccacacaattacagtgttcacaattattcctcagctatttaagaaccacattaaagaccaattagattgagtcaacacaacaagccctgctgaggagcccatttagattttgactaagggtactctttcttcttgggggagatgggggaaacggtggattctgaaatctgacacttctcatcataaagctttccccaggcccctaactgcacagaggcaggcaggcttgccctccttactctcttggccagtaaagatgctgtccaaccagtgcagtccaaaacaacctcagcaccacaatggccgcttcactccgtgtcaagttgacagtgttgttctagagtagcggaggaaccctggttacagttgactgtgtaccctgagaacttcctcctcttctgcagctcctgggactgcactgctgaccttgtccttgggctggaaacttaatggccaaattccccagccagcatcctgaggtttctggccccttggagcaagcagaaattgcttactgagctcaggattccccaaagtgttttctgaaaaacccatgctctgtgggatacccaaaggtgtgatgtggaaaaagaactttgtgatcaaacaagtttatgaactgagtataaaaatatgttaaacaacagtagttccttaaaaaattaaaaataaaattaccataggatccagcaattctacttctgggtatctagttgaaaaattgaaaacggggtctccaaaagatatttgtacgtccatgttcatagcaacactattcacaatagccaaaaggcagaagcaacccaagtgtccactgatggatgaatgcaaacaaaatatggtctatacatacaatggaatattattcagccttaaaaaggaaggaaattttgacacacgctacaacatagattaacctggaggacattatgctaaatgaaatcagccagttgtaggacacattctatatgatccacttacatgaggtacctagaggagtcgaatttatacagacaaaaagtagaacggtggttgccaggggctaggggaatggcagaatccggagttgttgtttaagaggtatggattttaagttttccaagatgtagtcatgactggttgcacagcaatgtgaatacacttaacacaactgaattgtacactttaaaatggttaatatggtaaattttagtggcatgtgttttaccacaattaaaaaaacaacacattaaacagtctttgcagtaggacttctcagagcctttaaatgttaatgtgcacagggaatccccaagagggggatataacaagcagctcttcccagcttatctggccacagaatccattttccacacatctcctgggaccaatgtgcttcagaacatgctttacgaaatgagctactaaatggaaaactgttagaaaacatgaaatcctattttttacatttacatagaggcaggcgagattccagagcctgaagtcagattttcaaaacagtcttaactcaccatcatcctctcatagaggagaatcagattctatcctcaactgtgtcactcatcagcagggtggtcttgaacaagtagtactctccccgggcctctgatttctcacctgatgtgtgggaaaaatacctgctcaacctatctcaccggtctgtagtaaaatctaattagaaacatttgtaaaagaacctgaaaagtaccaagggctattcaaaacgtaggataattagtaagtatgtactaatgcttattaaggtgcagcagacaaggaagagagcccaggtctctcacatcaggagctcagattgttaagcacagaacagacaccaataagcacagaaatgaaagaaaggaaaagaaccatagactgagcacttccagtagagcaaaaacagggagactgggagaatggaagtcagaaaacataggttgagaagctgattttactgctgtctgaccttagacaagttatttagcttccctgacttgcggcttgttcagctgtcggatgatgtagttggaagagataacctcaaaggtcacttccagctccattaagtctatgaaatactgcaatagacatgccacggatacatgcatgattccttcatcagatgcttaagggcctaccctgtgcctggcttggtgctaggatgtggagaagaacagatcactgtctccatgctccttgttgaataaagcaggagcctctggcctccagaccagctggcctcagaagatgaggctgctcacatggggatgtcagggactcatttcctttgtagtattctcctggtcctccacccccataatttttttaaaaagtgtttctaaagtatctttattgaactactgactcaatggagccagacagatggtatggaaaagttgctaggtgaagagaagtgcaagcctccacagaaataaggctgccaagtcgtggggacccatcttcctgcagagcccagtgacttaatacacagaaaatgtgagatgcccaacgatggcttgttgacagactaatgatcttacaggggcagagtgtcagcagtacaggaagatgggataacagtggtttgagacagatatgcaaggaacctggaaaaatagtttctggcagaaatgggagtaggagagccagctcccacagtgaataaattggcaatttaaaatttgctgtgtccagtgatagagaaccactgaaggtggccaaggaggtgagagcaaggtaaagtgtgtgcctgcgtgtggcagaccacatacaagggaagactgagttagaaagtgtggtagcacagtgctgggagagagtccaggggcaagatgactgggagagtttaaaggacagatgttttaaggcttgcactgtggtggtgtggacaaataacagaagggacaaaagtggtagctctgctgaaagaacacagaataaaaagttatcaatatactagatgcatggagttaagaaagcatgcttgttccaagggaactgtctataaattctctgggagatagggcagagggagaagtttatgacaacctataatattagtaactgaggatataaggggatgagctggaaatcaatggtagtgaaaaagggatctctgtttctgtcacatttagactgattggtaaaatgaagatattgagtaaaaatgtcctatgcagagaaggtatatataaagatggatttgtagacattgtagacactgtagacatgggcatgggagagactaggcaagggggtggaagtgcaaaacagaaggggggctatttgtgtaatccacacatatctttgggtccttgaataggcacgcaggggtctcaatcaagacctcctgaaatatcattctgtatcagtgtgcgtatacatgtacaggtttctgtgggggaagatttctagctttcatctgatcctcaaaaggcccccaaatagtgattttgttggcattaaaatcctcaacacttgatggaaagtttctctcctatctgcttgatagatgtgccatgttagagcactttaagaataatgcactaaatctgtattcattaacaaatttaagaaccaaagaataactgttactattctatcatcttgttaaaattaaggtacaaaatttggtataataatccaaagactccgactgacattggcaaacatacttaactcaaatattttacatgtaaaatgttaaaagcatattttaaaaccttgcaagtataggttcctcacaaaaagtttaatatgtataggatttctttagcacaagggtacctggctctgcaatattcacaaatctgtaatattcaaggaccttgccaaaaacagttgttgaagctacttctaacagtcgtgaccctccctctcaaaaggatgttatcaagtagactgtgcagtaatgactataaatatgtgacatgcttatgttactataaataaatgttgcactttctcacaacccatttaattactgttcacctaaagctacgcaattaacaaaactgtctgaattctgaaaatgaggaaagccctcctgtctctcttaggtagttttacaatcctaacaatagacttaatgaagccttttaaaagaaggatgattacattaaaatgattggggcatgtagaaattcattacatacatcctcctggtgtctgatagattaaatgcctcatcacaccctagagagagggaggaagaaagaataaagaataatacaactgtctgagtgaatatcttatacctgagattgaatctggcccccatccgtcactcaggactacacgctacacccaaagtttgaggaaaacatgcttggtaaattatcaggtaaattatgaagtgctgcttgttgaatatcaattgacattataatccatacattaatgatggtaaacaacaattatgcaagttgatataactttttcccttggaaaactgataagggatacaaaaccaaagtatagtccctggggagttttctgggactgttagcatccattacacaagtgcttccagggatagcgccgaaggactggattgtgttaaattcattcctagatatttcatatttttctgttactactgcaaacagaattgtttccttcacttgattttccagctattagctgctaatatacagaaatgcaattgatttgtctattgaccttctatcctgtgactttattaaatttactttttagtaccttctagtatttgctttatacgttccttaggattcctctacataaactgtcatattgcctgtgaatagagacagctttacttcttcctatccaatcttcacattccgcatgtgatttggtatactgcttttttttctatttaacaaccttaaacatttgtccaacttatttagcaattttgatcatcattttaattaatatataatattcaatttaatagatgtatcacagtttacataattaaatctcaaatggggaacattgaggttttttccattttttttggccaaaaacaacatttccaaattatttccagaataccatgctgccttctcaaatatgtactgtcaccatcaaagtttcaaatagacaatactagtcaatatataattaaaaactctgacagaaatattttgaaaatgccaccatcactaatctttctggcctgggatcaagtaaatctgatgaatgctattaatgaagggtgacccagaaataacaagttaaaaaaagctgcacttctgagactccagagaacatgtgcttttaatggtttaatgctctactttcagtttcataggaatgctaacaaaataagttaggcttactaaaatctagatatgaaagaatggaaatgtttaaaaacaaaacaaatcccaccagttttacatatcagagtggttagaacttacaaatgaagccaatatgctcaccagggactattcctatttcacacttaatctgctatttaaaatatggacccatttttctcaggtcaagtgaatgagcaaccacaggaaagctctgtgttctcatcaaagaaacctacaaagtaaaagagacagtaacatcaaatccagtgtaagtttactgaatttataagacacaaagcatggctgtcagaaaaatcacttgtgttttggggaaagtaatctccaaaatatctgtgtgcctctgcgtagatatctgttttaaaagctttattaggatccatgccaccatcagtttgatgtagaaacggcacatttacatgcttggcagcatttactactcagagccctggagattattgctgatcagggaaaactgagtgaaaacagagagaaacgggtgtttccatacccgtagataccaagatggaatctactccctgatgacaatgtgacccacagtccacacaagctaacctttcatgctttccataatggctgtttaaaatctacatccttctcttcatttccccagctctccacatttcctttctttcctttgtacttgcccttgccttaaaagttaatgttttttcgtgcgaatgtcaagtggtacaaccactttggaaaacaatttgctattattcagcaaagtggatggtgcacacactctaagacccagaaattcttcccttaggcacccattctagaaaaactgcagcaggatgcacattcaagaatgttcatagcacactatttaaatagcaaaactggaaatgtcccaactgttcttgagagaagggataaagtggtcttccactcatacaatgagtggaccagacagcagtgaagataaataaatttgatgcatgatgcttcatgcatcagtaggaatgaatcttaaaaatgttgaatgaatcttaacaaatgttgatggaaataagcaaatggtagaagaagaccatttatatatagtcccaaggtaaataaaagttagcaataaattgtttagggaaacaaacttacagagaaaagcaaggaaatgataaacatgaaatttagaatactggttccattgaaggagaagggtgtggagagtgaactcacaggggcttccaagctgcaggatgagtaagaggattgtttatttctctctcacacacacacaatgtagatgtgtgagtgagtgtggatacacatacacacacctattcctttgtatgcctcatattaaaaaaaattcttatgttaccctgagccctgggcccaccttcctcagtgcctccttcccagtactctgaccctctgtagggccttgggcttggactcgtcttagttggagcacttgctccttctgcctcccagctccaatcaaacagaagactcaacattgatgacctctgttctctacaaggactcacctgcgtttatccaggctactgctgatgggaaggtgaaacccagcagggatgtacagaaggtggtgccaaccttgctgcaagggaacgtgcaaggagtgcccatttctaatctgtctgcccagagtgcagacaccttttgctgagttgtactcaggagctgcaggcggcagtgctggcctaggtctcccacccacaagccaaccccagggttgcctcctgttcacaaaagtttatcagttgtattactgctgccccaattactactgagtggtacctcactactactgacttccccaaaccaccccttcttccttcctcattcctatagaataatcccagacctacccatctctcagacacccagactctcaacttggcataattctccaccttcccctatccccattttaagagtaaactcagagtttatttttctgcttcacccacagttaggagttcctggtcttggtaccatggcctgaatttagacaaaataggaatttttattggatttattctatttcaggaatgtttattctaaaagcttttcttatttcctactcaaaaattaaaattggtaagttaattcaaaggcaagtgaattcagctgttttttcatttcaatttttctcaactatttagtagattacctataacaaccagagaaactgtaactactgtcctaaagatctgaatctaggtaatttggtttttcttaaaaaatgtttcacaccatctgcattgtaacatgaaaacaaaatagcaaatctccattttcactttaatgaccctattttcatttgatcactgaaatactaaagtgatactaaagtgaaggattgttaggaataatgctcaaaatcctaaggaaattgaacactcgaacaaagaattcttagcaaagcaattttacttctgcgcagaggggtgcctccttggccagtcgccatgagaacacacctgaacaaagggtcatgagagcctttattcctgaagcaagtcctgcccctgtaccctttccccattggccagggtcggttcatacaatctaaactaatcccagttggctaaacatttgatttttttttagataaggtgggcacgtaaaagaaagtggaggggaaggggaaggggtgtctgtaatgagctagaaagttagtcctctttccaaataaggaaaggaatgtgagctggtactgataacgcctggtactgtggcgtgcctgggcatctaacaaaggcaaaaaggaaaaaaggagaaaaaggagaaaagtgtgtggggggaggggttctatgaattaaagaacaaaagattgatcagattattggaagagaaacctcatcatatcccacaggatgaatgtgaaaaacaaaaacaagaaaagtaaggacaggtttctgcaggtggtggcatactgtaaagcaaactttggctccacgaggagcaagacactggtacagttaaagggccaggctgaatggataccctccatgcaggattctgagttcagcaagaaacagagaaactgaaagacaactctgaaatgccaggtgagtgaaggtgattccaaagtgaaaggtgacaagaactggtctcagggacctggttgtgaggaaagagaaaacacagtaggccttcagagaaaggcatctgaggtggccaattcctccaatgtgggtgaagaacgctctcaatgatcataggagatggcgatatgacggaaaatatgaaaacctgtcattcactatctcgaatctcagctgagatatggagtgatactcatgggttaaacatccagtgaatgatggttgcctaatatttacatgcaaataggcctcagatattaactgatttgggctttagcccccaaaagaaaaatttttaaattatatttccaacaacaacaacaacaacaacaaaacaaatgctaggctgtgcgcggtggttcatgtctgtaatctcagatctttcgaaggtcaaggtgggaggatgaattgagcccaggagttcaagaccagcctgggcaacatagggagacactgtttctacaaaaataataaaaaatattagccaggcgctgtagcaggcacctgtagtcccagctgctagggaggctgaggtgggaggatcgcccaggaggttgaggctgcagtgaaccgtgactgtgtcactgcactccagcctggttgacaaagtgagattgtgtctcaaaaaagaaacaaagaaaaacaacaaatgcttttttctgaacggacacattttgctctgttggttctgaaatgagccaagaacattatatagtatttgttgttgttattaaacagtatcatctagaaaacacaaaagcctaattatattttcttggccactgtaaaaatggaatactgtaaagatatatgattggctagttagccaatatttattaataccaaatataagaaaacagaataaatattatgataactgtcaaaagttttttgtcctaccagttcatgggccatatataaaaaaaacactcctgacactttaccagtgaggccttcccacacctagcacctcactgcggtcaccataacgacttctaaactttacgagtgggttttataagttactttattttcaatacctaagggctgtttaaactttttctcattatcaaatttacttttttgcggtaagcggcactttgatgtacatcaaactctcttgtaaaagaaaaaaatgttttttccctcatctggtaacagtagaatggggaaagtggcaggtacttcagttttgctttttttttaaattacatttcccctactcctactctttagaatattctaaagatggacaaaatcctcccccgacacaaaggttttgtcttcaattaccgtagcattatctatgttgacacacagcaacagaaaaaacaatacggacaggtgccttccctcttgccattcttctaccctgtgtatgaatccactcgacgtcaaagttgggagttagtccatccatggccagtactgaccaaagaaagggggtacaacaagtagaagttggtaaatgatgatgattttctcccctcactggcatctcttcatctaactcctgttggggatttcacggcactttgtgcctccacttcagacactcttcacagttgcaccttactcttgatgactgtcagcttctcccgtggcctagctctttggtgagacggtcaggacttcctcaagcccccaaggctcacatactttccaccacacgacgctgcctcatgttccaccctgaaaccatctcactttctcatggcagccttatctggagggactatgcaaatgcacaaattgctgttttatcccttctgttatcatcactgatccacgcagcatctcactttctttcactttacactctgactgtattcagtagtgacacatttcacaacttaatgaacgcccctagatcttccgaaaagccatcatgctcacccaacagtgggagctgctctccacagaccacacatacccacaaaggaggatcagtctttagtagaggtgaacacttaaccctcattaccctagtaagattagtactcctcatctgaatgcaagattccagtccctcctttaaaaaaatcacccatgggctaatatttgggtatgttacaggaagtgggactcaagatttaaacctactaacatcaatgaggacatccagggacctctccactcacagtagtgactgactaagcaccctaccaactttcccttcccatggtactgctccatctcagggcagtttcacaagactattatgacagatcacaaatgcagaataccttgatgtcagcaaagcacctgatagtcactcaaaaacatatccaagcaagatgggaaaccctggtccaagtgataattcactttagtggcctcagtgactgaatggccatacccaaagacactaacatcacagaagaacaacactgacctggagagaggtccttggaacagggctttgcacatttgtccctggtcaatgttttcatcaagatgtgcttatagcagtcacaaataattcacagttgaaaggagatagttaattaattggacgacagaatagagattttaaaagacttaaataggttagaatgacagccacaactgaccaaaagaacaccatcttcctctccaaattaacagataaaatcttgctttcaattgtaaataatctatggtatgtgtggataggatggtgttatcacttgcctcacgttcagttgtttactgaatggaaacaactcatcctgtttacaagttctgccagtgatcctgtctccagactctgggtgggtatggctttcagccacagacattcagaatcatatcaattttacgattctgacttcagaccggggcttccttttactctgggctcaagtatctgtcttggggcctacctcatttcagtagttgactctataactcattcttttggactcagctctttgcattagcttctgaactgaagtccctgcacatctgcatgcctctcatctggctctacgacatgcccagccatacatttctgctgccaaacttctgtccatctagacagccacctatagaagagtttcctctgtactatgtcttaccagattatccaaactgccttctgtttactctgctgctggtaccattcccatgagcatgccccagctcatggatctgtttgttctctagatccctatctggtctatattctggatcccaagctataccatccagctactgacagaaatccagatctcctatgtagcatggggaaaggagatgagtttaaagcaattcatacttaagaagtcctaaggatttttatcacacataagctcaatgcaagctgaagatatgataaagtgactcgatgagagatgtaatattggtctgcatcagtatagcctatactgatgcagaaaatgtgcacctaaggagacctgatagtaacctcttactctacactggtcaaaccatcttgtaagtaccgtgttcatgtccaagagccatgttttcaaaaagacagtgatataaaggcaatgtatccaggaggaagtgaccagaatgacgggattcctgacaccagctaatgcaagaaagttataagaactagggctcttggactaggaaaaaaggatttttcaggggttgggttttcaggtactgaagggctctcaaatggaagatgacctagaggcttgtatcaccagagacagcttgggggtctgcaggaacaaagcggaaggtgtgggctagtgtaataagtgcttgtcccatctctgctccagactcgggtgaccctacatctctagccccagtttcccccaaagactgagagggtatgatttccaaggcctcttcccagctttcagagcccataattcctcttctttacataaacctcaatctgagaaagaagacaggcgtggccttgcccgctctggggactggagaagagactagttcttagatcttccaagtggccccttctaagaaaattaaactgactgaagtaatgagtgaaacaaggggttgcaagctttatgtttcgataaatgaaaattacagaaattcccaaattgaggtatgttaggcagaaaatgccccccaaaaggtattcacttcctaatccctttaccttatatggcaaagatgtgataaagttaaggatttgagaggaagagcttattctggattatgcagcaggctctaaaagccatcccaggtatccttataagagggctgcagaggaagacacacagatgagaaggcaatgtgagggcagaggcagagactggagtgatgtggccacaagtcaagaacacttgcagccactagaagctggaaagacaggaaacagattctctccatctctgaaggtatcgtggccctgctgacaccttgctattggacttctgacctcttaaaactgtgggggaataaatctctgttgtttttagccatcaagtttgtggtaatttgtgacggcaggcacagcaagctaacaaagaaggttttctgctcaaataaaattttgttgtgggctaaaagtgggcagtaataaccttttaaaggaaaagcttaaatttttatgtatttttatggcctatacaacaccactcttagaaaactgcagctctgctcttaaaagtatttaggggcactgacaaaagcatcttttcagccattcttcacatatattttattaataatctttccttcacatgcaatttcagcagataataagtctatgcaaggcagacaaccaaatgattccaacttctacacagcaggcctggctgcagtgaaacaaattatgcagtatctcatggctacaggagaaagcctcggtgtaaaaacaaatggtacaaagtatgtaggtgagagctcgtcttgtctctccattgtaacgtgggcagcatttctccccactctctcctggcaacatccagcttttgtcatagggaatgatgaatgctactcagatgaagaatatacgaaatgatccccaagtctgggaaccagcagtggaaagaaaatgagtgtctcatgggcttcccccactcccactgcctgcagatgccacccctggaagtcattttcacgctttcacagggcgaccaccttgcagggccaggtcaggttaaagaggtgattctcttttcaaggtttccaattgttccttgataaaaacatcattactacttttaaaaccacaaataagggagaaagaccttttaaattcagtgaagagaaaatgaaagatgtgtaaaaaaataccagttaaattacatgaggctgataatgatggcttcaggacaagagagcatccacagtggaggagaaagagaagggtgcttcaagtctgagatatagttttggatcttgctgcttcctagatgttagtccttgggcaattcattcccctttggctgagctttattttcctcacatacaacgtggggcaaccgaataagataacatgtggcctaaaacagtggttggcctaccagtgttcgttaatgtgtaaagaatgaatgaactgttctatatccaggactaaacaaggaaccctcaatttttcaactctttccttgaatcacgctgaaaatattgttatctgcagttgttctagatcagttatcaatatcctcctaaatttagaatgtctaggaagagggatttttttttttttttggaaattcaaattggcagagggtaggtatatttttcttcttagacagcaccgcttagttttacaatccagggatttacataaaagaaagctggtcagttattacgcatgatacataacaactatttttgggccaagactaacaatgattgcctttgagtctaaaacagaattctaagcatgtcccttcctcctaaacacacacacacacacacacacacccatgcatgcattcttgctctttctctccctgcccgcaagtcaaagccacttccttttcctggtccccagtcgccagaaaagtgggttgtgtgaaacgtgacccttactcagttatacactgaggctgggtcactccgttgcctgatcaccagcagaatgggtcaatctgtgtgtgaggttgagaaaggtaaatgaagaatgtaggccactttggcctcctatagtttctgaggctggcagcctgtagtacatgtatcagggagggcctgaggaacaattcccgtctgcacataggaactgccctgtccagtgtccatgggttcagaggcaccagaagcacctgagtcctgcccctgcaacccgcccatgcccactcaggaagcaatggctcccacaaatggcagggagttgtgcttatgctattcttcccttcctcttcttcactctctccctcacctcccttaagcaaccagtacacgcatttgcgcggtacaccccaaagccaatgtccccctattcacactggagacacatcctcatgtcaccccagcaaccagcactgtgaggcctttggataccccatgtaaacactgctggcctctgaccccggaaatcttattcttcccacaaaagaaaaaacttgtatgaattaattttcccacctcttaaccagctgcatagaaatcatgcggacatggctttaaagctggattcctgatgcggcctcaaatttctaaccctcgattacttagaattagattttccccccacaagacaattatccccacactaagaatctaggaggttttttatcatttctcttgggacttattaaaaccaaagaaacactgaaaaatggagcaacttccatgtacattctacattaacagaccaacacatttcaaagaactcactcactcagaggaaaagtaaacaattctaaggcaggaggtaatttttctttttacttttctttttgaatgacaatttttgtttcggaaggcctctgtgtctatcaaataggcagtagtgtttgtggccatatttgtggcctgaacgcagctgtctaaaccctgcaaacagttggaatgacactgcaggaattctcggtctcactgaaactgcagaaatggcaggggcctctctcatggcaggcactgaaatacctttaatcacaccagacaaaggccatccaggatgcacggaaaccaaacctctctcctcagccctttgagagtagttgaagtggatattattttaatcaaatccttttaaatcactaaataggatgactccatttaattagctttttacacaaaaagcacatttttgttctgatacaacttgattacatatttttcaatttttaaatgggtatgggtttcactttttaaaaatacactttatacacttaaagcaatgatatctggaactgtaaccctcaagaattctaaaagattctgtggaaaagaaaatatttgctttaatgtttcccttgtgcactactgcgtccccctcttttatctttgaactctctttgcttgcccagattagttcaattttaagaatgatctgttcatttgtctgcttgaaactttgtacttttggggagcaagtcaaggaatgatggtcttatcgccacataatgctattaacaagcatggtttccactcattcatgcctgctcaattttttaagagggcctactatgagttaggcactaggcttggcacagataaggattctgagctgataaagcctgcagttccacagtgaacactgctgtcagacagtcactgcacagataactatgcaaccacaatgacagctttgaagcggccgtggcgatagggcaaccccatccagcctgggcctttaggggagtgtcaaggaagagctctctaaaaagtaacaaatgccgctttcttagaacttacgaaacttaaaaaaaaataaggcacacaaacatattgtctcaaatattatataaactccaaagtaaggtggggtatgggaaggggaaagctctgagcccagacagatctgagtagaatccttactataactacagcaccttgagcctctcatagctccctcacaggactgctgtcacagtgaagtgtaacatagatgatataaagcactctgcatagcagaagttcaataaaccatagatattaattaatacagaatttatgctaacttgtctttgagctttagcatgtcaaaataaagctaattttccacttctgtctttacaaaaacgttcaactaaaagaggaaacttaaaaatccacatgaagaacaaacactgtaactttggcaatttttctccactggagttggccaacaggtatcatttacttatacaacagatgcacatcctatattagattcttctggataggtaaacacagacaaaaagaaaagttgatagatccgtgttcaacagtgttctaccagcaacagaaaaaggttctgaaagtggaacttctagaatagagcttttaaaacagcaaactcccctaaggcaatgattgtttttcaggtcatcaactacttgactgaggagagggtgcaggcagagcctttcagaggtgcctcagactcactccatccaagcagcatttctacccgtttagcttctcttaatctggattccctgtgcacttacagacatccacaccacgggtcagtcacccgtgttcactcttttgttagacactcattgctccttcagtcccaatccataactggtcttacctggcattctttagactggtggccaacagccctttttccattttaattcaagacccaagtcagaaaacaaaaacaaaaacaaaatgtatttggtttgtgtttttcaatttaaaagcgagtaattttacttggtcctgtgaaagggaccactttactgataagaaaaatgaaacttggggaggagaaatgatttttctaaggtctaacaggaagttaacagcagaagtgaagcaaaattgaacacattccattcagtgccccccacaccccactaactgagccctgctgtttgcccggcatggggccaggactgggaacccagatgaatggacttccccctcctgtggctgcaggattcactgcctgagttggacaggggagggcaagtcctgcagtctggggcaaatgccaggcatttctttgggctccaaggcacaatactgccctgagggggctcctggcacccataggctcttgcctgctgtggacctggcctagtccagaagggtcacagtatactgacctcccataggcgacagtctttgccaatccctggcttccacagccaaaacctgagtgcatgcggattctaaaaaggctccttctgccttgtcctaactagagctgtgttatttccccaagttgccctggtttgtatgagctgaaaagcccgtgactagcagtagatcacaggccatcctgcagaagctaggtgcctgcatggggtcaaaggtcaggagttactcacaattgttctggaacaatgtttcagatagtatacttccctaacttagagacaaacgagctgcattcagaatggctctagttcagaaagaaaagcctctcttgcactcaaatcaagatgagaaataaccccaagtcattctcagatgatgaaggggcagcccccaagtggccagggaattgaggaacataactcagaacagctgaaaagttacacccaaggcaatgtggttgggcagagtagtgggggccgaaaaggacgcctgggtggctagcgagagctgcgacgtccagcctttcagtgggggaactcaaggcacctggggaggcagagagacgtacaggcagagaaggctcagcaaacattcagagaaagaatgcattcacagctcctcacacccactccatcatggagtttttctggatagctcagccctcagtcagagcttccaagccccttctgcacagctctcagattgtaccatcattacctgagtacttgtcagtcacattcacttttgtctcaagagagtccagcatgatgtctaacacccagtaggaaccaaaaaaatgttacattaatgaaagaatgacctgctacacagtggctgcaattcaaagatacggctcaggcagaggtgagcagcagccatctgagagtggaggaaaaacaacaatgaatggactgaaaacgacctccttgaccagcctgaggataggcgctccccattcctccccagcctgaaggctcctcagccatgggacagctgttccattctatttctggggtgggagccataacttatagtcaaaacatatgttcccataaattaccagaattgagtgttacaactaagggaagggagaaaatagtgggtccaccaaaggaggtaaggttttctttctatttcacaaaccagttccttctccaactcgacctctctcttagaaatctatggactcagaattacaatcccaaattaaaagtggacttcatcctaggttccaacaggaagccctttataattcacaaggcacttgctctcagtgcaaaacttgccaacttactttttccacgtttagatcagcatcctgcttcttcaaaaaaactgtagaagaagaaaaaaaaaagtgagacatcaaaagagaaccaagtactctctgcctacaaaccacccacaaagcaccaccatagaatttccatttgttgcagacaatcaatttgcccacaaattttttatcattcacacaattgttgctaagtcacagttgccacaaacacctgtctgaaactgcaaagacctggccttgtaccaccaaaggaagccagcatgagattttaactttctggaatcaggaaagataaggatagaggccttgtgtgtacacacacacatacacacacacacacaaacacaaacacaaacacacttccctttttcagagtctctacaagtcatcaatggttggggcacaattaaaactgagtcttccaaggtcttactcaatttacctcttggattaaaacacccccagcacccagcccataccttccccacttcctatctgactgtgggtgggccccgctgtcaaaaaaagcattttggggatggcccctggttcccagcagctggggttcccctctgcaggaggtttgccaacccagcagcctgcatcatcttgtccatggaactccagccccgggactaccttagaaccttgtgccaagcccctggcgaggctgagtgctggttctgatgacacccatgcatgcttcacattaatctttaaagtgccaggagcaggatggcagctttccagtttgctcacacgctgtgcctacaactggccaatattatggtacttcatttattatctgcaattttagctgtttgaataaagctgcagttttaataaagtgtctaaagagaacaataaaaatagttgaatggaattatgtttacaacaatatgttagggcagagagctttgagttaagaaatatgaaaaaaggcaggaacaatttttcctatcttgtagagactcttaagcttttcaatgtgactcttagtatctttcttcctgatccacgatttaaaacacccccatgataagttattattcccatcaaaaccatcccccaccacacacacacacaagaatttttgcactgtttggaaagatgtataattaacagtaacatctttgttttgtttaatcaaagatgactcggaatgaaggaaagaaaaaatgaccatgaggaagagaatttgaaactcatatattgttctctgcagatgggcattcaaatcatgaactcactggagatgagcaagagaaccaccatggaggtgagagagaatgtgctaataagcatgccattgcagctcatgccttagcaacccatatcatctcacctcttcctgggttctgagacatgctgtcctgtcctacggagaaaccgccaggcaatagatgccttttcttttggctaacccactagggatctagacactgctaagctgtaaaaaatgagaattatttgtccagaaattttaacttgcttccctataatcagaagagaataaatcaatactatgagaactcttcacaaaagggaacatgtatagagtggaactttgccttctattcttgaacacttctgcagaggctcagaaaagttgttgctctgattcacaggtcacaataaggagatttctatttacaaggtggaagactttttcatcagccttagaaagagcacttggagaatcattaccatttccaaagtagggaagaaactttaatacccttctttcaagcatactgtgtaattccaacaacataggatgcccaattcacaagattctgaaagaatgagccttcacgctacagcactttagcaaccagtaccaataggaaaacggaaaacccatttgaagctgctgactcactactgcataaggagtgttatccatccatacatatatacggcatcatccaatttctttttcaggcttacgaaacagatggagttaactaacaaaaacaatatatacacccatcattctgcagccataaaccaaaaggaggacaccacagctttaactctgaggactctaagcaagatactgaaatatttttagagagcggctccactgtttccaagatgataaggatggacgcaaaatagaattgctatctagaataaagagtggcatttgcttttaaaaccacgtatatctttcttaaggctgtctttctgaaaagttgagaaaaagtaaatgtttattcacaaatgtttaagtgaaatagagatactttttatttcaaagattcatattttcttaaaaatcattttttaaaaattgaccaattatcttcctaatttatctttattctaaatctgattttttgaagatgcaagttttaggtttccaagactaagggaagataggcttctcccacgcccacccccgtgtgtgtgtgcatgtgcgtacagatatattatattgatatgcatatgtagttacacagacattttaaacagttgtctatgcattcaattgtgggctttgggcattagggcattttccatgcttttattcttcttgctgaagcagtgctgatgtttcgtttgagaaacataactgaagtgacccagatagcccagtggaaaaggctgatccattaatgttgcaaatgtgtggtcaactgcaggaatggaagccaaaggacaagaccctgaccaaaaatgaactacttccaactgcctagatcagaccaatcctccaacattgggtgaacacacagacaataaataaaactgagcaatcctcaactctgagctctctcttgatacagccatccctccagctccccgtcacccccctgcactgtttccgaatgcccacagacatctccctatgaacctcacgacagggcagtgcaggcaaagcaaccagtacacagtcaaaggagcatgggctgcacgcttagaggcctgacagtgctgcacaacagaggagtggctaggaggatggtggcaggctggagggagaaaggtgggaagtaaggcagaggccagactgtgagagacggtgtacagtagctaagaaggcagccagaagtagcactgtaccactgtgttttcaacctgcctctatcccaggaaagggccgaaaaagaaaggcagcccccaataattcctggtgctgggctatgccttgtcattccaatctcaccaaccctgctgggtagcaactttctcctaatcagcctgcagggtccagattaaaatcactttttcactcttgttttcctttgcccacacccccatgcaggactagatttcctcttctctgtgttcccacggcactttgtgcagagcctgtttcgttgtttccccgctagactgtcagcttcttggtgactgggactacaccaagcatggtacctgcaagatacaggggcgtgtgccatctctggtgatggctggaggaagggtgaagaggggaggtgacagagagaattaaatcaatggagatccaaactggagattctgctattatgtttactactacccagcaattcttgctattgaaagagattcaatacattagggtcataaccatgtatcatacaggatgaaggacatttaagagccatgatgaatccaagatttaaataatggttcaggattttgtctgattatcttaaaaatggaagattgagagaaaaacaaggtataattttcccttgccatggtgtcttctctatttcaaattcaactctttttactacttgcaaaagatttaaaatattcactgacctgccaaaaaacatctgtacattgctagacacatcttcacagattcacatcggaatggcttctttctgcaccaatgatcatagctctattcaaccacaactaaagtgagaacctcagaaccgtacgtggagtgatgtcagtggtgactgaggataaaatagccgtttgatgcaacttccatatcgagcgtgtccacagggacaagtgctccttcacttattcttaacttaggatcaaaggcacaaaaatgaccaggcagggacagactctgccataattccaaagaaggctgagacatatacacagcacacacagaagctcctcaatgctctctggcaacggggcagcccctggctctctgcctgcagcccaggaacaggcccactctcacagggctccctgaggcctgtgcagctgcagacagacatgcagtgtgtgggaccatccacgctcagggtctccacagtctcctgtgtgcccaacagctgggttaggcgcctgagacaggacccagctcagacaaggccctctgttgtggagcattcctcattgccacgtttccccaggaaaaatgtattttcctccaaccattcattctggccccaaactagctcattctcctgtgtcttgctccacacacaaaccttctcccaaggttagagatggcagcaactgcaacttcttctcctgtcttattcagtcctaatcaaggtacagtgatatgtgcacgttcaaaatgaggggcacgtgatgaacatggtactagacattggtactaccccaggggcatctaggggaagactctagtctagtagaggacagcagaggtggctggggaaggccctggtgtcccccacattgggaggatggcacaggtatcagccagtgctatgtgtactttgtattactattttgttcttgtttatcttacgtaaatatttattttagctcattaaaaaggtaatacacgctcattgaagatttggaaaatatgaaacccctgttatgatactgaagcttttccttttgggccagtttttgtatgaacatacaaatttccacattctaccccagcacctccgccttgcacatcacaattgagagcacacaacttctgacagaggcaaccaaaaggggaagggaccctataagaacagtgtacctagaagcactaactgcacggtctgtttcagttagtatcatgatgaccacctgatgatgcccttcatccctgacctgtgaattactctctacaatacagaattgtggtccacaggcagggaggaagaggctggcttggaaaccaagttccatccctagctctgctatttatctgctctgcgattgggtgggagagggtgtggcaagggtcacatatttaaaaaccccaggggccaggtaagcaacataaatgaataaagcaggtaagatgaagctgggtgagctgaagagccctgctccctccaaagaagacagccacaacactgcttgggcaggctgctatcattagagaaggcaggttcagttttgccaaatcttccctttttttttttttcaagagaagctggaaatctcagcttttatgtaatactgtcctatttaaaagtgttagtttacatttttgaaacgcaccatgtggcccaacaaaacataaatgacggtatgtatgatccagcccatagagtggtttgctatctttagaagtaataaaaaggtacatgcctccgtttctccttctgttaaataggaaattgactatctgctcaccactggggatttatttaagagcacagagggggttccattatcatataacaaaataatccaaatgtattcagatatacaaagcagggtaacacgttcccttatatttcttaaccatggttgacataaatggggcttgatgtggtgtggaattattcgaaatgtacactcatgcagttagcttctaaataaacaaaagaagagagctgcagtagacttagaggatgagggtgtgaccagctggtgatactgtatcaaatggtggaatgaaagccagactggaatggctctgatttttaacaaacaccgtgtggagacaggtagtattgacaaccctctcaagaagaactgaaataaagggtggtagagaagtggggtgttggccaaaggagaatggggattaagaagagtacatcctttaagatagataaacttacaaatgtttatatgttatggaaattatctcattttaaggcaagcaaacaaaaagcccaagtaccaactgaaggaactgtgtcagaaaaatacgagactgtgttgggtgcagtaaaaattttattagtaagagttaaaaaaaaaatccaaaatctagttatataggttttcctaaacaagaagccaggaaaaaaaaagtccttactacaacacacactgccctacattttacactgtgccatttctgtatttgtcctttttagcctacttctatcacagtctctctttgctaaaatacattagttgccatggaaacgatgtcatagtgtgtaaaaccatttactgtccttggaaaggcattcatgataaaattgaacagtagcacgttccacaaagagaagcaacagaaccagttgtgcaagaacacaacaaggtttcacaactgtgacttcagagtattcctctaccaccaacatcataggtctctgagaattgcctgagcttttgcatgtcagttttccccaaatcacccagagcagcacctttccaaatgtacttaaaaagtcttcatctaatgttgatgaagacaatagattccctagaattcatacttccaagaggtggggaggggctggaagaccacggaatcagaatggttttatgcattgtaagacttccactaatggagaggatccagtcctgtcatacattctgctgaccaactttgttatcagagatacaaatcatatttggaacatagagatttggacttgaatttgcttactggcatggattaccaagacactcctttttttttttttcatcaattcaaagtaaaccaaatcatcacatcaagaaaatacattgtgcaactctcatgtccccttctgacaaagaaggcacatagccaggtgtatgttccctggaagcttaaaatctagttggggacaatcaggcaagagcacaaacggcctcttgcttgggctgtggcaaagagctggattttatcctaattgcgacaggatgacatcaggagagcaacatgatctcatagagattcttttaaatatatgaatttttaactttagagacagggtctcactgtgtcacccaggctggagagcagtggtaagatcatagttcactgcagctttgacctcttaggctgaagcgatcctcctacctcagcctcctgggtagctaggactacagaagtgcttcatcatgacaggctaattttcaaattttttgtacagatggagtttcactgtgttgcccaggctggtcacgaatttctgccttgaagtgatcctcctgctttgtcatatagatttttaaaagctcattcagccattgtgggaagtggggttggaaagatcaagactagagaagggcagagtccagacaaaggagggtggaaagcagatggagaaatgtgattttctacccaggttgacagtgtccttccctttgtctgcaaaagtgctggtttatgcctgttgtcgcagcagacagtcaggttaagcacttgttcagatgtttcacttcataaaccaagtgttattactggttatattaaaatacaccaggatgggttttgtaacctccagtttgcacttgcagcttctcccataccttgtctaccggtgtgtgagacgactatacagtgaagggaacgttcatgttaacatgtgattaaagctgaaagatgaccaatgacaatccatttcttttcctgtccctttccaatcgtggtgtaagcaacacctccctttcaaggacaacacgcagtatgctcaccataaaacaaagagtacttggacatgagcagctaagggcagctaactccttccggtcttgattggcagtaggaaaagtattccaggccactgcctcaccagacactagatgtgctgaccattgcactgtgacctgtgttgcagcctgagatgcacggaacagcagtcagaagggttaatggaaaacacagaaagttataggttaggcatacatgaaatattcgcaggaaacagatctgctacagatcttttaaagaattgtctgaatgctctcatttcagtgtttttgtcatttattgaatcgttatactattttattttgcaatataccttttggcagtgatgagctaaaaagaaaaagaaaatgcaagtttaataaaaaattaagtaccaaatttctgcttttcaagaaagcagatgatgaacataaattcacacaaaatgcttgttgatacttactatccatcatgggagccttagtgatatcactgactacataaaccacaagtcacaaatctgctaaagaggcaacagcaactacttcaaatgttaataatgatgcaagactatgttaaggaagatgatttaacatacgcagctgcagaaggtttactaacatagcactctaggagacatttcttttggatgaaatgtctgttgttccaaattgattttgcttatttttgaactcaggtttttttgtgcatatatgaaaagtgaaacgatgactttaatgtattagcttcattagcagaagaaaaaaacttcaccaagagttaaattattccagttttatgttagtattaccaggtgttttaaacagaaaatcaattaattcaaataatattttttttcatttatctcatgggatcaaaataaagcttgtggaagtttattttgtcacaggtaaaacgtctcatattattgtaaatgctactgtaaattgtaaaaagctcaacataggagatgaaatgatttgattttgcaggaataatacaaattttgtgatgctaaaaataaggttcttaactaaatcaagaaacctatggtgcagaatgttacttagaatgtgttatgtcacatgcataattcataactgcattcaaacaagtggctatatcctatcgaatgtaaaaactgtagaggtagaaattaactaatagttatatatacccaattagaaatatcccaaactttttgtgacaaagccaatactaaatacaaaaaacacttcaacatagcagtatattccttctcttttgtccccgtcatcatcaactgggttttgttaatgcttgagaaatgactctctctgtcaacctgggcgtgccataacggtatcatagacaagtcctttaaaaagtttgggtgtattctgttccaaactagttggaagtctttgatcaaagcagtgaatgaagcaccaaaacagttcagcttttgaagcctgtagccaactgcagttattgaaaataaggcttgtaaacagaagatgctcaaatttatcccaacaaaagcaaaggaggaactgaacacattgcatgatgagaactcagtgttcaagatttaattctgaaattctgttctgatgttttgtaatatcttgacttgtggcaatcttttgatggaatgcctagttttaactggatacatttatattccgtaccagaatggagtgaaactgagaaggtctgcaattttgtgccatctaaatttgacaaaacatttgaaaggaccacagagaaacttaatttcataagttttgtcttataaaaatatttgttgaagaattctgaatgagagaaaaagatctgtgaacatatttgggtgaaaacagttacacatttcaacattttaaaaacttgtctaagaagagcttccactgagcagaatttgttcagagctcaccagggactttgcatctaagagctattttctgaatgagaaatattgtgatgtacacatagaagccaatcaaagatattaatttcaaatactaactataaacacaactttgaagagattggaggcaactttattaagaaaattaaaaacaattcattcttcatatggagtatcactggcataggttagttagagacattgctaaaaagttgactaatgggagtgaaaaataattacttatgttattattttataaaactcagataatataagattttttaaatttaatctatatggacatatgtttttaagttttaaaaattttatttctgaaaagattctgaagagaactattttataggtctaacatatttttaaaatgtcagttaataaatcaatactttttaaattctatccatttaattatttgctgactcttttcaatttaaattatgtggttctccatctctaactctcttggctcccccccgacacacaaggtaaaaatatgagatgcatttatgttttgagaaaatttgctaagagtgtcacaataattttctggtgagaaaatacataagcagtatccaaacaggcaactccgcacctcaccccagaacacccccaataaaggcacacttttaaagcaagcctgatgatttcccttccaaaattactaggtatttcagaaacagcaggttttaaaatacatcatcttaaatgcagcatcatcctcatatgaatgtcaaagagagatgaaatgcaattaaaaagagctaactgtttttttctccccctctctcatttgagtgttctggtaactacttacaaattatacttggaaatgaatcctttcataaactgatactttatttagcacatgagaactgaataaaaatgaagagcatttccccttgtatttagagacatttctactattcaccctgttacctttacaatatgaaactgaaggatcacacacagtaaaaattctcctctaatctccagcatcacagtaaattcattagagaaaggcttgaaattctaatactttccactgacctgaggcccgaaggcaactgaggtccttctcagggaaaaactgccactagctaaacaaggggaagccagaaaccccacactatcttgaaacatcaggtggaaaactctgccgcttaaggacataatctcacacttcttgccccaaatgaacctaggacaggtatactaagccacgatttatcaaaggaaaaatggtatactataagagtataggtaaatttgtcacaaataaaaaagtttaagcagttaaaatatagcccaaatgcagagtggcaggtttgaaatatacacttactacctaacaatataaaaagatgttactttatttgtgcatgattgaattcaacttgattatgatcattgcatttctacttatggcagaaaaaaaaacaatcttactcattacaggtaacctagtggcttcagagttaaaactttagttgcttcagggcaatcagtcaaattaaattcacttcaagctgccgggctgtgtccctttcgttctccttcttctccccagggagattacagaccatcacagtgatggggagaggattgagtctaggtgctggcctctggcctctgtgggatgtcttgttcctttgtcattgggtgctggcctggtttggctgatgtagctggtcaatacctcactggggctcagtagtatctgtggccacgatcccagccagcctccagcagggagattggcacacttcccttctgtgccctctctattctgaccctagatatctcagtacctttacatccacccaagggcataagcaggactgtcgggatttccccacgccatgtacaggttttggggaactgggaaggaacaccacctcagggcccgtttctacctaaacacaccccactgcagggcaaactacaaggtggtttccttccagagtcccagagaggaggcagggcaccagtgctctctgcttacagggggtcgctcacctacctgggccttctatcatctcaataaccccgtaagcagaagcccaggacaactgggtgctagatctcagtgacccatccatttcttaaccctggaatcctctgaatctctgcaagctcctccttccaacccaggaagcaattttctccttcttgggctaacggaagtgatcctgtagcctccctcctccgtggcttaatgtacaatatatgccaggccttctgagatttggctgcttggaaaccacaaaccatttttcttctaacaaagcctgtctcttttaaatgaaggcttgggctaactctgttctctgaaacaggctttaagggcctgttttggaagtcaaaagctgaacaatgtcttctttgtcgttgaccatgttctgtcctccccttgaagtgatggaatccctagcttcaatgggggagactcccagggcaacagcaattaggaggaagggaaagtaaattgaataccagttcaaaatattattcccactaaactagctgctcataatgcaaggtctcagaggtcccagaacacttacctaggatttaaaaaaaaaaaaaaaaaagtgcaacacattgacaggccattctcctagaagataccatttatatcattatatatttatatttgaaccaagggcaaggggagcctatggctttccgtttcttgagttcttcctacccaatatcctcaatctctgttctaccattgagtggaggtccaaaaccacccctgcatcagcatcattttggaactctccacttccctggatttcctcaactgagggcccccttacctttgtcactcctcttccgtacctgctgtgcccactcatcacatccctgaggcctcagacccttccttacctatcacctccaatccaagctcacgccccttccagcctgaatactagtttcagctgattcatatgatgttttctctagtctcttagagcaacctattattcaaaccaatgcccaactctaagtcaccgcaaggccagatttttcattccaaagtgacaagtattaccaggcagagtcacaaaattgggctaaagggaactataaacatacgtgcaaattccaatggggcctcactccatattttttatccatctatttacacactgtgctacagtttagtggctggctgaattttttctagattctccaagcccactctcccttcttcaaatctctcaacatgagatgacagttcagcctccagttcatagaaaagttccaggacactccattcctttgaacttctttcttcttacatgcaaatttcactgtatctttatttatcttgcagtaatagttaaaatcaaacaggtaaagtacatagcaccacgatacctgccatttagcaggcatgcgatcttgttttgttcttgtctgttctctttccctctgagtgactgctactttctattactttgagggttatagtgggttcaatggtgccaaccccccaaccacaaaaaacaaaaacaaaaaacacaccatgcccatctggaatctgtgaatatggcctatttggaaaaaggggtctttgtagatgtaattaagttaagaatatcaagataagaatatcccatattagggctggccctaaattcagcgacaagtttccttgtaagagaggagaaggccatgcaatgacatgcagaggaaaataccctgtgaagatggaggcagagattgtagtgacatgcctacaaagccaaggaaagccaaggtttgccggcagccacagagaagcctgggacagaatctccttcagggactccataagaaataaaccctgctgagagcctggtttctgattttgggcctccaggactatgacagaaaatgttctcttgtgttaagccgagtttgtgggaatttgttatggcagtcccgggaaaccagtaaaaggtctaacttaattaagatctcatctccaccaactcttcaccaatcttccatccatcgttccttctcgctcctgcctaaccaacacctccctcttcagtggatcattcctgcatgttctagctcaaccatgggctagactgaaaaccccatgggtgttttggtgggcagcacagagcaggaatcttccagcagcagcagttctggatctcaagtgtgtggaaggaagccctgttctggggatgggggccagggtgattcattccctggaaacagaacctctgtcacagctagagatgtgaggatcagggaaagcagtagggcttgccttgggcaccccagattagggactcttccccacatggcatgttggactggggtacaatcaaataatgtttagggttgcagttttttaagtgccaatccctcttggatcatacttaacaaataaattaaccagaacctgtccctttcccaggagctgctggcacccatagaggcatctggttctgttcattctaccacagtccttccagattcttcccagacactcctcatcctcactagtcttcactgagtaattctcaacctccaagagaacaacctctaacacttggcagtctgaaatcaagaatctgttgaataatgactatgggaattacatggtcaaccacacttacatgaaaagaagtgtgaggtatggcacattatctatgctttggccctaacggagaggcaagattagaagtagggctattgcattttcacccaaggaggcagaacataagggggaatctaaaacatgcaaccaaaatctggattctaaaccatgactccaaggatccatcagtgcagaggacccaatgtatcacctgcatgaagaaaagttacttaagacgcatctcattctagaagtactgaaaacatatgtaaaacctcccaacttggaagcttagaatcagaaccaatgagcatttaataaatgcacagtgtagtatcacgcagcacaaggcaaattaaacaaggttcactctcagccttctagaaacttgctactgaaaatggacaatattgacgctgatgtgtacaaaagagggtagacatgagcagaatgaataaatacatgaagtggtaacattatatgccagcaaaggggatagtacattttgtcaaagtgccatgtgatctcccacatttaaggtggtagttgtggtagcggggaggtggcagaaaaagcacttaaataatagacggcgtatggttaagcaaggaaaaaaaatccaccactgcttctcgaagatcacaatagcatttcaaacaacagtaaagcaccaggtacctcccctccccctttcagctgcagcagttggcctacatccacagaaagtgttcttattgctctctatcccagatacattaaacctggcatccaggagaggactaggcaggggaagccattaacgaggaatcacagcgagctctcacaggcagctgagaaggctcttcatgaatgcagaccaacactgcctgttgtgctgttttgagtttcgttatagaaatgactccaggggtccctccccatgaccatggaaaacattttataaagcttgttttcaatcattcttttgaaggatatacaaacaaaggctatagctgagctgtagagttaaatcattacttcgtagagccttagtctgggacagaaccctcttcctatgctaaggagattctactacaaagtaaacaaaatcaatgcatggagaggaaggcacttccacagccaaaattgggctatacatggcagaggcactcagttaaatgttgctttgtgaggtccaggtgtgggtaggtacataatactttcaggcccaacaatactggcagtccatttggctattgttctctcgcccatcatttattactgtattcctccaatttcctctagattttgaagaattctgcattttctctctgctcttggatgtcatttcctttcttttttagtgaaaatcttatggatgaaaacctgatggcagagggcaaaggagtaactatttccccaatcaccctaaatttttaacaaaaagctcaagattacaaacaaaaaatcttcaaacacatatcattctcaaaatgaaatggtggtttctaaagcagtctaggacagttaatgaacccaaactgtgttgtgggtcagtagggagtaaatcttgtgccaccagaaaatacagaagctcaatgtccaaaaagaagccagcctcatagcgcagatgcccagaaagccagctgcatgttccagtgccttaccccgggcctgtctaaatgaacattgctgagtatccacactgtgaatgacagtgtgctacgtgccttaggtggacagtcaaaaaggggagcggcatatgtggggccaagtatgtctaggagaactggattctagtctaagctaaagtagtaaccggatgtaccaacttgggcaagttgtaaaaaccttccaaaccctgaatttctcatattgaatttaactaacaatgtcaggcatcacttattaggaggcaattgagagatacaagtgttcaatgcaagagaataaagagattgggggaagcttttgagagttgggattccagctgggcctagacaggtgagtagaattctaaggaaagggaaggacgggggattccgggaaaggaaaacaaaggccggagccatattgccaattaacgagatggtaatgggcttctggctaaccaagcattagcatctgctaaatgaggtgagccaggatgactaaggaagaacgtagatactacagaaggcactgaaggccaggctaaggaacctggtcattctgcctccattcactgggctgtttagtaaagggacaggatccaagaaccagtatctacattagccggcacatccacagtgacatggatcaatacctcctcactcaatctaggaaatatgagagtgaagccaaactagacaataaaaggtgatacccttcaaactcagacagcaactagagaaaccattaacagaaatcagcgcttcttaaaatatccttatgtgcatgtatgtgcctaggtacaggcaatacatcacacaatctctagaataacaaaaaaataaaattaaaacaaaaatcaaatttcacaagtgacaacatttgaaattgttattgcttctaaatagacatgacatttgtgtggaaatgaagttgttggtgtttatttgccttttcagtagaatttaaattgggcaggatttcacagaaatacagattcagtaactttctggggattaaaagaagaaaggattgggaaaagtgccctgggctttgttgtgggaaaggagatctggctcatttttaattttccattaaagccctacttttcaatataaagcagatggaatccttatacaactccatgaaaagcctactatttttggatacctcaaagatggaagctctgaagaaaatgaaagtgtttgacttcatcagataaaatcccaccagcatattcaaaaggcacaggtacttagaaacctttaaattacaagttaagaggtctttctgtgcggatttatgatcccgggcccctctcaagcttcggcactctctgactcttgctgactgatggtttctaccacttctccgcctgctcccactactctagttgggactccctatgtttgcttccttccttgtcttccagagctgcctgctgactcttcccttctcactgttgttcccagatacagaaaagatgagaagcgttcagccctgcctggcccatacccactgaatccaaatgaggcctggggatatgcattctatgagatcttcagcatatttgtgctcttttcttattatgcgataagacctggttcaatatattctgtttgtcactctgctggggtggacaggagaacaaaagggctgatgtttactgtgcagagtctgtgagatactaggctgggagctgctgggcaccacctccaccctcacagtttacaatctcattaaagagatggcgcaaatttagtgtgaagaacatagatgttggagccagactgctgtgttcagatcccagctctgtcacttactctgtgacgctgactaaatcacttagcctctgtgactcagtttttccatcttttaaatgggataataatggtagtacctcctagaattgtgctgggtgttatgttgacaaatcaatcataaaatagagtccctgacttccaaagagctcacaagtcggtgggaaaggccagtgcctgccccactgtcctacccagctggttccctcagccttacgaatcaggctatgatgaggatgatgatgaggtggtaatcaggtgctctgggagcccagaggtaagagagatgggagggcttctcaagaggcagtaggttttgaggggagtcatcagaaagggtgagacttccacggtgggtaaaggtgcctctgcatcctgcaacacaggacacagaagtaactgcaaagcaaaggcaaggaggcagggaatgaggaaccacagctctggagcaaaagcaggaaagagtttagcagtcacacagacctggcttcactagttattagctgtgtgaccatgagccatttgcctctctgagcttcagtctccccatttgactaatgggtataataatacatgcctcctagagttgctatgattaagtacatgactgtatgtaagcacctaacacatgcctccgagttcaataaaatggcaggtgctattatttctatggtgtattcagggaggagtaggtagctgtggtatgctctctacttttttgcagtatcacagaaaggagaatacaaggccagaaacaagtagtcctctaaaaaagctttctgagtgcaaataagcaatgagctaggactttcccatggtacttttttctcccccaaactcttacagttaataggtactcaatacatatttgcctaaaccaaccaagtgctgctcgaggtcatgggtttacaagggcagagtatgtgatgatctctgcttcctaagtatacccaagaaggagacccaagtcaggcttcacttccagacggaggtgcacagcaggctgttctggaagcaggctgagacaaatgggaaagcgctctcaaccaaatattacaacaactcggagtcttacaaacattgttaaagtttcatgagtcagtaagcattatcttttcctcccacgtttttattagaccataaatccaattcaatttatattcttccaggattactgcgttctaatcaagtccacagtgtcacttattcctaagttgtctatattgcatgtcacccaagtccatttggataataccattcaggcttctcatgtgttttagtagctaaaaattagatttgctcaactagaaacactaaaaaaattattatagtcctctaaataacacaaatcactcttttttcataggagccaaatgtgtgaaagtcataacccatagttttttcttactttatagttcattctacctttagaaaagtcacaatgacattctgaagtcaaactcgagggatttccattgtaaataggttaaaattctggttatctgactaaaagaaacccttttacagggttaacgtcagaatgctttcatgttttccgttctcaagaatgaaggtgctgcatttcttactaaaaatgctgttttcaatcataccatgtaagtaaatttcccaacttttctaacaatttttgattcagaaccgacaatcacccaaatctctttctaaaatattcaaagtttccttacatacacacaatatattgtcatcatcccttccctaaagcatgtatgtcatatgtgtatatatacacatacacacatacatatggattaacaacagcagcaaacacatagcttttcctatgtgtaggacactgttctgaatatttgacatgtattaactcactgaatcctcacagcaaccctctgaggcaggaactactatctccatttaaagatgaagaaaaggagtcacagagagaccaggtaacttggcccagcccacacagctggaaagggtcaaacccggaccctaccccaacctcatgcttttgttttgttttcttttgttttgagacagagcctcactctctcgcccaggatggaatgcagtggcacaatctcagctcactgcaacctctgcctcccaggctcaagcgattcgcctgcctcaggctcccaagtagctgggattacaggcctgtgccaccacaccgggctaatttttgtatttttagtagagacaaggtttcgccgtgttggccaggctggtcttgaactcctgacctcaggtgatccacctgccttggcttcccaaagtgctgggattacaggcgtgagcccccgtgcccggccccaaccccatgctcttaaccacaccacacacctgggctgagaggtgtgaaacctggtgactttgccatcttggacaagttgcttaacctcttcatttaacttcatttttcctcacgagtaaaatgaacatgttgactacatgatctctaagattccatggcctgtgcccatgaaaaaccgcaagagtccttcatggttgtatgttctacaggctttgatatgtgtttttaccctggctggggagcaacagatttctagacttctccccctctagttctcctgatgctgctttgggcaggttcagatatcttcagtgctaaatccaactgcattttttgttctttatgttgctcaactctgaagctggtctagtactccgcaggctcctctcccattctgggcctgactcctcctctgttcctgggcttgctctctgccctttctgctctttctactccacacattctccctgggtgacctcacccacatccatggcttcaatttttgtaatttgtttgctaacgaatttatattcaagacctagtcctggctgggagcagtggctcatgcctattatctcagcactttgggaagctgaggtaggtagatcccctgcaatcagaagttcgagaccagcctggccaacgtggcgaaaccccaataattagccgggtgtggcgttgggtgcctgtaatcccagctactcgggaggctgaggcaggagaatcgcttgaacctgggaggtggaggttgcagtgagctgagatcacgccattgcactctagcctgggcaacaagagcgaaactccgtctcgggaaaaaaaaaaaaaaaaaaaaaaaagacctagtcctcttccctcactccagacctctctatttacctgcctatgagctactacacctggaagtctaaagtgtttaagataaagtcatcgcttagatacctgccccctgctttccttattggactgcttgtctctacctaatttcccagagaaattcttttctacctacccctacaccctgtctactgctctctaattcttttttgctccatctgcacctcctttccttccatttagaccctcatctactactcatttaagtttccataactaccttccctgcattagttctgcctgccctcggtcaaaggcccatactgtggccagatctttataaaaatacaatcacatcaaagccacatctccacttacaactcttaaatggcactcaggataaagtacgtacaagaatctttctcagtttctccttcagctctgtcatttccctttgtccatctctgtaccactccaaacagccctgaactaactgcagttccccaaaaggtctgtgcattcgccctctgggctgttctttctgggacagggagcttcccacaacactcacctagccatctctactcatcttgccttcagacccctcctcttccagccttctctgcttggctatcccacttgcccacctcttttccaggttcatgctccattctgcacactctctgccatcctacatggacccctaaaatcccagcatttctaacattggtcagagactcctttatagctctgcaaaactagcaagtaagttccttcgggacaggatcacatctcttttgccttgaaccatcgaattaattgtctggcaaatagaatacgcaatgaatgaatgctgttaaatgagtaagtatgtagacaattcataaacttatacagacctaattgtgtaccacagaaagacccagctttaaataatcacacagagtaaaattatttccagtatcgacatgccttgctttaccattgtttaatttaattttgtatttcccaggtaagtagtagataagtgtctgaatggaaggagggtagggatgaatattgtatttctatttggctataaaattatatttctcatcaaccaaaagtcttagtttctaaagcatttcagtcaccctcccttatggcacataacgtattttaatatcatcattatatgtagtattttgaatattacctagtggctaagggcaaaggctttggaaccaaactaattggacctgaatcctgactctaccacttagtagctgtatgatcttgaattagttacttaacaagctactaaagtttgcttcaatttcccatctgtaaaacggagattataagtgaaaccacttcatattattattgttaagatcggagcttaaacagtgcttggcatatagtaaatgctcaacaaatgttaacaattattaattatttttatctcttctagtagaccgtgaacttctgaaaagcaaggacagcagaagtattcatttccaggacctcatctccccagtgccttgcacaaagtaacatactaggctaatgtctgcagaacagatgaatataatgaagtattcatggcaaaaaaaagtgcattaacaattatgatggctggtatgaatggaattgctccaacaatttggaagcctgtggagaacagggactacccagaacactagaaccctgctcatggagatttggaagctcacttaacctccgtggaatatgcaagactcacagacaaagagggcagctgagtgacagaggagacccatgtgggcctgaagagctggctggctgagcctcctgcccttccgttaagaagctgcaaggccttggggcaaggagtttcacctctcaggctaattaatttcctcttccaattaagagggagtgggactgtgatttctgtttttctttttgagatagggtctcactctggagcccaggctagagtacagtggtatgacctcagctcactgcagtctctacctcccaggctcaagtgatcctcccacctcagcctcttgagtagctgggaccacagatgcatgctaccatgcctggatagtttttaaaagatttttcgtggagacgaggtctcactatgttgcccaggctgataacaaactcttgggctaaagtgatccacccacctcagcctcccaaagtgctgggattacaggcgtgagctgcaacatccagaaggagtgtgatttctaaggactctcctagcaactttgggagtctacagaatgaccagatgaaaaatgaagccaagaaaggtgcttttggagtaaaagaaccacatcaaagtcaacacaggaagcatcagatgattgtatcacatgggattattgagtaggaattggcaacatttgaaacataaaatttgaaacatgacaaaaagtaagatttttgaaacatgcttaggatgaaaagatctaaacttataaaatcaaaagaaaagcaatgacgggtgtccgctctaggtttctatttaattcccattagcctataagtttcttgagggcagtgaatgtgccttgataagtggcagtgtttgacaaagctgttcaataaaaatacatttattctgtatcttttttctgagcacatggctaaactacatttcccaggctcccttgcaattaaatgtggccatataactagccctcaagtaaagaatgtgagaggaagtgatggtggcacttccaggctaaggtattttaaaagtgggtgtgccccgtctactctctgttgccccttctgtaaactgaaacaggttacgatgataagctatgggatggtggagctacaagataggggtgtgggacccagagtcactgcatggaggaaagccacctaccgaccagaaacatgaatttttgactattaaatgagcaagaataaacgtctattgcttttgagccattatatatttgcaggcctatttgttacacctgctaacattagcctaattgatacaggtgttgagcacataccaaagacctaactcacatttgtttaatgttaaatgaaacagaatacccgctaagataaaacttggtaggaaacaagataagtaagataaggttccttttatcaatgtgctgaccaattaatggtggaaatagactcatgcgaaacataatgcctgctgccaaagtttgaaaccaaaacatgatgatttgtttggaaaggagaagatggaaacggcttcacagaggagatgacatttgagctgggccccaaaggttaaaaaggacttcgagcaagtcagatggggttggagattccagacccaggagaaagcagagtgtgcatttgctcacattcaaccttatcattaagtctcttaaacttggtcaacagagtgtgagtttatgtgctctggctttccttcctgggtctggcatcaaacaaacgaccctttgtttttacagtacactcattaaccctattgctttttttatcgtaaaaagttccacgatgaatgttcttaaaaagtgtgtaagtaaatatttaatgaatcataactcttttctaataaaattactgaagactaaacctacagttctgttacttataaaaatagtcgaggagccatacttttaggaaagaacaggttcaacttaagttttgacaatatcgattaagcatgtaatagtcactggcttacaaaacggaacattaagcccccagatttacattaacatttcttccttaaagggaacatcaaatggtttagacttcagtcaagattctctacagccccagttcatagccaagtggcctcaaagcctcagatagttaaaccacttcctccaaaagtctgtgagtcccttcatctgaatacagggtacccatggagcagggactggggaagaagacagtacatagggtggaaagtattgcagttgcttgggtggtgagaaaggaagtaggcgtcccaagactaccttgaagcaggcaagaggcagtctgcagtggtcttccaaatgctaactctagaccgttttatccacgtccccaggtatttacttcaataaaagggtaaaacaacatcactgggcagacaggatttcatttcaaaagacttcagtacagtgccctcttagacttgagagaagaagccattcaggctgcctccctcttatcaaataacaatttaattctgattcagaaacaaaattcttgtgacccccacaccaatctactctaccccagctcttagtacttgttcccaaaaggacaggggaaagaacgaggggatggggaggctaccttaaaagtaaagcaactcttaagactgctgggataactgttcccttaaatctaagaaacactgcagctgccagtcaacactaccggtctctgaacacagcaaaatgccgacacctgccacccggcatccgggggttcttttattttttggtaaatgtggcaggaaagactcagagagatcaactgcttcatgggaaagaaagggaagccccagggaagagagacaagaagcatcgtgcctatcctagggtactttgtgtgtctcctctctatgcactgaaagggctctttgtgtcacactcacactcacacacccggcgagtctgtgtgatttattgggggaaggaggggcaagaagggtgattttattatccctcttcccagtgagtcccagcacatctctgctgggcccaagctcggtggcctccttctggcccagtcccctccgcctgtggccgcagagataacagaggggaggagcccaaacaaaaacagccatggatctagggaagtagagaggaaatccagcgagggagccggaaaggaaggagaaaagagctggagggagcagaggggtgggggacagaggaagaggagggaaggctccagcacaggggaaaggggaagggtgggtgggtggtggcacaggaagagtgaaggggaggatgggggaagtgcaagggaggtgccagaaataggcaggaggatgggttggagaaggcgaccgccgccgagggaggaggccgagaggtggaggagtggggcaggggttgggtggggagggaagcagcacggggcatcaattattaagtgattacatcatccctgacattaaaacaacacacacagccccagtccccgcggggggccccaaaaggagggcgggggcggagtctgggccagcctcgcccccaagccaattcccattttcacccggcgcccgcttgcgggcgaggaaatggggtccccatccccgcgctgcctcggggccgcaccccgcaggggtgtcctccggtgcaaccgcgggaagaccccaagcaccgactccccggcagccccgcggagcgccctggcggccaagggaccgcagcaccgggccctgcggcgggggcggcgtgcgcgggggcgccggcggccgggcttctccgcagcatccccgaggcctcccgcgacgcatccccgccgcctgcttacctgcgcggcgctgaggctccggagcccactcacatggtcctctccccgccctcctccggcgcggccgaggcggctccggggggtccccggcgggcccgggagccggtgggccttccgagagcaccgagggggcggcgccggggtgtccccggcccggcggccgaatccctccctggcgcgggcggcggccgccgggcggtgcggcgcgggcggcggctttgtgtgcgcccgggcggtcctcggtgcgctgggagaagcgcggcgcgcccgggcgggagaggacgcgccgctcgcacaacaacctcgcctctactctcgccgccgggcggcgggcgggtctcgaaggccttcggctcgcggcgacccctcctcctcgcccgcggcagccccctcctcgccggctccgctcctgacagatggcgcaactgcaacgacgcgccgccgccaccagcgcggctgctcgctgctactcttgctgatgctctgcccctccagctccggaggggagcgaggagggggcggggcgcgcctcgagagtgacaggcccggctgccctatcaaagagccccttgggagctgcgagccgcaaccattggcgcctggggcgtgggcgggacggcagtaggtggggccgccgagtgggttgagcgttactgtggcagcgggcatcccagggtgcgtgcggtgcagggtgtgcaagaaaatgcgaggttggaggaggaggtctgtgtgtttttaaggattgtgtggagttgtgaggtggcggagtagggcgggagaaagagcggagagtgtgaactgcagtttccgctttgcggaaggttgcagctgctgctgcagattggcacctgccattcccccaaaaccatgggaaactgcctcgagacagggctatcttgcctttctggtgtcttttcatttgagggtgagaggatgaaatggaaaattgggcggtgatagcagcgttttctttgatcaaactgaaaagagtacggagcaaagtagaatcctgtcctgaaacgtggaaacgcacaacaaataacaatgaggaggagaaggagattaggatcattttatcagtcccctatttctgcggacactcatttatattttttttctagcaaaagtctggaggaagtattactgaaatagggggaggggccaagcggcgactaaggaacctgaaatgacagagatttgttcgtacattccccgccccacccccaaaaaacctcgtttaattgtagtcattggttgtctttggtttctcataacattcaaacttctcatgtttttttccccttcactgaatctgagcttttgctcatatttcccttgatgaaataattgccggtttagtatacagttgggagtgcatcggtctttatttcctatccagcttttctatggcaggatgtaacttcataaaaagaaacactttggcttcctgattttctttataggtaattcctgtttactgaaagttctgctttaaggcatactcagaatcgctctccttaatgattttggcaagaaccctaccttccccctcagcaaatctaatgttctaagaaattataagtgaatcagcttctgcttctgtgctcaaaatctataatattgcctttccggcccactacttgtttttactgtagtttaaaaaaatctgtcccttttgctgacttttttctttttgtacacactactttttaagaaaagttgctaacatttattaaatgatctgcatcctatggaggaggaaactgaggaaaagaaaagttaagtaactaactcaaggtgacagtatacagaggttactggatttttttccttttccttaaacaaaatgacaaattaaaccatgtttaaattgtgtctggaaattccataatcccaagaaatggaaccatagctaggactaggatatttccatacaagagaaagccagcttcatttagccaagaattgcttatctcaagagcaga

SEQ ID NO: 213 - DNA, 398992 bp, Homo sapiens
  source 1..398992: mol_type = genomic DNA
atggaaggatgggggcattgtatctttatctaaaaaaatgggaagtcaagagacaaattcccatatctagtgaaataagaaatggagatgcaggttatgaagacattttcctaaaaccagctggttatgagagccactaactagtttcctatttggtttcaagatgcacagacccacacccacacccaacttgccatttcaatgaattgcattttacttacaagtaccctctacattgcttgcctgttgattctaactggaacttgtttctataaaagccaagggccatgaagcacaagtccctctaatgccaggagtacctcaatcaataaccattactggtttagcaacatggggctgcgtgtcctaccttaaaaatggtatcacaggttccaaagagtctgtcttctttgaagaataatgttcccattcataggagggctcataaaccctatcctttagaagccagtaaaaaggaagttagagcagaaattgtaagacggtgtcacacgtgggtgtgagcagggcagtgatgagacaggagtgaggaggctgtgcagacatggtctgggtatcactgggccccacatgcagggaggcttcctccaccaattaaaagaagaatactctttaaagaaaaagcttttagaaatccagtcagtatttgaaaatcctttcttctgtggttatggtaatttaagattgtcccctgggatggataaggttttaacctagtgaaatgggtgagaactgtccccattcgtgatgttccagccttagacgaagaattagtgtggaatatgtccaagttggggtccccaagtagaccagaaatgtaaaaaacttgtccaaacaatggaaaaaaagaatgaaaacaggacctgtaaagaattcccaaagaatctgcattattttgcttaacagttaggaaatttggaggtaagcctgaggacattttgtgagacttaaaccaccattggggaaccttccttttaaggtgtttgcaggtgaaccaacagcttctctggaggcctagaaatatatttctcaataaaagttctacctaaagtgtccaaggatctgaattaattaattaattagttctgagacattgcttggtactttctcactggagaaaaaaaacaaagaaattgcctaaagaactcaagataaggatcaataccaccttggccagagcttataggtagggtggctccctgacttttaatataaaaatattacttgcttaaaatacctatttgaagacagggacaagttagatctctgtgtgtctagttgtcctttgaagttgaggataaattgtgattttcgtttttttaagtcatagttcaattgatctcacatgcagtcaacttcgggcttatttttttttactttcagcataacccaaaagggcatgtgcaagaatgactagaattaaaataaccacaccatcttcacaagatagccaaggaagaaaaaaaaatcagtcttcacatttaggtcagttactccttttttaataaatttgaattcattcatcaacaagtttcatattgtatctatcactcaattttgctgttttttcatgtcaaataataccaaaaaattacatcaatgtgcttaagcaaaactgggtttaaatttatctttacaataaaatgaaatcaacatgagaattgattatgacagcaatcgcctattcctactagaataatcctgtacttaccttaaacacactcactgacttgtgaagtagaaacatgagacaaacgtgacaaaacatgttcatggggttggtcctagggagaggcatacgggagccactctctggaaggtcattgtttacccaggtgttgggaatttagtatttcaggaaaacatggcgcctttcaatgcagtagaagaggtaatcaatccaaggcacactagctagtgtcctggaaaaatttaattcacctgggcagttctttgccccaagattcgatgttactctaatggctcacactgacagccagagtcaattccaagagtaacaaaatgtttcaccaattgttcagttttgcttacataaaatggccagaaatatgaactggttttcaggtggagagttaaaataagaattaagtgatggtttatactttcaagccaggagattcaaagttggacacattcttgttagaatacaccaatggtgggacaaacaccaatggattatctactagatgctgaaaatgaacacctacaactgcaatgtgcctgtccccttaaaaccagccccagactcgtttggcatcacctttgagatgatctcctcagtaaaaatgtcaacgctgtgtttggacaagagagaagtgcctttcagggagtgactgaacatgtcaaagttctgggtgctggcgttaaaaacacaatattgcagatgtacaggtagcttccaaatctaatggaaatattatcatgacatactttctagttcgtttgagattcaggggaaatggatgtcgcatggtatagacagtgaaacccctccacagtcccggggttggtgaacaggaataacacttgttttaaggactactcaagtctatcagtctttctctgtagggagttatgtagcagggctcttccattatctcaaggatatctgaatatgggtaataacaaactgtcataacaagattcttctgtagatcttgagcccctgtggcgcattttggaaagacaggactactgagaaaattaactctttattactttcaattgttaagaaagaaatctcattatatccccaatgataacgtttctgtccttactcaagaggtctgggtgtgggtaacagccacctcccaacaacgtcagaggtccgggttcagaattcctcaacgcgactcagtcactggctcaaataactactgtggagtaacgagaggtcattttaacacaacagagactccaattcaactctcttctgttaacacagtcagagttctcttctcaatgctctcacaagttttaaaaatggagaagctataaaataattttgttagaagaaaagtaattttcttctgaaatggagtaaagcaaacacatacccaaggatcttaaaaagtttttttttgtttttacagaatatatgtatgtatttgtgtgtgtgtgtgtgtgtgtgtgtgtagttacaaacactatttatagtatagctaatatgttaacttcatcgcagtgtctacaaagttgtggatcccagtcttggtgccaaatgcatataaaaagctcaaaagctattatgactataccatgcaaatttatatccagaaaaccttgggaaggagactgcagctctttggagccccatggggtctctgcctttgatatttgggtacctcaactatgcatcaaaaaagttttaaatcacttttctcccagaaagaattaatgtcacagttctgaatagtataaattatacacttaaatagaccattgactgtttttgtccacatccatttacattttggggtccctcttctgcatgtggacctcacacctttaattactggatacagaaaaagatacctgaagtattgaaagggataaggtctttgcaaatgtattttttttctttaacatgataataatgataaggccacttaacaaggtttttcccaatctgtttaacttttaggatcccccattgttacccatggaaaaaatggtcagagaaaagccaaagccaaagaaatccctggctagtctccagatgaaaataaaaccagagagcagcgattaggaggaaaaagataggaatgaaagagggaaaagggtctaaaagtaggtaattgcctctagcgtgagattttgtggattatgttttatctgatggtgggttttgaactgttgcagatgcccacaaattaaaggttgttacggccaccaaagaaaaatcaagtagtggtcagctcatggggatagtccacaccacacgcatcctcggggagggtggtgcctctacctacatcgagacaactggggcctaccattggagcactctggtccttggttttggatagaacagagagggtgaggcatacgtggcattttgggataaagtattaatttagcagttcttcctgcaaattttgctttttatttttttctccaaatgctcaacttcactgtgacacctgtttgcacaactgtagtcatttcagtttatggatgcctgtgatagaaatattgtttacaaaaaatatatcatctcttttttttttctttagaaagatctcatctaaatagtaagttaaggttgcgtctatgaaaccggtgcaccttgtcttgtttctacgagctttaaaaagtccaaatactgatgaggctgtggatcagaaggaaccaacagtgactgtgtttgctgtcaggttgccctcctttgcctcagagaacggtcatgggtcgttgggtgacgcgtggtgtgtacgggtcatgttcctgcagaatcctagtcagtctaggagtagttggatgtgcttatgaaatatgtcagatacagaaataaaggcatgaggatgattcttagtttctgaaattgaacagtagaagtgttttagcttcaatcttaatttctagataacagaaagtagttacatcacataaaggaaaatatgacatcgcatgctgccatgatagcaagcgtaagaaacaaaatcttggtaaatatacatatatatgcatattatgcaaatatattttctattaacatacaatgttataagaatgataacataactgcaagggggaaaatcatcctagatggttttaccttagagtaacgaataacctgagacgtctatgctttctgttggatatcaggcctagaaatccatacgagatgtagagcacattttcagtgattgaaatgtcactggccaaacgtgtcactgtgttcgcacatgacagtgaagctggatccactccaagtgaacaacagaaacaaactacacactgtatattagagtacttacaacgagatgccattcactcccgatgagttttcaaaagacggtcgttcagacatcaacgtgggatctatctatgtttcagacaacaggtaagcacactgccagtggctcaccccagccactaaaccattgcagaaaacgtatgcccgatgaaaacaaaccccatcaccagagaagccaagaagcctttgcttactaaactgaacgagaggatatgaagtaagtgactcattttaaactagcaataccactgtatgagttttcaaagattaactaagaatgtctttctgatttttaaactaaaacatctaacttatgataatacaagacacatttggggatgatattgtgtttcacgccctcattctcaaggcataatatttagatgatacttgtccctttcaattaaaaaagaaaaaaactatgactttctttaatatgcatcctgtggtaaattgtccatagctgcaaaatgtatatatgtatgtgtatttgtcttccatacacatgggcactgactcctgtgtgtataaacatatacacatacatcctcatatacacgtgtattttatatatatgctgagaaagttcacatatatatacaattgcgtatgtatatatgtgtgtgtctgcttgtgtgtctgtgtgtgtacaggtataaaaacttgacaggcagagtaatatttcactcagtgttaaatgaagtctttgaaaaatcaagtacagtcactcagttaacatagtacagccagtaaactaagttgaaaagagaaaaagtgaatggaaacacgatcctggaccatctgtctatggcattcacatcggttagatcaggtattttaattttgagctgtgaagacctcctccgtagatgggtcttcttgtgcgggaggcttctgtcccccaggaatcgcccatgcccttctcgaggcatgctctgtttcctgtactggattcctgagttgtcaaaggatattgctgaattcctggtatcgccaatgccgcctgagacctcattcatttcattgtgaacttccagcgatgtcaacagaatatttccatgagcatccacctaattggacggaaaatgcacatggttagacagccagcagcataatttccctatgcagatcccggacagaatgatgtcatgccatcacatgttgcatgttttacgagaaactgtacatctgtcaaatccagcactccgttttattggaaaatgtcattttggaggttaattgcagttgagagatttttatttccttgatctaaaaatgctcatgtaagagattagatgaaataagggggaggggctttttcaaattgcaatttcacattatggatacaaatccttactgaaaagattaaagtacaaatgattttcaagatgttaacttaggtgctctaaccattttcacaactatactttgaataaaaactatattctcccatttgtctttggaagtcatcttgttcccttttctgatgatataacacacccaaattactacagagaaacacatgaatagtcctgtgatcgaagatcattcctgatgacttccgtggagtagatacagacaccccccaaccccaactcaggtaggctctccttgcccaatactggttctggcaggagacttctttttgaagggctatatataaaatagacgaaattcccttcccacaatggagccaaactttacaatgatagcattttattctgtgccaaatttaacttcagacatttcatgatgatgccaaaggtccattctgtttgtgggttggtctgcactggaactttcaacctttcacagaacatcctggggctgggggccccagtagagtcctttcttaaatgaactagtagcatctgctttctgagctgtacccatccctgccacagccccaaggaccattccacagtcccctgggctttcactccagcaagccccacacttccctatctctcttccctttctttgcctggagggccattttctttgtcctgttttaggctgtggaaagcctaccccgtgttcctgtaatagattaagtgtctgtggcttcctccatgaatctttcacaaaacacagttattttgtgtaggaataatttattgccgtattaatttgtgtcttcccgccttctgcatacactttaatttcatcaatggcatccagctagataagcaggaggtgaggtggtgagaggagtcctgcctgagaaggcgccgggcctgtatggagttccaagtagggataagaccgccggtgggatggcctcagacttcaagggggctgtgacacaggaagggctgcacacatccagggaccactcagactgtggtggaaaggcaccaaagaggactctcagatgtctacaggtttggtaacaccattctgggtcacttcattatgcttggggaaagtgaggtggtcatcagggtaatggcccccagggaggttgtaaccacaggatcaacccagtctggttcaaccttgtgtaataacatggtgagttattttcagttgccatgaacccctaggttgaaggtcatgtaacctaagcatgcccagatgaaccaagcatacaaccatgagtggaacctaagtgctcagactgaagagttaagaagcaaccaccacatggcaggatccagcatccaatcagattgagcccatggcaggatgcagtcagaccatacctcccagcatcacctcattgcaagatccaatcagaacacgcctcattaccctctgcctataaaacctgccccaaaccccagttccaggaaagagatttgagcatttcctcctatctccttgccagttgacttgcaataaaacttttatttactcaaaatctggtgccatcgtattggtttccagcacatcaggcagtgagcccattcattgctcagtaccaagctcaccatactcaccagattctgtgagtatgtaaccctatgcaaaagtgactttgtgcatgtcattaagggcacataccctaagataggaagatgaccctggattgtccaggtgggttcgatctcatcacaccttcaaaagtagagaactttctccaacaggaagcaggagaaaaagtcagagagataaaagcagaggaactcaaaaactgaggacttgagtcacccttgatggaaaggctgtagggaaaacataagaagaaacaaggcagctgataggagcaaagatgggctccagctgacagcccaaaatcaaataatcccattagaaagtggacaaaggatctgaatagacatgtcttaaaggaagacatacaaaaggccaacaggcacttgaaaaaaatgctcaatatcactcatcaggaaaatgcaaatcaaagccacatgagatatcatctcaccgcagttagaatggctactatcaaaaagacaaaaataacaggtgctggcaagacagccaagaaataggatctcttaaacaccattggtgggaatataaattagtacagccattatggaaaacagtatggaggtttctcaaataactaaaaacagaactaccataagatccagccaaggcaatggggatctcagtttacgacagggagctgtatttgaccaagcacctgaatgattctggaagcacagttaaccccagagcctgcagaaaggaaaggagcacagattgccaatactttaatttcagcctcctgacaccctaagggaaggacccagccaagtctcactgtacctgcacgtgtggcctaacagaatcatgagataaaacacggtcttatttgaagctactaaatttgtggtaatctgttacagtggcaatcaaaactactataggaggtgagagggaagatacatttgcattgtgcctcaaagaacgagtagaaatttttcagacaaaatgcagcaaaaacatcaaaagcaaaggcttgaagagcacctgaaatattttgagaaaggcaaacaccgttcccagcacatactaagcctgagacagatgaggtcactgtcatcatcactgtcattatcactttcgtatcctcttatcatagtaggaaagtacacctagtgctgggtggaagcacagattagatttaggccagtgaggtttttgttttttgtatgtcatgtgaaagaatttcaatttaactctttaggaaacaggaagaagagtactttctaggtagaaagtcatagacttctgaagtgcaactcaagctataagaaattgaatttgagaagagagtgcagagaggggccccagggagagcgccctgcaatggtttctgtttcctttagtggagtctggaatggaaatgcctgaagcccgtgaataactgctccctcggccactgcaacatatcttgaggttttccttaagcctcgagacacacacggcatgcccacagcagcaacgctgggccttcgcctgcccagtgctgaatctccgcagctcaggggctggggaagtagtggaaagtcactcagcactccaatcccaccccggcccatgcactcctgtcccctgtgagctcctagcaggagcgtccacactgcagcaagtgtgccatgagtccaggtggtgccagtgcttctaaaccaatgctacatcctacagttataggatgaagagtgtcaccgcggggtcttccttatagtttacaggcagcattggtttagaagttgtcagatagtgacctcatctgtcctccactagacggagtggtctccttagaatggaggacagccaggctgagtgcttggagatgggaatggaccgagatcacaccacctgtgctggaagaaggcccttcatggagacacgtgatgtggggaggtgaggagggcattttcttatattttttatccagcagaaggaaaattctaatggagcttgtatctcaaaagcacctggaatgtcagaccttggtgaaattttgactttttttttttttttgagatagagtttcactcttgttgcccaggcaggagtgcagtggcacaatctcagctcaccgcaacctcctcctcctgggttcaagcgattctccttgcctcagcctcccaagtagctgggattacaggcatgtgccaccacacccagctaattttgtatttttagtagagatggggtttctccatgttggtcaggctggtctcaaactcccgacctcaggtgatcctcccgcctcggcctcccaaagtgctgggattacaagtgtgagccaccacacccagccttctgttatgcatctgtcctttctgttttctttccacgggatgattagcagcaaaactctttaaatgacaaagtgtgtctgcatgtctttgagacaatggaagcattccttggtttgggagacagagtttctcattgtaccaagaggatatggcaggagaagcccaacagttaaattcaggtgtggctgaaacaggtgcccatggcagtagcatgtcccttgtgcaggccacctagggctagctgtgggagtgctagggccacatcttcctgcccaagagtagtcattcactatccctaagaaggggtaacctgaacctgccctggatgctgcagggaggagggcttgactgggcagcccagctggtctttgcaagaagaacgattcacagcaagattctccaggacagaagcttgtccactggtctttatctccttccagcatcttctaccgtaccttgtgccacaaaggaaagaagtgggtggagagaatgagctgcctggctcacactgggaatgttgttgtggagagggcctgggaggggggttcaaccaatgtgttcctgttcatttggggtgttccattcattccatttactgcaacaaatatgcttggtaccccaccaaatatgtctgattttgaatcatgagagaaagcatatttggttaccatgaaaagggatttgataaattgaggtcatttatcaaataagctcaattcgattgtattagaatgtccagcatcttaaacagttctacttaaatggtaagcttatatgtttaaaatctatctgatgttgagtcagaagataatcaaaggtggaagatgcttataggtgttttttgttttgttttgtttttttgagacagagtctcgctctgtcacccaggctggagtgcagtggcgcgatctcggctcactgcaagctttgcctcccaggttcacaccattctcccgcctcagcctcccaagtagctgggactacaggcgcccaacactgcgcccggcaaattttttgtatttttagtagagacggggtttcaccatgttagccaggatggtctccatctcctcaccttgtgatcctcctgcctcggcctcccaaagtgctaggatcacaggcgtgagccactgcgtagtaacgcagaatttgttcttttcaataatactaaatggtttgggaattacgatatcagaaaagtgaaatcgttttcctgaagacagaaaaaaacagaaagcattatttagctttagaaaaatgttctctacagacaatgcaatgttttaaataacaaaactgtgagatgaaaaaaagcccagtcatccacttcaggacgtgcgatgcctcactggagaatgcacttccacgaaggggctgggattgttcgagaccattcattaaaacattaccatgtggctgctacatgtcaccatcttgccctgtccttagtcaggagcacaaagtgaacacaagaaggtcctcaccctcaaggggtctaactgatgagaccttaaataatcaacaagtgcatttgaaaaaatactgcatgttgccttttaaacacattgataattattactttttagagacagggtcttgctctgttgcctaggcttgagtccagtggcgtgaccatagctcacagcagccccaaataccagggctcaagtgatcctcttacctcagcctcccgagtagctgacacctgactatttatatatatatatatttatttatttatatttatttatatataaagtgtgtatatatataaagtgtatatatgtataaagtgtgtgtatatatataaagtgtgtgtgtatatatatatataaagtatatatatatataaagtatatatatataaagtatatatatatatactatatatatatatatatagtagaaacaaggtctctctttgttgcctaggctgatctggaattcccaggctcaagtgatcctcccgcctccaactcccaaagtgctgggattacaggcttgagccaccgcacctggcctaaacacagttttaaataccatctcttttctagtgataacatataaaaagctccttttatcaaaatctagtagaccagaattaacaaattcgtggagtgaaataccaaggggaggaatgtcttttcttaaaggaagaaaggggagtattttgcaatctgtttagtcagatgaactttgacgattctaatgactcagttttacccggctttataaagatgacatttataagccttgtcctctcttcccactaggaaagtggaaaaaacatacctctccagtgtgaccaaatccatgacaaatagcactcattcatggacagatgttacaagagcacgtgtaccacgtccgcgtcatgggtgtgcatattttggaagatgcagagagtcagatgctgtctaggaggcaaagcttgctgggcacatgggacgtgagtgatctgccattttcacaagtataaagcatgtgccccataagttgggagaacagaaataaaaccaactgcttagagcagggagtgatggggcaggatgcagataagtggtaggcaaaaaaagtcaaggaaactgttggctgggcacagtggctcacgcctgtaatcccggcactttgggaggctgaggcgggcggatcacgaggtcaggagatcaagatcatcctggccaacatgatgaaaccctgtctctactaaaaatatatatatataaattagctgggtgtggtggcaggtgcctgtagtcccagttacttgggaggctgaggcaggagaatcgcttaaacccaggaggcagaggttgcagtgagctgagatcgcgccactgcactccagcctgggcgacagagcgagactccgtcataaaaacaaaacaaaacaaaaaacaaccaaggaaaatgtcatggaggaaaacatctggcttagatcttggagggaaaatgtggaccaagaagaaaggcattctaggtagagaggacaggacaatggaaggggaatgggtcatcatgtaggtggggacttcaggaactgcacagggagaatgaagacacaagacatcgggtaaaatgaatgttgacttgagttttcaagatttagatacaaatctgtatgaatccatgtcctgtcttccccagcgctgtggccactgttgtgtttgggagacgacctcacgaacgtgggtctctaaggctgtgcccttgaactctagtgaaggaaacttagactgagggaagtcaaacccacctccccacctatgttgttaataatttacaaaactacagtgctcttgggggctttggacatgtatgactaactggtagctgtcttaggacatagcacatgtgagaaagaactcaagaaccaatacaattttacattattcttatttcagagtgggtgaacacttgtaacggaaacaacagtgcaggtaactctcattctagtgtgaaaaggaacctgaatatatattgaattaataagatcttagtgttaaatagtttggctgctttatttatggttttatgtttgtatggttttcatttaagcatgaaccagtatgtagaaaatttccacaaaaattactcatggatttttttttctgaaagaactaaagggttactaaaaatctgttaaatcttaggagccaaataacttaaacagatatttccaagagaaagtctttttctatcatctagagtttacgtcttaaagtagaaagaagcgattgtgggtgaaatacaaggctgaaatgcccttcatagaatgacagatgacttgcaatttttaaatcatttcatgaatactctttattttgaagggttcatctcatatctactataattagaaccattgatttcaatgaagtttttcttcctgctctataaccttgacaggtgcaaacattcaacgactaaaaacatctcattcagaatatagcacagagagattttttgttttttcctaaaatatgtcaccagattggcacacagttgatatctcattctctaattttcttccagcttctagttaagtaaaatactgtcgttttagaagaatgagaaaggacttgccacgtgaagaatgaaatcttgctctttagtaagaatgatgttgagtctgcagctctgattccttgccaagaattatgactctctaccacctcatgaaattcaaatactaattggtcaacttgtaaaatatcgcaaggcttgtaaccataatgcatgaattacaaccaaagatgaactcttgggtatagaaacaactcaggaacaaacagatggtatgcacaaataaattaaggtcaaggcttacatggtaccactagtctggggagatactaagtgaatatgtgaatgtcttaagcattcatgaatcaattattaggttaaaatatggcataaatactaaatataaggaaaacctactcatggttttacagtagggtcactaaaaccatagtaccaagaggcagttgctggtggcctacagtgtccataagggtactgttttctcttgagatgccttacaggacacagaaagtggtctcaagaaagacaatgacaagccaagtccctgctgtggagccagcagctgtcagtcagggcgaagctgctgggtgttgttggccacactgagatgcaatcccaggtgctatccctgacacatcacagcattattcacaatagtaaagacagagtatcaatctaaatgcccatgaacagtggaccggataaagaaagtggggtacatatacaccatggaatactatgcagccataaaaagaagatcatgtcctctgcaacaacatggatggagctggaggacattatcctaaggtaactaacacaggagcagaaaaacaaatacctcatgttctcacttataagtaggagctaaacactgagtatgaatggacgaaaaaaaggaaacagcagacaccagggaccccttgagtgtgaagggtgagaggacgaagaggatcaaaaaactaccttttgggcactatgctcattacctgggtgaggaaataatcggtacaccaaacccttgtgacatgcactttagccatataacaaacctgcacatgtacccttgaagctaagatgatagttaaaaaaagaaactgtagaagctgttaggttgtgtatacagtaccacttctgtttcacgtaaaatttgattcttttctcatgttcctttctttcatccacattacttgatataaactttttgggagttacatttctacttaaacattatcactaaagtcttaggtgtactcaggaacaatttttaatgtttatctttaggagcatcaaatatgcatttagaattagcatacacataatcatacgttgacttcaaaccttaagtaccgatctacaatacagattcttaaccatgtaaacatataaaggccttactaagattgccgagaaaacagagaaacagatttttgaaaaaccaaacaataaacatggattcatgaatcaacgaaaaatttcttttgcatttaatttataatatactttttctacatcctgctaattttctctatggatgctagagtttttttgtctttttatcttagattttaagcctcgtacccataaaggtatttctgcagcaccacagtttgactgttttaaacagtcacatttagaagaaaaaaatttataacctgtttaaattaagaggaaatttggaaagacagcgttgtatgtgtatgtgtatgtgtggatacgtgtgcctctgtgatggaaacaataatgatgtgatgaattctagtttccttggaaacagcatgaccaaagtgtattgtgtgttcctagtaggatgtggacctatttagaaacataacagtatgatactaagtatattttccactaagaaattcaagatagttttgcctgtgaaaaatctggttttattcacagaccctcagttttctgaccaactctatttatgctgtgctgaaaggaaggagccatttacattcacttaatgtgcttccatgggttcatgaatgttcgtgggcctctgccaggtctatgggcacaggcagtcctccaaggagctactgtgttcgctgggaggtgtggacccataaaggcatggagggcacaggatagagcaagaaaacctccataggcttgagaaataagtatgtgatatggtttggatctgtgtccctgcccaaatctcatgttgaactgtaatccccagtactggaggtggggcctggtgggaggtgtattaggccattctctcattgctataaagaaatgcctgagactgggccaggcacagtggctcacgcctgtaatcccagcactttgggaggccaaggcaggtggatcatctgaggtcaggagttggagaccagcctggccaacatggcaaaaccctgtctctactaaaaatataaaaattagctgggcgcggtggcaggtgcctgtgagccaagatcacgccatcacactccagcctgggcaacaagagcgaaactccatctcaaaaaaaaaaaagaaagaaagaaagaaatacctgagactgggtaatttataaagaaagaggtttaactggatcacagttctgcaagctgtacaggaagcatggtgctggcacctcttggcttctggggaagccccaggaaacttataatcatggcagaaggtaaagggggagcaggcacatctcacgaggacagaaccaggcagggtggtattgtggtattaaaccattcatgataaaccgccctcatgatccaatcatctcccaccaggccccacctccaacactggggattacaatttgacgtgagatttgggtggggacacagattcctcatgaattgttgagcaccatccctttggtgctgtctgtgatagtcagtgacttctcatgagatgatctggctgtttcaaagtatgtggcatcttcccctcctccttgttcctacttttgccatgtaagttgcctgcagctcctgctttgacttccaccatgattgtgagcttcctgaaaccacctcaaaagccgggcagacattattgccatgcttcctgtaaaacctgcagaactgtgaaccaattaaacctcttttctttgtaaatttcccagtctcaggtattcctttatagcaacagaacaatggcctaacagtaagtttaacaagaagaattaaaaaaaaaatgtgggaagaaacccaacatgtaaacaggtagaaatatatacttgaggatttgaggggatagaagaggtggaaagataaattttaaaaattatattggaactataatgtgctttcattcaaatgttgtttataatcacaataacatactgcttttatataagctgaaatgacatctaaagataaagtggctttgtggttggaaggatgtaacagcattgctgagttgggctgggctggaggagggtgtgcaagggctttagaaagttcatggacttcataaaacaaagtgtctaggtctgcccaaccctggctttttgcagaacacaaccgggaggggccagggccacggcagatctatgagagcttccagaaagagcactgctcctgccttgtgcattccttttggactttgctttttctctagaagactgtggccactgggcaggtggacaaaagatggtgtgcctgctccagtgcaaagaatggcagcatgctggatcatcaaattgataattttacaactaaaggaatattgaaacattttggaaaaatgcttccgtagaacaaattcacactctccaccccagcgtttcattctttccagacccacaggttttgttctctttgtaggaaactatagatgattttggcttctccagcatcaacactaatattggttttataggaaaccctgtgacatgcacaaggaaatatttcagattatgatcatcaagcctgcccaagtcctacacaaagctgatgcaagtatatttaaaaaaccattaggccctgttactcacttctgtaagtggagaattcagaaagggcaagggagtctttcattgccagctccatgttgaccctctcccttgtgttcaacaccaggccagagattaaccagccccagtccaaatgccctcacccaaattcaagaatgcactccacttctcaataggctgcccatccagatagacgctgttttaaggggcttactggtgagaggaagaaagcctaggtctgtgccctgagggtagactggagtaatgaaagtgactgttgggcatgctttacctgggcaaaaagcaaccgggccagggtcaatgtgcacggaaatgtcaaaagtcaattttgttggccaatccaacagtcctctttgtgtaagcctacaaccactggtttcagtgaactctggccagtcctagctagatggccaggactccactggactggtttgagcaacccctgaataaaaaacacctgggtgccatgtcataagggctatatcacaagtacaagaagggtgtgtggcttgacatacactactggggaaaaaacaaagaaatatcatgcaagtaaatgcagtagctgctgagctgcagggaccaggtggggtcaaggtggtggagagcctacccggttgctttcgctctttgaacggtcattctttgccttggctgtcttttctgcaagcttcttctgcctttgagggcctcttccaaagaaaatgtagttgacaaaggcatactccagaagggccaggaacacaaagacgaagcagcccataaggtacatgtcaatggctttgacataggggattttgggcaaggtctcccgaaggtgggtgttgatggttgtcattgtcagcacagttgtgatccctagaaaagaaacaaagtggtgagaggctgaaactttgccacattggtcttcacttttcactttccttttatgttttctcaaacagctttaagtagtcagagataaggggttgaatactgtggggtgactggaatgcaacagagcatacatcttgtcatttgcaccgcacgtcaccactcagaacagcaagctgacatctgtactctggggaagtgaagccgtgcagggcatctccctcccccacccacccccctgcccactacaccttgctatcacacacgatggaattttgagagtagaagaagagatatgtagagcaggaaaaaagaatgtggtttttatgaatgctggaaaaaataaaaataagcccagaatttagcataaagcacaaagtgtctagatgagaaacctccaggaaaaagaatgaatttgaggtgtctgtggctgcagaggcaaggctatgagcgagagctcagtgaggcagcctgtgagaagaaaataattcctactacaatgcttattggaagcaagaggaatgaggcaatgatttttaaaattattagccatgagatccagtcctgagctcaaagagaaagaaatagctgagtgaagcttctgagggaagatgatctcagagagcgacttccctcctcaactaagaaagaatctgtacacaagctgcttaggaaatgtttgctcaagttaagggttaatgatttcattcatcttatagaatcccaccatactctggcgcaactcatcagatcctttttttaaatgtcgttatgttgaattctttacatagtattgtatggatgatctcattgtttcccaaatagagctcaatttagtctaaaaccatgtgtggaccatgtattgcaattctccctcccatagcaatagacataagattctgcactgaatcatctgaggccatagacaccaggaggcaagtcagtgacatgcccagagcttgtggagttaagttacgctgcgcttacaggaaaggcacggatcactcccttgtggtagggtgggatggtagtactgcagctgacgcgctctcttggagactgtatttttgacatattaatatgtctcaaggaagcaagacagctttgagggctgagctcttttctacgtatgccactgatgccactgaatgtgaagatgtgggtttcaggacccaataaagagaataggttcctccgcattgctttgtcaggcttccctgaaaaaggagactttcaaaggagagagcttaaccataatccttcatcctcagtaacccaaaacccacatgacatcactgaggccaagaggtagtgccagccctacatttcagcactgtccagatatgtactctgggacggagcccaggccattctgcacatggtcccagcccagccctccagggcagagtttgaatttactaagcattccaatttcatgccctctgatttcccatcctatcctgggaggcagcatcctcatcctctgtgtcccacagggagaaccttgagactgcagagctcagctggcctgggaatcagctggagagcaagctagacagcccagtcttccatctccaacacaagcgctccctccactgagctctgaactgctactaaaagctaagaagagaactgaagacttgagaaactctttttatgtagaactgcaaaccatggttgctgacggaatgtatggaaatccaagatgtcagaatattttaagattctcttttaacatcacattcatgtgcacctggggactttttaaatttgaaaatggcaatgggataattactgtttacaaataaatgtgaaaacaccacataaatgctacaaaattaggcattctcaccattattcaaaaagtttgtaatgttgttgccactaccgtctctcccccttcaacttggatttgggaagaccgagcgctttgctttagtcacgactttgcctctcctgctggctattttgaatggacatgtatgacacaggcctcggcagatgtcccagacaatgggctgaaggcacacaggaataggtacagccagcacatctcacaggcactcagcctggtaaatgaaccccagagggacctgggctaggaccctggatccaggctgattggcacaggctcaggaatccctaacaataagatttcacagtgagtacttcaggtctttctagtttggacccacatgccacatgagttcttagcttaagaggccaatgcatttactaagtccttctattgctttacctgctatgggggatactgtggatggtggtgtgttgtggtggtccacagcctgtaaaggggagccacatggcccagacccaaagcccagctctgcctctgtgggtctgtagccatcatttcgagctgttggaaatctaatggcaatggctgaaaagctctgatgtgccaataaatagtaaccggcactgttaacactaacaacaaataatcatatgactatcatcattacagaaaaatcattcttcggtagcctctaggcttcctggccttgccttgaccttctgctctctaaagggaaatcatccagctgcagtacaggaaatggctgggtggtggctttcgtgtttttttgtacgttcaccaggcttgtaagtctttctgtaaattgctagcctcaacttatttgtcatttagattatgtatgaaatattgtatttgaaagctgtatttataaaaatgaatatgaaataaaaatataatttctttgcattatttagtcaaaatattttgtttctcctcctcatgataaaaataatctggcctaaattttatcagtatacgtttttacctttagaagtatcagtacttttgcagattgagcatctctaacctaaaaatccaaaatctgaaatgttccaaaatctggaacgttttgagcacctccatggtgctcaaaggaaatgctaattggagcatttcagattttggatttttggattagggatgctcaaactaagtataatgcagatactccaaaagtagaaaaaaatctgattttcaaaacacttctggtcccaggcattttgaataagggacacccaacctgtattcactgagggttttgagggaggccatctaattacaacttcccactttaaagtttggtggtcgttaacgctaacagttcaatgtatctgatggtcagaccctgggcagcagaagcatatcatgctgaagcccacagagcagccgaggagcacggctgtctgaagagccagcagaacaggccctgagtccctcccgcgttgagtccaggtccaacagtgcccagagcccaagggtgagccctcaatagaggcctctgccgagccccacccgtcctagctatgcagaggcagcacctttatcatgcatttagaagcaatgtgtattgatcacagtgcagtcccttaggatgaatgcaaaaagcactgtaagcatttcaaagctgtgctataagactaggtgcttgggaaggggtggcaggaagggggatttctccaatgaaagccctccaaactatagctgtatcctatggagctcagtagcatcttaacagttatgagggattcctcaataataagagttcataatgtttggttagcttttttcttttcttaaacaaatccatgacttttacaacatagtagaccaaataactctttactgtagttttactgacactttaggaattatatgcagtagttaagggagaaggtctggaagtcatactaactggattgaaatctttcttctgaaacttggtaattatatgacttcgtaccagttacttagcttctctgtattctatttttgtgctctgtaaaactggagcaataatacttcgtactgtgctgtgagtcttctccagaacagataaactacatgaatggccttagcagagaatgtggcacctaactatgtgataattttcagcctttattaatcttgtctgttgtattgatgatgatgatgatgatgatgatgttactcagtgctcctgacactgcgtcatactttttctgaattcaccaactgacatttcccagtgactgtagatctagactcagtcttgtattggcaggagggacagagggaatgcatgtgcaggtgtcagtcatactctgagagctggatctgttgggttcttgtctggccagacccacagccctaagatcacagctgccctcttgacctcggggtcaccctaactctagtgaatatccccttcactctggctctcatgcttgcctcccagagcacaagcgtcaatcctccaatgttgaagcctcagcaaccctagccagcccatgcctttatcccagcaaagccacagaggcacagtttgtttatattaataatgctgtcatgaagaaaaagtggaatctactttcatataacttaatgaaattgggttgaatgtaactcacttccggggtattaacgatttaatactgtagaaggcaatactttacaattagggagggacagaatctgtaatggctgggaaattcagatatgcacattttcagtacaccccaccccttgtgatgtcagataatcatggttccttggtactcatatttcactaactatcgcagtgacggcaaattctctgtagcagatgcttcagatcggtctccactttcatacgcctcttctaggcttggggaggggtcccagcaactttgtatttgtatatttcatattatttttcttaaaagggggtgcttgaaattgtataagctaacagctctgcataatttagatctgcctctacaaatgtatctttgaattttccaagtgaaaaaagagtttaacaaagagtaatctagcaatatacgtatttttaaagtaaaagctacataaagactgacattactggggaagatctgcaggctgtagaaaagtcctggagattttttttctttttttagagaactgtgcttatgatacctattagaaatacataacaattaaaacagcactttcagttttttgcagctttactcttcatagagtggttttcttatccacttaacacccttaggaatagctacctgattttctcaagccataattatgtgttatttcctgggaaataaatctgatcttgattacaactatgcaagtcacatgtttgtcatccatatacacacatgtacttacattttattagaaaagaaaacacgttattcaatttaaagtcctgggaaaagttggtaaacagaaaaagggctgggtgtggtggctcacgcatatactcctagcactctgggaggctgaggtgggcagatcgcttgaggccaagagttcaagaccagtctgggacacatggcgaaaccccatctctacaaaaaattaaaaaattagccaagtgtggtggtgtgtgcctgttgtccccactgtccaggaggtagagttgagaggatcacttgagttcaggaggttgaggctgcagtgagccgtaatcgcaattatgccactgcactccagcttgggtgacagagtgagactctgtctcaaaaaaaaagaacaggaaagaagggataactggaaccctgaattcttatgtttttttgtaaggtactttgccagataatgtgttgataattcttttccatcaatttttataagtactactgatacgttcactttcaggaaataaattcaaccctatccaaagggatggattgcagattgcatcagctctgtacttacataaacgtatttaaataattattttttctatgcagtttcatattaatcagctgaatagagaataatgtttctgaaaatataagccttcccttaataatcaaaatgctaaaaataatattggaacctataatacatattgtacatcagctaataatccagctgtcaaataaccaatggtcaggaaagatcactagagcctttggcaatcattcagaattgaattccatattttaatgctcattaaattgtgtaattccaattctatgctgtaatatttgactatttttctgacttaaaaaagaagaatgcacaattaatcaagtcttctttctgggccatggaataattttgaacaggagatgttaaaccttgctttaaaattagtgtcaaaaatagttttatcatgcaaatattctgcaagcatattttccctttcatgggcatgaaaattcacatttgagccttgtaattaaattaacacatcaagggaatcgtgcgtgaaattagtgtttcaagataaaaagtgactatacaggcaatgcttgtgtcacgctgtcaaaaaatggtagttgaactacagcctttgaactctcttaatactgtaatgatacggttactttacatttaaatatcacttaaaaatagcacataccgagggcaactctagcagcagatgcatcataattgatccagaaggacacccacgacagaatcgttatcagtatagagggcatataagtctgaagaatgaagtatccaatgttcctcttcaaccgaaagctcagtgacagtcgaggataggcacctatgggaaacagacaaggatattacactggagaaacaacatggcagactaaagagtttgctttgacttccataggtcaacaacaggcaatggaaaagtctgcgaataaaggggtgacccaccaccaagcagtttgcttctgtctgctagcggtatttatagaagaattaggaggggggtgcttttcggtctatttataagatagtgatgaggatgctcttctaaggctaaacgctcggttgagaacttggaaaaacgtattagtttttagcttagaatccagaataatgccaaataccttgtttattctttaatgaatgattatccccttcttccttgtagacagcggagatgtggctcaaggctttactgggcaagaaaggcttttaccagttgtcctttcagcccacctggagttcagccctgaatacagatgttagaggcattgcccctagagtgactgggctagctcaggggcaccctaagaatgagagaggcagagaagcaagtccagtcccggagaaagcagtggtgcacactgagggcttctgcttcggccacagaagaggcattaacgagagtctcaaaggagcacctgtctgccttcttgcccatgagtcccagtgttaattctcggatgtgaacattccactcaacacattttggaatcctaccaccaccaccatgacagagtgagaaaatatgccatttatcatgccacattcagcgctatatttgccttttctgtcttattttgttttcctttctttttttttttttttgagatggagtctcgctctgtcacccaggctggagggcagtggcacgatcttggctcactgcaacctccacctccctggttcaggcgattctcttgcctcagcctcccgagtaggtgggactacaggtgcctgccaccatgcccagctaggtttttttttttttttttggttttgtatgtttagtagagacagggtttcaccatattggccagactggtcttgaactcccgactttgtgatccacccacctcggcctcccaaagtgctgggattacaggcatgagccactgagcccggcctattttgcttttcttagagcaaggcaagtgtggccttgtttccccgtttgtttcaataggccactttctcagttccaatcctaccactccttgttttctggattctgatggagctgcctgagggccagccagtgagaacccaatgaccctctctaatcagctcctctgattgctcccccacactagcaggtgccttctttctgaagctgcccacaccctaaactccaagaggcctcacctttcctgatctcctcctactccaagcctggcaggctcctattctcctcctgcccctaaatatatgcattctacaggctttattccatgtccctttctgtgtctgtccctagattcttctctttggcagtctgattcactcgtatgactactaccattatgcaggagatgaacgattttatgtctaggcctcctaccttagcatcaaccacatttgcagccaggattatataaaagagaaaagaaatcaccaaacatacccagcacttcaaggctgacagtctcagaaatttcctccagtctttgtgtgtgtctgtgtagaatttctcttacacagctctgatcaaatgcatatatcacatgtcatcatagcataataatttttagagtggctacaaattatttgtaaacacaattttcgattcttcctaatgatccatcaaatatcaccacaaggactctataaatacagattcctgaatgctgtagatttaggtgttttcaatttttataaaactataaatagtactcttaaggatatatttgtgcagagccggttttccatatttagacttacttcttgaggatgaatatgccaaaggagggattgctaggccaaaggttaaagcttttgataaatattgtcaaattactttgcaaatgtatgaaaccaatgtatgccgctgccactatcagcagattaataaaagtgcctagcacaccttgcaaatatgacattatacattatctcttataaatagtttttgctaaatcccttgggaaaaccttgtcctttcaattacttttttaaaaattgaatacttcctaaatgtttgtttgttctctatatttaatcttgtaagttatctgattactcatttatttttctcatttctgtttcctctgatggtttttaccttttcattgaaacactttatatgctaatcctcgcttgtattctctgcaagcattctcccagttgctgttgtaaaccttgtaatggctttgagtggaggacacacagatccctaactttttgtatgcaattacttctatccatttcactttttcccttgtgattgttaaaacttgtgtttagccttaggtaagttcacaatacagatctacctgcaaacctattttgagggttggcaattatttcagagtttgacatgaggtgaaaacatatgtggattttggttccacaaacagcaaaccggtttctccaacaccatcagtagaatgaggcttcccttcatatacatttcacacagttctgttgtttttagactccgtttcttgtaaatgtggatcatgggcctgcgcaccatgcacgggggccagaccctcctcgcgggcctcgccctcctggctctgggccttgcgcgacttgggcacatttgggaaacatggaaatgatgctcactgtcatgccacagtcaaaatcttctacggctcattgcttcccacaaacatcaaaacacgcatccaggaatttcagtttctccatcttttcccaaattaacttcagttttattttccaccatgtttctgcattaagtataacattttttagtcaaagaggttctcactgcctcaaaatattcatctctatttcctgcctctgctgactcacatcccagttttgaagatgcgtctttccttatctatacctcaaggtcttggtcaaagccccatcttccatgaatcctttctttttcctccttccaaatgtaagtaatcaccctcttgaattttttttctcattcatattattataattataaatatttacaaaggtaagatcttccttaataagctgtacagtccccagggcagaatttgtgaggtaattttttttatatactacaatgcctaggtaaatgtcaaaaccatcataggttatgaataaatacttctgaaggctgaatgaatgaaaataggagtatttagtttctttatatgactctttagttgagcttaatacacaaaaggctcaacatccttattgaattgtagcttgaaatcccatggtaacttcaatatctttactgaagtaacttcaatattggctcttaatctgcaatttcatggcaacctcagacctttcttatcacttatttgcttctctttgcttcaggtaaatcttactataatccaccatacatggaacagtctgcatcagtcaggacatgttggcttatgctacagtaacaaacagcccccaaatctcagtagtttgtaacaaaaatttttcctataaaaaatatatccacttagctccctctgtctgcaacactgttggcctctggtagaagagctatacatacttcccatcatgtttctgtggccagagcaagtctcattgccaacttttatgtcaggagaacgggaatgtttaatcgtctcccagagaagagcagcaaatatttttgaatgataatgtaatttactatatcctccaactttccatttgccaagtcaactttcttaaacattttccaaagtacatcttcagggaaactgtgggcagtagaaaccactattgactgccatgactgtacagtcaaacaaacacttggacgatcattagggaccttgaagaagagaatacgaaactgatttcaaaaacacattactctctggaaattcgccaagatactcattgacacagaatttggaagtaagaaaatataccattttcttttgcatttgtttagcaaatacattctatttgttaaaagtagaatgcctttgggaagtcaaggcaggtgaatcgcgaggtcaagagatcgagaccatcctggccaacatggtgaaaccccatctctactaaaaatacaaaaattagccaggcgtggtggcgggtgcctataatcccagcactcaagaggctgaggcaggagatcgtttgaacctgggaggcggaggttgcagtgagccgaaattgagctactgcactccagcctggcgacagagcgagactccgtctcaagaaaaaaaaaaaaaaaaaaaaaggaaaatgccatttccaatcagcaaaatgttccggtatccggcgcatgccccacacatcctagtctctgaggtggaaacagtaagtggggcaaacaacgaaggtgaataaaagcacagtttaccttcccaactatttatagctcctgacccatgtcagacagattcattcagaactggcctccataaagctgtggcgtgcactatcctggaggtataaaaatatgctagggcacacgcctaagtgatttaggagaggtttcacattgtatgcacctctggtgtatgagacattcatggttgaataggattccttcaggcagggatgaaggagagctttcaaggtaacggacccagcagagccattcaagatgccacgagacagagacctcggaatgttagtcaacccaagaattatctgacgtagtagatctattctgctaggcaaaggcttttcccatttgatgtgcatcttaaagagtacataaaagtatttttgtagctccggtagacaaggtccttacactggcaggatggaatgccatgaaatatgcggtatctatgtggaaaactcccaagtgatcacagctagtggcaaataacttgaagttgagaagtaatgagtcagctgcactaagacatcccttttaaaatgaaacagaagcttgaatttacaactgaaatgcgctgaagccctaatgtctgtgtgccagtgcagacgtggtcaggtccccaggcagatgctgagccaacagacagaggcacagtccctgggcacaagtgcattgttccaaggcagggattccttggcaaaactacctagtgaagatgctgatcccggccctttctccccagatgcagtcaccattatgccaaaaacacagctctgggtctctaatccagcctgaatttatatcattctctaggcattaatatttttgaagaactcattaaaaatgtgaacacagaaggtcatgccagctttgtagagtgctaagagccactcaaatgcatctgtgaactaataagctggtatttcagcaaatgcagcagagctcacttatcacatgctcctcttcccattaagctgccatggtgaggcactcccactgcagcctgggaagctttgtgagctctcacttagagccgttctgggcccattatcatgctatatgattcatttattatctatcttttactttataatgcagcctaaaattaaaaatagtgtttctaatttttactcccattactagtcatcttattatgtgttgaaaaaacccattaagaaaaggaaatataagaaatagaaaagagagagaagaaaaatgggattggggttttaaaaaaaattgtttgaaatattgtctcaaccagacaatgagtcctttctaatcctccacagaaaaaccagcattgaaccatataacagtgcagcaaagaacagggatgtttgtttcaacaatccagcctctccattatttgggatactcctttttgagaaggttactatcctctctttccttgtgtgtaaaatcaaggcaagaacaccataagtggcaaaacattaaattatacttcataaaaattaaaaacagttatgctccaaagtgtaccgtcaagacaacctacagaatgggagaaaatatttgcaaatcatgtatctgataaggaacttatatccaaaatacataaagaatgcggctggttgggtggctcatgcctgcaatctcagcactttgggaggccagggcgggaggattgcttgaacccaggagttcaagaccagcctgggcaaaacagtgagactccatctttacaaaaaaatacaaaaattagctgggcatggtggcacacgcctatagtcctaggtacttaggagtctgagatgagaggatctcttgagcccaggagattgaggctgcagtgagccaagattgtgccactgcactccagcccgggcgacagactaagaccctgtctcaaagaaaagaatgcttataaaaaagacaaataactgaaattgtttaactgggaagaggctttgaatagatatttttccaaagatagagaaacagccaaaatagcatatgaaaagatagtcaacatcatttagtcattagggaaatgcatgtcaagaccacaatgagataccacaccataccctatggccacaataaaaaagacagaaaataactagtgttggtgagaatatggagaaattggaaccctcctatacttcccgtaggaatattatcaggccaccactttagaaaatagtctgatagttcctcaaaaggatgttaccctatatgacccaggaattccactcctaagtatatgagttaatttcctaaaagaaattaaaacatatatctacactaaaacttatacctgaatgttcatagcagccttatagctagtagcccaaagggaagacaagccaaatgttcatcagctgatgaacagataaagaaaatgcagtatatttcttcggcaataaaaaggaatgaagtactgattcatggcacaacatggatgaaccttgaaaaccatgcaagtgaaagaccagacacgaaagaccacacaaatgattccactgatatgaaatgtactgaagagacaaatccatagaaggagaaactagattagtggttgtctagggttgggagaaatgggaagagactgctaatggatacagggcttctttttggggtgataaaaatattctaaaattgattttggtcatggttggacaactctgcaaatatactaaacaccactgaatgtgccctttaaatgggtaaattgtatggtatgcgaattgtatctcaatagatccattataaggaaaaaaaatgtttactacatgtatttttactggcaatcaaattcacatcaactataagacatgctatctgacccaaagtacactctcaataaatacaagttccttctttcttttcttttcctcctactttggtgctttctctgttcatgattctgtaatcagagatttcaccattgagcacagttttaaacttttgctggaggtcttaaaggcaattcaaaaggatgaaggtagttaaaaactctttttgcaaaaaagatttaaggcaatgaatttctgaagaagtctgtcttctgtaatgagacatgtttcatatgtcagaagcccttataaaaagtgatgtcacagcaaaaagagaaccagttaagcgctgccttggccctgggagtgagcacgctctggtccagcattttggactgagagattagggattgtaaccggctaggaagcacaggtgaattgtctctagggatcccagtaacaaaagtcaatggggagaaaagaaatagaaatttttctctggaatttaaggtcaaattaaattacaaataaaagacagatggtaattcttccttttaatgtttcatctatcttttctatacctctagtagatagtatttatagactgaatgggcaataattggatcctaggctttagttaagcagactaaagcctggagttcacaaatggactcttaaagagaaagctgagtgcatgtatttacaaacagtgtgacaggtggacttttaaaaaaatttataatttgtcatgatcattaataagaaaataaagcagtattttgaaaactgatttttgaaaaaaagaaaattcacatatcttaactgaaatgtctcatcattattcattttgcacccttctctttttcttccaatcttagccaaagtattttgaaataaagtcagaatatatcactgtccaaatgtaccaaagaaaaaaggaagagaaagacaaacagcacaaaattaaagaagcatattaaatcatctgttctccacatatcttgcgaaaatctcaatctttccgttcaaagacaactctaaagtgacaagtaaatttcagatttggcaaaaactgtatatcccacattttgctggtgagcgggacacattttcaagaccagtacaaagctgaagtttcaatctgttgatcagtgtgttcacagtgatatttgaggagctctttgatttttagctgaatatgtttgttgaaataaatttaattcagtatttcttttaacctgatcccgtaatctgtctgttatgcaagcgctttgctcacgttttcacagcttgtaactgttacagccaacggctcaaatatcctgactgagctttatagtgctttcttcaacaacagagtattctggataaatgtttcctctttataatgttttcagaaaaatacagaatttcctgaaatgaaattttaaaaaaggtttcctaaattttcttcttttttacgctcatgtattagtagtgcaaattaaataagaattacatatcaaaacaactggaaacttttctgagaaatataaagaggagtgaaaaataaaacatgggtttgggtattatagaatctactgaaaccgactggaaaaaatggacagaatttaaataaatctgcttgaggatttatttaaatctggagagattttaatggagagataaaaagccagtaagaaatctgtatcaagatgtgagagagaaagaaaaaagagagaagagctccatgtttcagatacctgcagttttcataagggaaagatgagaagctaattagaacatccaagactcaggggactaagggggcaggcactggacatagaggccatcaagaagggggccacaataaacctcctacagcttgggttggttatacttacacggaaagttttgctcaagatgtacagataaaccagacggacttatgcgtgttcaaagactgagcctgaactcagaattactcataccctagaaagtagatgaagcttatcctagattgctaatgcctccagctgtctagtagaagcaagcatagatcctctctaaaagatacaccaaaagagcatttccagcatgaagcttgagaagaaaatgaaatgcaacatacagaaagaaatgagcaagatagacaggatatgatgacaagatcgggtacgtgtgtaattggggttctagaagaagagagaatggggcagaggcagcccttaaggagatgatggccagtgatgctccaaaccctcagacacacatccaaccagagattcaagaaggtccataaactccaagaagggccaggtgcagtgactcacaactgcaatcccagcactttggcaggctgaggcaggcagatcacttgaggtcaggagttcgagaccagcctggccaacacagcgaaaccccgtctctactaaaaatacaaaatttagccaggcatggtggcatgtgcttgcaattccagctactagggaggctgaggcaggagaatcgcttgaacccaggaggcagaggttgctgtgagaggaaatcgtgccactgcactccagcctgggtgatggagtgagactttgtctgaaaaaaacaaacaaaacaaacaaaaaactccaagaagaataatcacagagaaagctgcaacttggtacatcatagttttggaaaaccaaaaacaaacagaaaaatcacaaagtcatctgcagggggagaaaaacaagttacagtcgtgcccctcgtaacgacctgtaggtcaatggacagggtcccataagattataggggagctgaaaaattcctaccgcctggtgacatcatagtctggtcctaataaacttccagagtgtttgttcttttctagctccccccaacaccctttttctggggagacagcatcttgcaggctggactgcagtggtacaatcatagctcactgcagcctcaaactcctgggttcaagcgatcctcccacttcagcctcctgaatagctgggaccacagatgctgccaccgtggcctgactaaatcttttattttttatagtgatgaggtctcactgtgtttcacaggctgggcaggaacccctggcctcaactgaccctcttgccttgatctcccgaagcgttgggattacaggtgtgaaccactgtgcccagcctctaatcccctttttcgggaatactctctcaggctagaaagtccttcaatcttgtttactagtcacattcttattaattcagaatacttgtggaaaggaaaataaattaggataacatttaatattaaaatatctttagaacactgcaacttatgccatttcttcatgcacaggtgaattagaataactttaaagtgcaagcttttgaaagttgggagattttgtaactgactgatgtggagctcttgcgctacacccaataaatgcaggactcagtatgtgctggaaggaagacatgatactgcattctggtagccccatgggtctgtgaatagtttaagtgttctgccacatacctgtagtgcctattttctccagacatttttaggatgtgttctaccacatacagactgaaaagaaagatggggattgcacctggaggaaggtggttctaagtgctttcaagttagtggattcaggaagtcattctaagtggctgtggtcccccacggaagcagcataccctctacaaacacctcacctggctttctaatgaggctgcatgaaaatgcagtaagaaatcctcatagcagcacgctcatggccatttctgcaactttctaggcaaaggctgcatgggcaggattactccacagtgagtgtgctagcctctgttctgagcagacctttagctcctaccactcagggcatggaacactttgaaacccagttttagaagtaacatatcatttttttcaatgcctcacaggccaacgttcttggttgtggacactatttcttaatgataagcccaagttcctgctggctctcatttctccctgaggtaaacctctcagtgcgtcttctccggagaatgcagggacatctgcaagacctcttgaggtggaggataaagtggcactgcatagaaaaaggatctgattggtgtcttaaaaattcaggcttttccatctacttatcatgtactttggctcttaggggctggggtggagaggagggaacgttgctggtgaccttgactgatcaattacttactcagtgacaactgccacacacccaggacacattgggcattactcaagatgggggtggggagaggatgaaccacgcatgactgacgcaggtccctcctcagggaggtgtgcccttgcagatgcaggcaccgtgagctgtgagcagagctggaaggtggtcagtactgccctgtggagatgcaccccagccacttaatccagcctggggggctgtgccgggtcaagcaggttgaaaaggcttcccagaggaagtagcgccagatgaagcctaagaatgagtcggagctagccacatgaaggcgaagctggtggccatgggtcaggagcattcaaccaacccattcactggcttcatggttgtcatcacaggactggggtcaatttttatgcactctttgttcaagctacatgaacagctctgccttctcttagcattttcaaccaagagttggtgatctctgaaatgctttacattttacaaagcactttcatttattataccaattacaatgcacagcattcagtaagcacagtcagcactgcacactgcaaaatatacatttagtaatttagtaaaaacctgtgcaagaacagactgaggagcagaagacgccatctcaatcttggggcagttgatataaagatgacaaggaaacccaggctaaggcaaccttcatcaggtaacatcaggagaagatgaccatgtctaatggggcaaggcggactggaggtggcgcaagttcctggaccactaaggctggctgctaaccccagtggagcaaaggcagcttactcttgggaggagaacagcacctacctcctctggtcatcctctttccttcctcttccttcctgcctccaaggtcatcaatgacctgttgtctgcccaaagatgggagattcttatgttatcaaacattgattggtgaaattcatcctcggtcttttcaataaccagtcccagagagcatcttcttctcaggtgagccttcctccccatcaaagcctatcactctcctttagatacagagaggaggggtgtgtgtgatgtgtgaatgataacagcactccttccgatgatcctgtgctgtgagtctatggcagcacattttgtcactccagtcacgcccatggagccagtgcccctgaagggactataagtggatgcaggactcacctgtggcgaagacaacattcctcgagaccagacggtgctccacgatggagaactgcgggagctcaatcctttccactccggtaacagccttgtccccgcctcgccagtaaaactcaatgtcatccgtggtgtagccatctgccaagagagaagcagggagacagcaaacatcaccatttcgtataaatgcacggctaaataaactatcattaacatggaggttgcggctctgctatgttttgagtagatttgcttaatgtgcttgtctaggggaagtgtcatcaaagaactaactttccaatattctcatgttactgctgccattttatttgtaccaggttggtactgaaaagtcgagaggctggggagaatgggtgctctgaccagagttctatttgcgaagtgtaacttcagagctgacccagacaccacacagagatgaatttaaaatgtatctcaactgcaatgaataagatagttttaagagaatgagaattgaagtatgaagaattccagaaaggcatactcctctcaagagcttctgagagagttcaaagttcaaatactgaaggtgaatttcaccagtggttgattacatgaggtaagctcagagcaaaaggaatgttctccttggcatatttggatggttttatcagctcttcctggccacgaagtttgccaaccttagaaatgcctgttcttgggatattcctgacccttagagatgggcacaggtggtctcatcagaaagaacagtggtcgttagctggattatagctccaaatccagctttagcacagtgctcatatttacagcgtgattcatcatggcttcttgaggatgagtaagtggggcaataggtgcattcttacttgtaacacccaggagtctcctaaaacattaggtcaattttgtcaataagatcatttaaagcagagattgcgagaacaatattatctcaatataagactttttaatttgaacataaaatataagaaaaaatattcactcaatatttaatgttagtcaaacaaatggaccaaagctgtagggtggggaagagttgctccccacagctaatgccaccttcctggtcctacctactctcctctctttaataaaacatgcatctttccacatggtaagtggcagactctacttaaaacttgcaaatgcttcctagtgaaattattaatagcaaaacaagtacaaactccttacaagaacctcaagaacctacaggcctgacccctgggccttcatccctcctttctcattcacccagccaggcctcactggtctcttattgcagctcagaccagcgtgctctgcccagggctcctgggtcctgtgcagggacacacctccagatcttcacatagctcattctttcccacatttgcatcttggctgaaataaaaccttttgcagaagccttccctggcattccatctcacaggcaacctcgcaatcactcactatgcttttatcagactttactttcttcaaagcactaccactatttgattttggtctaatggcttcctgtcttttgtggattataagctccacaaaggcaggtgttttgtctgtcatctctaaatatccctttgcttacaaccgtgcctacataatgtccagtaagtatttgttggataaactttgggttgatgaatttgccctcaagtgtggaaataaagacaccatttttcttttatctattcccaatatggagacatgtgtagtcagaccagaagaaaatcaggagaatcccttcttccactcaaatgattaaaccatgattctctgcagagaagggacctcacacatggagagaacctcttctacagcagatcttcctgctcatcatacaccactgcccatacaccacagcggcagagtcctctctctcaggagtcatgcactgtgtgacttgacagttgaaacaggagctgctgccttacttagattccaaattggccttcctgaaacttcctccactggagttgtgccctcactggagttgtgctctctggccacactgaagccagttaacttcttaagatcatccttcaaatactgggaaatcatcttttccctgagccttctgtcctctaaggtaaaagtccccagagaattcaactttgcatcacttgacatggcttatgtctttcttattctgtgaaagcacagctctcagaaaacacgacagtgatgtagggtggaagtgaggggcaccatggggccagcctcacccaggatctacactagcctaccaccagtgcagtttctcaatatgttcattcacaaagacattcgcttcttaccacaattgtttcaagtgggactgcaaagtcaaagtcatttatccccctaaaattcagtataaatattgacaagcctaaatccaattgagactagttataaaccagttcataataggccaagataagcaacaacaaaaaccatatcctgatatgccaggaggtgtagtttaggtagcaggagggacattgttagatgttatggatgcagttctcatctctcatataggagtactcaatgctgaattatcaataaagcatctgaatactactcaaattgaagaaaattgccgagatgcagaaatagcctgcttgtcaagccgagttcctgatgggaaatgagttttactctgaccgcccagggtcccagcagtgcagccactcatgagtgatgaagcatattgtaggaaaatagcatctcggtgtttgctctcctctcactgaatggaccgaaatgaggggcatttgttttcttctatttcagcgcagcaaacagactctcttaatcagattagaatgaagaactcttttatactgagtctctctctctctctgtgtttctctctctgtgtcttcccctctttctatgtcaaaaaaattatggatgccttgaaaaaagatgctaaataatgacaaaaggatcaaaagtacaaataggaggagaaagaaacacagatacggatacacacagctttcaatttccagagtgcagttctgctcgtccagggggtatctcctgaggtccatcatgcatgctgctgtcgtggtgattctgaaatacacagggtgagggaagatattaaagaagggctgagaaatgtatcagggagactcctcttagataaacgagtaagcccctgtgggaaccctgcccaaagtacgcctggctaaacatcattcactatatatagagagaaacttgagtaaataagaaactcttttcagcataatatagaccagatttatcaaggaaaaaaaaaacacaaaactttattttattatatatttttaatcatttattttttgattgacataaaaattgtatacatttgtaatatacagcatgatgttttgaaatatatatacactgtgaaatagttaaattgaggtaattaacaaatgtattgtatcacctatttttttttttttttgatcagagtcttgctctgtcgcccaggctggagtgcactggcatgatctcagatcactgcaagctccaactcccaggttcacgccgttctcctgcctcagcctcccgagtagctgggactacaggcgcctgccaccacgcccagctaatttttttgtattttttagtacagacggggtttcaccatgttagccaggatggtctcgacctcttgacctcgtgatccgcctgcctcggcctcccaaagtgctgagattacaggcgtgagccaccgcacctggcctgtatcacccatttagctctttttgtgtgtgacgaaaatgcaaaatctaccctcttgcaatttttgagtatacagcactttgttattagctatagtcaccatattgtaccaaaaacttactaggtcttattgactttggataatcagtggcagagaaaggggtttccaagggagttcttaccttcaatttttgtttctcttcttgtctataggctctctagcctctctactacagacagagcctatgtgtgggacaccaccaattaggttaagactgaggtctttgactttccacgggaagtgttaaagtagctacagatacactttggaactctaaacctcacctctgcttctttctattttattatagttgtctgttgggctggattctgctattacagaaattgttttactgtgtgatcatctatcttttcaaaacaaatatttggctcctattttatcaattatgaaccaaaattgggtgggtaagttctcttggggccagctaaagctatggaaataattacttcccaaaagcagttaaggctccaccatgcaatggttaagccaaccctacactgagaaacaatacttctagaaatgtcaagtccacttcctactctgcctgcagccttctcttagggagaccaacttactcacagctgcttctttgaaaacgcaactattagggttattatattttacactacatatctctagaaccccaccctttccccaccactgtcaaaggtgactggactgtggtgggttcctgagtcaaagacagcaagccattagtgggtgagagatacatgacatggcctgagttgaaaggcagagtggagctaaagagactctcttccataggaatgaattgaacagtaaagataagagtggaagtgcatctgcaaggccatggtttacaggcttgtgatgctgttttcaaactggagagcaaaggatgagaaagcatcatagagggagagaaggtacagcaagtagagttgaggttgcagtcgtagttgtgccccaggccacagcgggtggccttgctgaatgtgtgctccacctctccagggagcagcttctgaaagcctgtgcaggagttgtgtaactggcagtcctggctatgcccattcagtgatggggagtaagaatgaaaatgtgagaatgctttctcctgagatccctagagtcaccttcaatccccagctgtccttcaggtttcatctttcttgaagcccagtgttgagctttttctgaatgatcttcattatgaatattcacaacaaacctactaatgctgcaggtaatgagcaagcccgactcttaccaacagatcctaatccaaacacctgtaaaacactagacatgtgccaatactgatggacttgtgtcatttaccctaaactcaggtgataaagtatgtccttccattagcatctggttaagcaagcaggttgagcaacattctactttccaaagattgagagaagcagtgagggataatgccaacatatttagcacacaggtcaatgcttaattttttatgcaaatagcatgcatgcaccatgcagacatcatcaataaaatccataccaatggtgaaagtgtgttccttccaaatgtcataacacttccccttatccatggagtcaaggagtgcattacattctgtgatcccaaatcaacacatagctctttggcatatttttctacagcatttaacattctagccaactgaagttccagactcacacctttcaactctggcatgtgttatggcagattgacaacccaataaccacacaagatgcctataatgcaaaattagaatagagttctgctaaaattatgaatctttatgaagaagaaaagaaccttcactgacaatgttcaaattttttaattttctttttgtttgtttgtttgtttgtttttgctacggagtcttgctctgtcgcccaggcttgagtgcagtggcgcaatcttggctcactgcaagctccatctcccaggttcacaccattctcctgcctcagcctcccaagtagatgggactacaggcgcctgccaccacgcccagctaatttttttgcatttttagaagagacagggtttcaccgtgttagccaggatggtctcgatctcctgaccccgatccacccgccttggtctcctaaagtgctgggattacaggcgtgagccaccgcgcctggcttaattttcttatatattttggtacctattcacttgaactgagtcaatgattgaaattactgtttcttactgttttcttattcacttttcaaaccacccctaacacacacacacacacacacacacacacgcatacatacacataaacatgcccaaattgttcggggacaccatgtgcagtggtcacattattggagggagaaggggaacctgaggctagaagaattggtgacagcatgcccttttcccaccaagtacaccaagtacagtagctgtccaggtcttctcattctgttataatgctggctataaaatggagccccatttcagtgagctgagatggggccactgcactccagcctgggcgacaaagtgagtaagactccatctcaaaaaaaaaaaaaaaaaaagagagagagagaaagcgaagaaggaaattctgaaatttgtgacaacattgatggaattggagaacattatgctaagtgaaataagtcaggcccagaaagacaaatatcacattttcacttatttgtggaattaaaacaatgaacttatagaagtagagagtagaatggtggtggcagaagctggaggagggaaaatggggaggtgatgagcaaagggtagacaatttcaaacagggagaatatgttttctctttttgtgcattctattgcagaacatggtgaatatagttagcagtagagtattgtacatttcaaattgctaagtaaacttcaaatgttcttgccacaaaaaaatgttaataatttgaggtgatggatatgttaactagcttgatttaattatttcacattagattcataaatcgtaacatcattttgtgccccatacattgttccgccacgcaactccctcttcacagaacccataaatctatacaattatacactgtcaatttacaattaaaaaaatggagccacttttttctttttatgtgaggaataaagtagacacatctactcactacttttctttatttggaagaaatactcagaaaaccctctcagagtgaagagtgaggcacatgagcttgctcttgctcatgcggcaaaaggtaaccatcaagatagaagaagtagctgaacagctgggataaaaaggcaaaaagagagagagtaggggtggggagcagagcgaataaagtaggctgtggagcaggagcatgcccctccctaagccacaaaatcctcatccaagttggctaaactcatcacaggctgggagagtgggccttttgagtgaatcgaccctgggatgttgcagaaatcatcgaatgtgtgctccacctctccagggagcagcttctcaaagcttgtgcaggagttgcgttaaggttgagaagggttacagaagggttgaggaatttcacagacggtagaactgagagttcaagcctagtgcacggagatcaaccaagggcagataggccacagtgacatctgggctccacttgtgtaatccccaacactcacacacatggttttatattttccctaataaatatatatatttttcgttctgacagaataatttaacaaacatctagtgccaccttctccagccctctgtgatctgagaattccactgttattcctaagtggtgaagctcagcaatcggaatccaataggactgggtgaggctctctcagtattactcttcagtaggttccttttttttctttcgattgtttattttttgttttatgattgagagacagcagtgcttagggtctctgtgactacgaggtatgtttctgatagagaagcagaggaagataatggccaagtgacagaagacacgcctgtgtccaatatatcctttctttacagtcatactttgagaatgctgaaagtagagagaaaaaacaaacaaaaaagtcgacaaagagacagaggactgaggactagagaactggacaacgttacagggatggtgctaattcatcatctcagtgcccaggacaaccaccagtcatatctgtactttatggaacaccagttgagcagttgctcagtgcccagttctgtgccaagtactttaatacacacgtgtttactctcacaacaaccatattatagaggtattgttattattatatccattgtgcagatgagtgaaccaaggtttggaaagagtaagcagcttgaccacgttcccaatgccactggaaggcagatgcggcattcagatccaagcagtttgaaccctatgctctgctacatctatattacctcttttaccttaaacatacaagatacattcaacttttaaaggcctactcaggaaatgagaatcttgttttgaatgaagagcaataaggttgataaatttatgtagacagagatataaatattgatacttacacatattataggcatatatatacatatatattcataacattctcattagatatgtcaaattggaaatataatgagtaaatgccgaaaataaatattctacatgctattcctacagtaattatagtgacatttaatccaacagcttcccacccattgtggaatagggtcatttattagatcattcctgcttttacaaataatacatgtctaaagatatgattaagaattaaaagtattaacatgtaagaaataaacttgaagttgtaaggagagcactatctctagtaagtgtaaaatcatattttgagattctggtgacgcactgtctttggacgctgtcttcaactacccttagagaccgttccctgcacgcctgagtcaaggatgtcaagatccacggatgtcagtgtgttgaagggttttcattttgtctcagttgtattaagcttgtgaaatactttctggcattagcatttccatttttaaaatattcacacattgataaatcataataagggcagatgcaaactcttcatgaattgcataaatacaaacttctcttcataaggactgctgtgtaaatgttgctgtctgatggtcagggacttgctcacttctgcaaacatttgtctgaaacatctacctgttgacttaggtataaaagtgctccttgtcagtgttgctgggaaaggctggatatggtcagagtctgggattcatgcttagagtgaatccagcaatgcacacaatctcttcccccatttgtatgaatagttttgattcactgtaaacactggagagaacagattaaaatgtccattgcaagcactgattctgatttccctggctggtcactgtatgccaaggtcctggaccagctttctcagagaagcttctggaactaaacaatcttggtctctatctctcctcagcttcctccttttgaatgttttcattacatttcattacacctacaaatcagaatgtccattatttgttagcttgctggcccctcactcacccccaggtgagcccacaagagcaggactttattgctcctgtccacggttctctccccagtacctagaacggcagcaaccccaaccacacacgcagagtaagtgtcctgtaaatattctcagaacaaatgactttcaagataagaggaccaggcataagctgaagtgtgggactcgagcaaaatgtggaaagagaaggagttggtttagtccttcttggctttaatgtcccaaatgtaagagtcagcggggacacattcccgctaacaagcactcccagcatgagtcctggctgtgcatggttatggactctgttgagaacctccacggggtcaccggtcaagaggcttggataagaatcccctatttttatggtcaagtggtctccgtgaatctttatgttgcagaattcaattcttacctgcagaattcaatcctgcagaattgaatccaacatcagtgtgcgagagctttatggcttcagctgcagcgaagaccacatgaaatgccgccttcaggggagtcctggatctctgatcacaatcttgttaagctagcaggacctggaagcaagttagtagctcctttggtgtgacttctggcttgcactcgagatgcccaaatgttccagaaatctgggcgagagttgtatttgtggccacgggttagcaccacagccaaggcattgcttcacaggtaaccatttggccctttgcagtcaccctacggcaactcactctcatcttcattcatcgttcctctgatgcaggatgcactggctggtggaggcagctatcattttaccaggaaaaggaactcagatgctaggatgttggacctaagtcaaataattcagaccaagcattttccttgagcaaatgcttgttattcaatgtgaagaagtcacaggacataggccaatgtttcgtttatcccgatttttgttttactttacaaaatacataagaaaacacattcatagaactatccaaaggcttttgctatgggaactccttgaagatgttgctgggaaaatgattgtggtaagttgactatgttagcagccaattcctttcctctttccagaatccactctcccagccatgtcattacaactctactcaccaaagaggagctggctgtttgcctgcctcctgaatgtgcgccaactttgtgacttgctttatctaatataaaggctggaagtgaccacgtgccagccccatgcttaggccctaagatgcattctttttctaggcttttctgcttcttcctctgctgtgagaaagccatgcccagaagagtctgctggtttcaggagaatgaacacagagagcaggactgaggtgaccattcatcttttcagagactaccctgggtaagctaatgggtctcccatacccagcctgtgagagagccagccagaatcagcagagatgctcattaacaacccagacacacaagcaatgagcactttggggttattgtatgcattgaggctttctagctgattgttacacagcactcttgcggcaatagataaccgatacgatagtcaacacaagtaactgcaaacatacagaagcataaattctcttatcgctacgtagggatcacaacctgatacttctgaggagtgtcataagatagcaaaacccttagcaaacagcatttttctaaaagagggacatctgtttctatattgaagcataactccactaccatttaggaatcctaattttggtgaatgagtagtcccatcaggcaaatgagacaggcccaatgtacctcctcttgattttcaaagaatttggcaacacgctacacaaagccgcaaactggcaatagtgctcaagccagaacgaaaggggtatgccagattctagaatacctgaaaggaactgcccagagggtggaatgagaagttcttaaggactacaccgcaggttcaaccctccgaagaggaagagagaaaacagcttgaaagaatcactaaagtactttgagtcactccaactatctggatctaattatggcacttgggggtttcacaatctagaactgcattgtccaaaacagtaaccaccaaccatgtgtgactatttatatctacatttagaattaattattttaaatcaacttaaatgaaataatattaaaaatgtagctcctccgatgttctagtcacatatcaagtgctcaacagccctctgtgactggctggtagctactgtactatgcagattacggactacccccattaccacagaaagctccatcagacagcacaaaaataatagcttgctatctgtgtctctagcctcagagaacatgactccctggatgaatgtagttggggggatatggtcaaatgcatggaacccagaggcttgaacgtaagctgtcacagctggaggaagccctgcatgctggggtagaaaatgtcactcaagactctacccaaagtgtgtctgatttcaaggtttagttataactcagcagccagacagaaagacctaccctaattaagtgacaattaggcgtaacaaatggatcaccttaacctgatcttcacatttatatcctagaggctacagcctccaatatgagagtgaaactgaagtcaagatcaccacatccatattggcactagaaagtcactttgtttctatgaatctgtcccaccaaagcataaacattctgaatagaagaagagatgttctatgaaaagcaatggaagcatagaaaaagctaaagttgaaaaatttagatgacctgtgtctggttactaaatgtatgagtggatatggcctcttttcaagaagaacggggaggcaaaagaacattctgaaatgaaggcacagacagagagaagaagctgcaacactgagagatgaatgcaagaaatcctagccacaaatgccaaattgaaatctgtactgaaggcaagggaatagaattaacatggctgaaaatcctttaatggcatggaaagcttcttacattttaatgggcacatacgttattaaaggaccttattaaaattcggattctgtcccagcactttgggaggccgaggcgggtggatcacaaggtcaggagtttgagaccatcctggctaacatggtgaaaccccatctctactaaaaatacaaaacaattagctgggcatggtggcacatgcctttagtcccagctacttgggaggctgaggcaggagaattgcttgaacctgggaggtggaggttacagtgagccgagatcacaccactgcactccagcctgggcaacagagtgagactcccgtcaaaaaagaaaaaacaaaaaaaattcagattctggaattgggtgggtctttcattcgaaattcccagataacattcccaggtgatgctgatgctggtctggatgaccctattttgagtagaaaggagagggcaaacttgtaaaacctactcaaaggcagaagctttgaaaacagaggagatgatagatactgaggggataaaatggatatgtaactgagatttattagagcaggaccaaacagcaaccaaattagcaaattacacttaaacatgaaacaatcaaaaaaattttaattaaaatacaatacacacaatataaaatgtaccattttagtgatttttaagtatataattcagtgcattcacattggtgtgcgaccaacactactatccatttccagaactttttcatcatctcaaacagaaactctgtaccttttaaacaataacatcgattaccctaaccccaggcccagtaacctgttcacatactgtctctatgaattgacctattctatgggtcaccacacataagtgaaatcatataaatgaaatatttgtctttttctgcctggtttagttcaattactatatttttttcaaggttcacccatggtgtagcatgtacaagaatttcatacaattttaaaactgaaaaaattccattatatggatataccatattttatttatccattcatctgttggcagacatttgggttgtttctaccttttggctactatgaataatcccactataaacattggcgtaaaaatatctgtttgggtcacttcttttgaatatacctagaagtggaattgtggatcatatgttaattttacgtttaaattttgaggaaccaccatactgctttccacagtgactgaatcattttaaattcccatcagcaatccctaagtgcctattttttcttgattttgacaacatttgttcttctcattttaaaatatatatatatatatatatataatagccatcctaatgtgtgtgatgtagtatctcattgtggtttaaggaaatgcaagtcaaaaccacaatgaagtactatatcacacacattaggatggctattgtcttttttcctatttcctttagttctttgtccatgttttcccttacctctttgaataaagagattatttaaagtctttatcaagtaagtccaataattagatttctgccaatttattttgttcctttgactaagccatgttttcctctttctttgtatgctttgtgattttttttcccctgaaacttgggcatttcatcattataatgcggtcactctgaaaatcagattctttcctttgcccaggatttgctgcttttaactttatgagtccatttgttttgaatcatttcaaaactttttttgaaaagattatttcttgtcaagtttaatcagtgaagtctctgttgctttagctcatgtttagagaatgttttaaatttatttatctatgtatgtatttgtcagagatgcaatcccactctattgcctaggctgagtgtagtggcatgaccacagctcactgtagcttcaaacacctgggctcaagtgaccttcctgtgttagcctccccagtagctgggactacagtcctgcaccaacatgcctggctagattttttctttattattatttacttatttatttggtagagatggggtcttgttacattgcccaggctggtctaaaactcatggtctcaactgatactcccacctcagcctcctaaagcactaagattacacgcatgagccaccatgcctggaaaatgttttaacaagaatttctttaagtgccaagagctgaaacaaacgaagaaaaaacacacaaatgaaaaagagaacagcattctttctcagtctttgcagactgcctatgtgctagggcacactttcctctaagcctagggattggccaaaagcaaaaattggaggttccttaggacttttctgagcatacttcttgtctaggcatgtgcatggagttttaagtacttctacatatgtggctgcttttgcatgacctaatttctctaagagtctcatcccagcttctcttttgagccttagatggtgtattttatgcttccatccaaaacctcccaacccaggcatctttaggtttgtcttcaccctgtagccttaatgagcactgcctgccccttctcttacttgcattctgagttaggcaaagctgagatgaacatcttgcttcagtctttcaggcatcctccagacagtttagaacatctgtacacaataatttgcaaataagatctgctctgctccctctggtaggagagggagcactgggaactaggctgctgcctgctcaaaaccaaaacaacccctgccctaggatatgggtgggggaaatggcaagtgaaaaatgccacaaaactttcctattgtttttaatatagcttttttcttgattgggcatttgactggttactgtgagccttaaactgatttccagagcttctacaaggttggttcagacagcttctagtttttgttttgttttattttgatgtttttgtgaggggacaagagcttggagctttttagtctgccactttgctgatgttaccatccaagtggagcctaaagcaaccccattttggatggtaatctgccattctgacttctgattaacccctgttccaggaatgcctctaagatttctactttttctactgttaccataaatcttgactttaggtcaaaagagcctggaccataaatcctgcccttaagcagattcacacagcattcttgcctctccctgagaggtcaacttcgattgtcctatgcattccctccctatgctatataagccctggatcttgagggtaatggtgtgaggatccaccatcttgtctcactgctgcctgagacaaagacatggcccctgttcgtaagttctcattaaatgtgtctttctaacaaactggatttgtcagcctctttctttagcctctcagcttcctcagcctttgggggtaggcatgtacagacgtgcccactgcagaactacccaacatcagggttgatcacggcaggagagggagggtgtttccaaagcaagagaagggtctttacaggcaagataaggagggtgtttacaaagatagataggaatttagtgaatagaattatgatataaagtcaaagcctagttctttaaaaatataaataaaatagatatttcttgatacgaacaaacagttataaatgaaaaagggaatataacagaatgttctaagaagcttaaaacataagaaaaagcaatgtacatgtgcatgctaatgattagaaaggccaaataaaaatgacatcttcctgaaaaacatgaattgtcctggctaatgcaagcagaaaacctagagacccattaagtattgcagaaactgaagccctgtgtgtcagggtggaaaatgttattcaagatcttttacaaagtagcatgcatttataaaacattccccccaaaaatatttcatataaattatacatttatgggtaaacctttaaatacttaaaggaatatcaaccctttcaggtatagaaatttcccatataatataatccactgcagaacataaaaaaagagagaaatctacttgattcatgttaggacaaaacacacaaaaaaagaagacatatataatctgttactatatttaaaagactgtatatggtatatatcacagataaatgggtgagacaaccttcattagttcattttctgttgcttgtaacagaatacatgaaactgggtaatttataagaaatgaaatttctttcttacagtgatggaggttggtaagtccaaggtagagaacgtgcatctgaagaaagtgagaaccatgttgctagagggaactctctgaagagtctcgaggcagtgtagtgtataatacagcaaggggggctgagcaggctcatgtgctagttcagatttcccttcctcttcttataaagccaccagttcctctcccatgaatacccataatccattaatctataaatggattaatccattcatgaggacagagccatcatgatccaatcacctcttaaaggccccacctctccatgctgccacactggggattcagtgagttttggaactcaaggagttttggaggggacattcaaaccattgcagggcttcctactaccacctctacattggatagtttatctaggaaattttaataaattggctcatgtttcttagaaacttcagccaagccatgatgttaaatgacaaagagggaacttggaaatagatttcttgggagagtttacacacatcttgaaggaagattggcaccttccaagtggcatacaaggagtaatggtgcctactttacacctgagaaaagtgttgttaaggtgacaagatagaggagactgaataggaattggcctttcagattacgaagaatgcaggcacatttcctgttgcacacacatgagctacatggatgaaatggaggtcctggatttatcatggatcctctacaatagagctgcctagatgagcagagaaatggaagatgaccatgaaggatacattcttagagctaacaaaagccccaatacattccatggaatagaaaacctgcctactggctccaccaccaatacctaacttcagtcaaggaatttgctggaaagctctgagaagagttaattttcaatattttccaagtcagagtatgaagccaccaggaaacagtatcagttaatgtaaaacttcttatccattttttctccaccctcaaaattaaatctttaaaattagggaagtcatatgtaatttatcatactgggtaggggtagggaaaagagaaagtagaaggcagagaggttgagaagccccaagtccctgctctttgccactgcaggcttccagcctgaagtacaaatgggctgtggaaagggaaaatgttaatgctaaatctgaatttagtattaaacactgaactgagaatacctgtgtaacataaagatagaaaacaacttttaccaaaacattggcagaaaaccatgagatctgtccaaatttcaccaaggtagagaaattttacacctccctgaacaaagtttaatagtagggtataactgcattatgactagatcacaagttttttttttaatcaataaactggtcgaataagaatttttaagcaaaaaaacaaaaaaggtaaattaaccaagagcaaagcgaaattgaagtttttataagaggattacccatcaacataaaataggatttatcccagaaactgaatggattgggtgggggaagtgatgtcaccaagtggtggaataggatgccagactacaccttcacccctccaccccacagagaaagatcaaatagccactgtctacagaccggaacatccttttgaaaatttcaatattgaaacaagcctgagacatccatttggtctgcagaactgattgaaatccaaattagaagagtaaaaagaaaggtcttactttgactgcactccccttccccaagtcagcaggatgccagatgaaaaaggatttctatgggcacacatattctacatggggaaaagaaaattggaggcagtcatcccattttccaagcatttggaaaggcttcccaggaagctcaccctagtttcacctcacaaagaacattagggggaaataacatggctagattgcccagggttagatagaaacaaagaaaagaggcagaggtcatagtcaccagcaaacaaatctgggtggtacttctgtttctcccagctgtggcaccaaaccacacctcatatactagccacaaagctgatttggttgccttcagaaacagagtgggaagtttaacctagctcgagtttctagatggctagtcaacatgctcagcctcagggcctacccaatgacactgcccaggcagggagactcccacctctgcacattttggagaagtgtggaagctagaccagcttgacccaggaagtcaagatgattccactcagccaaaaagcctgcgcaatgaccttgcccaggaagggagactcccacttctatgcactttagaaaagtgaaggggctagactagcttaaaccagaaagtcaagcagtgttccatttagccaaaagtccactcaatgaccccacctggtaaggaaacttctatctttgcacattccagagatggaaaggggctagacctttccatcagcatccagctcctccagcttgagctgggaggtcaaacagctactgaactcaacaaaaaggtgattccacatcaggatgggctccacccatcctaaacagtgaccccacctaaactcagggcctggcctgcagccctgctcaactacagatcccaaatagcaaaagggcccagccagggaatacagtccataaccagcctgaccaggaaccatcacagtaaccagccagcagctctgcctgatagcagagtccagccagtagcctcaccagagagtagagcacagtcagcagcttcattcaacctcaaagcaaaggcagagacccatcaaccacagaattgaaaagctctgcctgtgcaaggttgtcatgagctggcctttcagaatcacaggctagaaggcagagaggatgagatagtgaaggtctatcactgccaaacagaaaaacaaacaaaacaacaacaaaaacaaaaacacctgtaaaggccagaagaagagctatctcctcaaatgtgcagaccacaatggaaggacacaaggattaaaaagaatcgagaaatcatgacacctctaaaagaattaataaagctccaacaatgaaccctcaagaaatggagattataaaatgactagtaaagtattaagaataatattcagaaagaagttcagtgaactaaaacaatatagagagataaaatttaatacaatatgaaaaataatactcaaagcaaaacactgacaaagaaatagaatgaatagaaaagaaccagatacaaatctgtaagataaagactacaatgattgaactaaaaaatttaatagaaaatttcaacagcagactgtaccaagcagaagaaagaatcagtaagctggaagacaaaatatttgaaattatccagtcagataaacaagaacaacaaaagatttaaaaagaatgaagaaagcttctgggtatcatagaacatcatcaagagactaaacagtcacataataggatttgcagaagtagaagagaaaaaaaagccagaaagcatattttaaaaaatagtggctgaaaacgttcttaatctagtaatagatacagaaggaaatacagaagtcaccaatcaaattcaaccccaaataaagtacactaagacatataataatcaaactaccaattatcaaaaacaaagaaaaagaagaaaagcatccagagataagaaacatatcgcatataagaggtgccaatacgactatcagcagacttatcaacagaaaccctgcattctaagaaagagtggtatgatatattcaaaatgataaaggaagaaaactatcaaccaagaatatttatccagttaagctgtcatttagaaacgacaaagaaataaaagctttcccagacaaacaaatgtaaaagacatcactatcccctagctctgccttacaggaattgctacagggaattctttaaactgaaacaaaaagccaaaaagtagtaatatacaacatatgaaggaataaaactcaatgatataagtaaaacagtatcaaattcagaatactctaggttagtaatgatgatgtgtaagatgttatctctagtatgagggttaaataacaaaactattaacaacaactatagctaccataaattgtcagggaaaacacatcacgaaatgaggtaaattctgacatcgaagcataaaatgtgtgtgggggggagtaaaagtgtacagtcgtatgtaatcaaaattggctgttatcagcttcaaatgagatgctgtaagtataagatgttctacgtaaggctcatggtaagcacaaagcaaaaatctttagaagaagctcaaaataaaaatagaaaggatttggccaggtgcagtggctcacaactgtaagcccagcactttgggaggccgaggcgggcagatcacctgaggtcgagtttgaaaccagcccggccaacatggcaaaacccggtccccactaaaaatacaaaacttagccaggcacctgtaatcctagctactcaggagtctgaggcaggagaattgcttgaacccgggaggcagaggtggcagtgagctgagatcgcgccactgctctccagcctgggcgacacagcgaaactccgtctcaaagaaaaaaaaaaaattgaaaggattcaaggcatactactacagaaagccaccacaaaggaggacaacaaaaaaggaagaaagaaacaaagtatctacaaaataaccagaaaataactaacatgatgatggtagtaagatcttacctatcaataattacctcaaatataaatggattaactattcaaaaaaagagaaataacaaaaagttaccaagtggagacaaagttttattttcaactgttttgtttgttcatgcaatagtgttaagttgtcatcctcttaaaataatgagttataagacagtatttgcaagcttcatagcaacctcaaatcaaaaaatgtacaatgatacataaaaaataaaaatcgagaaactaaatcatactactagagcaaatcaccttcacaaaaaggaagacaggaaagaagaaagaaggaagagaagactccaaaagaaccagaaaacaacaaaatggcaagagtaagtccatattaatcaataataacattgaaggtaaagggaataaatgatgtaatcaaaatacatagagtggctgaatggttgagaacacaagacctaatgatctattgcctgcaagaaatacactttattataaagacacatacagactgaaaatgaaggaatggaagaagatactccatgccagtgcaaaccaaataagagcaagagtacctgtacatatatcagacaaattatattcctagacaaaacatataagaagagacaaagaaggtcactatataataataaaggggtcaacttatcaagagaaactaatgattgcaaacatatatgaatccaatactggagcatccagatgcataaacaaatattataagagccaaagagagagataggcgtccttacagaaatcactaaagacttcaacaagccatgttcagcattggacaaatctccccgatagaagatcaacaaagaaacataagacttaatctgcactatagaacaaagatggatttaataaatatttatagaacatttcattcaatgactacagaatacacatttttcttctcagcacttggatcattcttagggatagatcatatgttagggtcacaaaccaagtttaaaacgttgaaagaaactgaaataataccaagcatcttctgtgaccacaacagaataaaactacgaatcaataataagaggaattttggaaactatataagcacacagaaactgaacaataggttcctgaatgaccagtgggtcaatgaagaaattaagaaagaaactgaaaaatgtcttgaaacaaataataatgggaacacaacataccaaaacctatggtatatagcaaaagcagtaagtactaaaagggaaatttatagctgtaagtgtctacatcaaaaaagaaaaacttcaactaaataaccatttccactgatgtatctttactagaaaagcaagagcaaacaaaaccccaaattaatagaagaaaagaaataataaagatcagagcagaactaaatgaatttgaaatgaagaaagcaatacaaaagttcaatgaaactaaaagtttttttaaaagagaaacaaaattgacaaacctttagccagactaactacaaaaaaagagagggaagatgaaaataaataaaatcagagatgaaaaaggagacattacaactgatgttgcagaaattcaaaggatcatcagtggctactataagcaactatttaccaataaactgaaaaatctaaaagaaactgataaatttctagacacaacctaccaagattgaaccacgaagaaatccaaaacctaacagatgaataacaggtaacaagattgaagtcacaataaaaagtctctcagtaaagaaaagcctgggacccaatggcttcactgctgaattctaccaaatgttgaaagaacaactaatgtaaatcatactcaaactgttccaaaaaataaagaaggaaatacttccaaactcattctctgaagccagtatcaccctgataccaaaaccagaaaaatatatacaaaaacaaaaaataaaacaaacaaaaaataactaaaggccaatatttctaatgaatattgatgcaaaaatattcaacaaaatactaggaaacgaaattcaagaatatgttaaaacaatcatttatcaagaccaaatggtatttattccagagatgcaaggatggttcaacatatgcaaattaatcaatgtgacacactgtgtcaacagaatgaaggacaaaaactatatcatcatttccactgatgctaaaaaatcattgcataaaattcaacatcccttcatgataaaaaagcactaaaaaaactaagatagaaggaacatacctgaacataagaaaagcctgatatatcaagccctaagttagtatcatactgaatggggaaaaactgaaagcctcacctcttagatctggaacatgataaggaatctcactttcaccactggtgttcaacatagtactgtaagtcctagctacagaaatcaaacaagagaaaaataaaagacatccaaattagaaaggaagaagtcaaattatccttgtttgcagatggtataatcttataattggaaaaccttgagactccatgaaaaaactatttgtttactgctaaattcagtaaagttgcaggatacaaaatcaacatactaaacaagtagcacttctatatggcaacagtgaacaatctaaaaaagaaatttaaaaaatcccattaacaatagccacaaataaaattaaatacctatgaattaccttaatcaaagaaatgaaagatctctgcaatgaaaattataaaacattgataaaataaattgaagaggacacaaaacaatgaaaaggtattccatgttcatggattggaagaatcattattgttaaaatgtccatattacccaaagcaatctacagattcaatgtaatctctattgaaataccaatgacattcttcacagaaatagaaaaaacaatcctaaaatttatatggaatcataagaagctcagaatagcccacgctatcctaagcaaaaggaacaaaattggagaaatcatattacctgactttaaattataatatagagctagagtaatcaaaacagaatagtactggcataaaaacagacatacagaccaacagaatagaatacagaacccagaaataaatctatacatctacagtaaactcatttttgacaaagctgccatgatatacactggaaaagaggcagtctcttcaatgtatggtcctgggaaaactggataaccggatgcagaagaacgaaacttgacccctatctcgcaccttatataaaaatcaaatcaaaatggattaaacacttaaatacaagacctgatactatgaaactgctaaaggacaacactggagaaactctccaggacattggtctgggaaaaagaaaatattgagtgacaccccacaagccaggtaaacaaagcaaaaagggacaaatgggatcacatcaagttaaaaagcttctgcacagcaaaggaaacaatcaacaaagtaacagaataagccacaaaacaggagaaaatatttgcaaactacccatttgataagagaataatagccagcatgtataaggtgctcaaacaactctatagaacaaagtgtcattaattaaaacatgactaagagttgaatagacatttctcaaaagaagacattcaaatggcaaacaggtatacaaaaggaatctcaacatcactgatcatcagagaaatgcaaatcaaaactacaatgagataccatctcaccccagttaaaataacttttatccaaaagtcattcaataacaactgctggcaaggatgtagagaaaagggaacctcgaatactattggtggggatgtatgttagtacaaccaccatgcagaaaaatttggaggtgcctcaaaaaactaaaaatagatctactatatgatccaggaatcccactgctcggtatacacccaacaggtgaaaaatcagtatattgaagaattatctgcatttccatgtttgttgaaacccagttcacaacagccaagatttggaggcaacctaagttttcatcaacagatgaatggataaagaaaatgttgtacttacacacaatggagtacttgtgtataagtccaagtcataaaaatgaatgagattctgtcatttgcaacaacatggataaaactggaggtcatcatgttaattgaaataagccaggcatagaaagacaaacatcacatgttctcacttatttgtgagatctaaatatcaaaacaattgaactcacggagatagagactagaaggatggtaagtgtagtgggggtacagggagacagagaacaggtggtgtattagtcagttcttgcattgttataaagaactacctgagactgggtaatttataaagaaaagaggtttaattggcacacagctccacaggctgtacaggaaatattgctagggaggtctcaggaaacatacaacacagcggaagtcgaatacgaaggaggcacgtcttacatggtcagaacatggggaagagagagcaaatgggaaggtcccacacacttttaaacaaccaggtctcttgagaactcactatcacgagaacagcaagggggaaatcagcccagcaatccaatcacctcccaccaggcccctcctccaacactggagattacaattcaacatgagatgtggacaggggcacagatcaaaaccatattaggtggggatggttaatgggtacaaaaaaatagaataagacaatatttgatagcacaacagggggactatagtcaaggataattgaattgtacatttaaacatgactaaaagagtattattggattgtttgtaacacaaagagtaaatgcttaggggaatgcatacccaatattccatgatgtgattattatgtactgcatgccgggaccaaaatatctcatgtatcccatgaatatagacatctactatgtacccacaaaaattaaaaattgaaaaaattgaaaaaatattctcaacatattaggaatagaagaaatatactccaacacaataaagctatatatgataagcccatagttaacattatactcaatggtaaaatgttgaaaccttttctctaagatattgagcaagaaagctatgcctacttttaccactttaattcaacacaataatagaagtccttgctagagcaattaggcaaaagaaagaaagaaaaggcatgcaaatcagaaaagaacaagtaagaagtaaattgtcaacgcaatcatatatatctgtcatatatatcatacatatctgtctatctatagatagatagatatatctatagatagatatatctatagatagatagatagatagatagatagatagatagatatggttaaagcaaactaaatatggcctgagaaggactctacacttctatatttgagtccttctggatgaactgtaacctagcttaatagtcacacaaaattgaaaacctaacttaatagtatgcacctctaacaatggctgagtgttggccaatccccacggccatacttcaaccactcaaagactactgaatgttcaaactgcattcaaaaaaggcaaacgccgagctgtaaccaatctcgctgtttctgtacctcacttctgattcccgtacctcactttaccttttttgtctataaatttgttctgaccatgaggcacccctggagtctctgtgaatctactatgattctaggggctgcctgattcacaaattgttcattgctcaattaaactctcttacatttaattcggcttaagttttacttttatctatgtatatctacagactccaccaaagaactgatataactaatttaaaagtaaaatcaatgtggcaagaggattgttaaagaccagaaattctagagtaacctgagcaacataacaaggcccatctctacaaaaagtctttttaagttagccaggtgtggtggcacacacctttagtgacagctactatggagcctgaggtgggcagatcctgtgtgcccaggagtttgaggttacagtgaactataattgccccactgcattccagcctaggtgacaaagggagaccctgtctaaaaaaaaactcaccaaacaaacaaaacaaaacaaaacaaaacagttaagttacgggatataaaaacaacttacaaaaaacattaatagtagtgtttctataaattaacactaaactatctgaaaaaaataatcaagggaacaatcccatttacaatagtttcaaataaaataaaataaaatacttaggaataaatttaaccaaggaaatgaaagacctgtacactgcaaactataacattcacaaaaataaataaaaaaagatacaaatgaaatatatctgtattagaaggattactattattaaaatgtccacattactcaaaatgatctatagattcattgtaatccctatcaaaattctgatgtagttttccatagaaacaaaaattataaaattcatatggaaccaaaacaaaaaacccaaaatagctaaagcaatcatagcaaaaggagcaaagctggaggtatcacactaccttatttcaaactatactacaaagctatagtaattaaaacagcatggtactggcaaaaaaaaaaaaaaaggcacatccgccaatgaaatagactagagagcccagaataaacccattcatgtactttcaatatgatttttgccaagaatatgcaatgggaaaagaataatctcttccataaatgctgttgggaaaactaaatatccatattcagaagaatgaaattggacccttatctcacaccatatacagaaatcaactcaaaattgattaaaacttaaatgtaactagcaactgttaaattactaaaagaaaacatagggggaaaactacatgacattatgctgggtaatgatttttaaaatttgatttgatgcaacaaatgcaaaaataggacaaatgagactacatcaaactaaaaagcttctgcaccaaaaacaatgaatactatacaaagacaaccaacagactggaagacatatgtgcaagcaatccatccattaaggggttaatatccaaaatatttaaggaagtcaaacaactcaacagcaagaaaacaaaaaaaagctcaatttaaaaaatggagaaggaacctaaagagacatttctcaaaagaagacatgcaaatggccaacaagacatatgaaaagaagttcaacatcactaatcattagggaaacacaaattgaaactacaatgagataacatctaatacctgtcagaatgactagtatcaaaaagatgaaagataagtgttggcaaggatgtggaaaatagggaacccttgtacactgttggtaggaatgcaaattagtgcagtcattatggaaaacattatggaaaactcaaaaaacttaaaatagaattaccatatgctacagcaatcccactgttgggtatttacccaaaagatttgaaataaatttgctgaagggatgttagcactcccaagttcactgaagcactattaacagtagccatgttatggaatcaacctaagtgtccatcaacagataaattgatttttttaatgatacacacacacacacacacatacacacacacacacacacacacacacacacacaatggaatgctactcagtattaataaagaaaaaaattttgtcagttgggacaacactgatggaattggagaacattatactaagtgaattacgccagtcacagaaagaaataccacatattctcacttgtttgtgggatctacagttgaactcatataagcagagaacagaacagtggttacagagaatggaggatggggggaatggggcaatgattatcaaatggtaatctgtaagcatatcttcgaacgtagattcattatgtgaacaaactatatctagtttatttttggttgaatacaataattcttttaagaaaacatgaaacaaatctactcgatataaaacgcattttaaaactctcataagtcagtcaaaactcattccttttattgtataaagctaactacttgagtcactagtactgctatttctcagccatcttccctattcatgtctacattgtgtggttaggcagctgctatatagtgtcacataataaaataaaggacttcccatattatttttaaaaaatctgttaggcaggaagaatatgttatttttaagttctattgaagagcatggtgaatatagttaataatagagttttatacatttcaaagttgctgagagaataaatttgaaatgtgcttaccataaaaaaagtttagttcaaatactagctagctagataaatacgttaactcacttgatttaattattctgaaactgacccaattgtcccatagaactgttgttgacagtttcttttgagtaaccatagaaattgaccctccccatcttcaaactcgaaaaacttacatttgtcttacttgagttcttttctctggaaaccaaccatcaggtcctgcagacggtatcaaggaactgaaacatactggctcaccacatctggacaatgagaggccagacccttcacacatcatgattgcgtgatctgcttcctgttgaccaattcctcttccttatccctccctaattactgttttcccatatatagattttttttccctgctaatatattaggttggtgcaaaagtaattgtggtttttgccattaaaagtaacagcaaaaactgcatataaacccctaatttttgttggttgaagggatggatttgagactgatctcccatgtcctcagctgaagcacccggagaaagccttcttccttgccaacactcatctcagtgactggctttctgtgtggcttgtagccagacctagaccaaacccctggtatttcagtaacagattttggttccgtgatcataaatgtgttggttgttgcagcaggtggattgtgctttggtggttgattgtgtatgtatcaacatagtaatgggaaatcagaatttgataagctgatattcttttataatactgtttgaccccagtattctttagaatctggagaagtttgggctctctatggacctcattttgctgttaaatgggaaagtgggatggagttatgtgatgatcttctgtagtgctgtttggccccagtgatctctggagcctaactggaaactgctttacctaaaactgtggttcacagcgttcactggattacctatcagaacaaattttaagcatgtaaacctgttcgtaaattcgtgggtttgtattgctatctcattgctagagttccaaagtaaaagatgaaaatagcaatgtcttcagaattgtcagcatacatttttgtctgggttttatatttgtctctgctagatattttgaggtgtcaggatttagcacaggttataaaatcataactcagccaaaacaaaatgatctttgtttatgtgacattgtttgagaaatgactaatttaggcttgttgatttaatgaaaacagccgaatcttctgagttattggcaaaaatacccatgtatttaaccttaaggttcttacataggtgaacacctgatattcacagactattttaaaaaatggcgaacaaggaagtaactggaaatgataactagttttgtataatatctcagttctcagaattaatctagataaactctttaaaaaatgaaaggcttgagtaaatgtaaatagaataaatccttgtaggtgaactttttgtgtaatttaaaaccttaaaattcttttcatgttcattggatgtctgggtcatttctagtcaaataaaaattatgaggaaacatttctataaattatagaatggttctcatatataaaatgctaacatttgataggcagttcaggatttcttgcttcttaggttttcacaaaatttaatattattaagaataagaactgcagtgaataattttgtatataaaatacgccaaagaagatgtgtacttattgaataaaagaataacttttgtctaattcagatttgatctcaaagttgtttcaaattatggcctatgctaaatttttgtcctaaagtaaaatgactggttacttaaaaaacagaaaatgtatgaaaaaacagaaagtccaagcatgtctgtgtaaggcatatgtaattttttttgtttgtttctctgtacgtctatcttcatgcacatgcagaggaactagaaagttgaaaaagtttagataataattgttttaaaatgagatagaaaattggagaagttggttaaattaacattggtcatagttaaagctcttagcgttgatgaaagtaaataagaaatattgtaatgaaacacattggcagtttgacaattcctttttaatagagttaagcctaaagacagatttagcatgaatacacatttcacataaatgttcgcattcctttatttcacactgtacttgctcctctgcatagatagtattagcactaacatgcttactagtcacatgcctgaagtaatttctaaattgcacaaaatgcatagtggtgttggtggacttaaagatactaatttatatatcaggaacaaaaaacaatggaagtaaaagaataagaaatagttacattaaactaaaagtgcagctcatccttcatggtgggccacaagaagcacccattgcaatgaaaaatgtgctgatattaacactgttatcactggttatcattgttctggaaggtggaaatacaataaaacagaaataagaataaaaacaattgaaaatgaagattaaaaatcatcattataagcaatatgattgtaagactaaaataatcaggattaactaaactgttgaaaataatgaaacatcagactgactagatataatttttgatagatgcatacttaaaggtagttatatacaaattgaccatgagccttcccacataccggggaaagccagctagaaaaataatggagcaatgattccacttctaagagcatcacactttcaaaaagtggagtaagtttagcaagaaatgttaagttaaaaatggaaagtttagcagtcagtggagtaaatgacaaaactttactaaaagccataaacaaagacatgaatgaggacatgccatgttcacgcaagaaacattgaatatagtatatcttttgctcttgccaaagtagtgctacatgtgcataatttcaacaaacaacacaagctatacttttaggaatttgataaaataaatgattctaaagttaatgtggaagaataaactggtaactattaggacaaatagctaagcatgtaagaacaaaaaattggacatggcatggtggctcatgcctataatcccagcattttgggagtccaaggctggaggactgcttgaagctagaagtttgagaccagtctgggcaacataataaaaccccatcttcacacacacacacaaaaaaaatagctggttgtgggggcctgcaccttcagtcacagctactcaggaggctgaggcaggaggatcattagagcctgggagttggaagtaacaatgaaccatgattgtgccactgtactccagtctgagcaacagagcaagaccctgtctcaaaagaaacaaacaggctgggtgcagtggctcatgcctgtaatcccagcactttgggaggctgaggcgggcagatcacggggtcaggagttcgagagcagcctggtcaacatagtgaaaccccatctctactaaaaatacaaaaattagtcagacatggtagtgcacacctgtagtcccagctactcgggaggctgaggcaggagaattgcttgaacctgggaggtggaggttgtggtgagctgagatcacgccactgtactccagcctgggcaacagagcgagactccatctcaaaagaaagaaagaaggaaagaaagaaaaagaaagaaggaaggaaggaaggaaacaaaaatgtggatagctacatcacatcctacaccaagataaattccaagggattgaacacctaaatggaaaatatgaaaatataagtactatggaaaggctaaatggaattcaaagttaactctcatgccatacttttttttttccatgaagcactactctagaatttggggatggaataatgaacaagacagaaaccattcttttctcaaagagtttatattctcatagtggcttccccgtcatcatggatgggaatagtgagtcaataagtaagaaatgcaataaactgacaagataatgtcagctctggataagtgctatgataacaacccagaaaggtaatgtaatagaaagtgaatgaatgatcagagaagggctctccctatcagtgtgacagctgagcaatccttagttacctaattaccttctaatgatgctcaacacataaccatctagacacagtgcagccatatacagcaagggcatgtgcaaaggccctaggacaggggcatgcctgatgtttctgaagagcagaaggaaagtgtgtgtactggaagcatgatgagggaggaggaaagtagcagaaagggcaaggtcaggactgcaggagccaagtcctccagtagtgacagggtgccaaggtgaagctcattttggaaatggtcaggatgccaagctgctccccattttgataggggaggcaaagaatgagccaacagatagctcaggtgggctctttgtaacgcaaagatgaagtttctgtgtttccaactaaagtttgaagtaacctcattaaatccaagtgaggggagagtttgcagagaaggtgagaagagtccttataaggaggggaaggataaaacatgctgggggtggggagcagagaagtgtataagccagaatttaaagtgagtcaggcaatcttcaccagctttgagagatgaagaaaatggatagattacttgcagtagcctgagtgataataaattccaaagcaggcatcacaatcctaaagctaatatatactttattgctggtgggagtgtaaattggcataatcccatctggtaagaaatttatcaatatgctttttagttgcataatttgggagatggtgacaaaacaagggtttgggagttagggacggctgcataaaaatcacacgagacctaatacctctgtgagttgatatcttttctgaggagaaaagtattttaacagaaccaccatataaaacagtttcagaataagatgctagtcaaacgaattcgatgatttaatttgaatcttctgatataagttctggcttcattttaatattgctttcaatctttaagtatagaaatggcaattttgccaacttaaagcaatttttagccacaagtgggaactttataatgtactgtccaacaggttttgcaatacacttctcaggcaaaatatggatgttgctttgatgactcagcctcagattcccaggtgctttttggagcaaagtgaatactattttgtgaacccccccctcgccaactcatagcatcagagaaatgataagaagatacaacatgtatggcatgaagaaaagaccacattacaaagtatgcttaatgatgcaaggtgagacattcaatgacatccgagggccaagagactgaaaaagaaagttaggaaaagggatgataactctgcctttttacaaatagaagaaaacttcagtgcagcatcaaagaaaacagaaaagctgtgactgggacaggacaaaggaccattagtctcttagtcagccaagatcttcctagttccttaaatggtttgactgtccaaaggaaattgtcaaggatttatgttttattttaggatggcatgcataccctgtccagagcattctctcccatcacatgctgacaagctggtgcagggatctcagttcaccgtcatattcagctgagctcaagctggtaagaagagcaagctagtgttaccccaagtttcaagctcaaggggctacaagagtcatgggaaaaatggctcatgatttaaaacaaccttttatcactacaagaatgtgatcactctcaagcatctgcgtgagtggtcagtgactacttttgcacagtcatcagagttaaggattaatgatttcccagaataaggctgagttgacgtacaaacctacgtcacggacagctcatctacagccaaaggtcttcatctagcctagataaagcaaaagcccactgatgctgttcccataatggctgggcatgaataacaaaagaagcgtagaggagctaagtggcgactgacctaccagtgtaggctactgctggatagacaaggtgagagccaatctcagtgtccaggggtgagagaaattcagtctgaaggtctcagtgatacagccagtccaaccagtatttcaagcacataatcagtaggaaagcaatctctgctgggcaggaccttcctcagcagtactttacaagcaggaacagcaggaacaaccccagctctctgcaaaccttccaccatggggaatttaacttcagtgttctcagctgtgccagacctcctccaggccagggccatagtacctatttaccaaaaagatgcaatgcattgttgggttacacacactggcccactccgggcctgccatgtcaccatccagccagtgcaacagtaaaaagacacgggagggaaggtgggccttggggccaaggagaggatggagggtggctgagccatgtgagcactcacaccttgtttttatcaaaagtcacgtgtaaaatatacaaatggtactgaagtttatataggatagcaaagaatatgcgtatatgagtttaatgatcagggttgagacttattaatttgctcttttgtccagtagttcaaatcaatctctagagctacatgttttttaaatatcaaggcagaaatttctagaatagccaatttctaatgagcagatgatgtaagtttagctgctaaacacatgaagaatgtggtggtcagtctgcactttggaggttttctttatgacagcttatccaggtccatataactctgaagaagtgtttcaaaaatctgatgctctaaataaagagctaaggagtatacctatactacacttgaaaaaaaaaaaaaccagctacttacttaaaaatccatttattgatttaagaggctgtttgagaggcatgatggatataaatttgactaatgcttttttaggttattatataaagtttactactaaaggcttattattacattattatttaacatttacatatgaagttacagaccaagcaatttttattttcttggttgatcttactcttacctaaaatccaacattttcaaacagttgtggaatttattacagagcttttttatgtattacataattctattttaacagagttaaagctctttgcttttaacaaagacatacagagacagactgacatactctacttctgttaaaaaaaaaaacaaaaagtgtatgtgtcgaggaatttatccatcgacacatacactctcccaagactaaaccaggaagaagttgaatctctgaatagaccaataacaggagctgaaattgtggcaataatcaatagcttaccaaccaaaaagagtccagcaccagatggattcacagccgaattctaccagaggtacaaggaggaactggtaccattccttctgaaactattccaatcaatagaaaaagagggaatcctccctaactcattttatgagaccagcatcatcctgataccaggatccgaatccagcagcccatcatccgaatccagcagcccatcaaaaagcttatccaacatgataaagtggggttcatccctgggatgcaaggctggttcaatatatgcaaatcaataaatgtaatccagcatataaacagaaccaaagaaaaaaaccacatgattatctcaatagatgcagaaaagccctttgacaaaattcaacaatgcttcatgctaaaaactctcaataaattaggtattgatgggacgtatctcaaaataataagagctatctatcacaagcccacagccaatatcatactgaatgggcaaaaactggaagcattccctttgaaaactggcacaagacagggatgccctctctcaccactcctattcaacatagtgttggaagttctggccagggcaattaggcaggagaaggaaataaagggtattcaattaggaaaagaggaagtcaaattgtccctgtttgcagacgacatgattatatatctagaaaaccccactgtctcagcccaaaatctccttaagctgataagcaacttcagcaaagtctcaggatacaaaatcaatgtacaaaaatcacaagcattcttatacaccaataacagacaaacagagagccaaatcatgagtgaactcccattcacaattgcttcaaagagaataaaacacctaggaatccaacttacaagggatgtgaaggacctcttcaaggagaactacaaaccactgctcaatgaaataaaagaggatacaaagaaatggaagaacattccatgctcatgggcaggaagaatcagtatcatgaaaatggccatactgcccaaggtaatttatagattcaatgccatccccatcaagctaccaatgactttcttcacagaattggaaaaaactactttaaagttcatacggaaccaaaaaagagcccacatcgccaagtcaatcctaagccaaaagaacaaagctggaggcatcacgctacctgacttcaaactatactacaaggctacagtaaccaaaacagcatggtactggtaccaaaacagagatatagatcaatggaacagaacagagccctcagaaataacgccacatatctacaactatctgatctttgacaaacctgagaaaaacaagcaatggggaaaggattccctatttcataaatggtgctgggaaaactggctagccatatgtagaaagctgaaactggatcccttccttacaccttatacaaaaatcaattcaagatggattaaagacttaaacgttagacctaaaaaccataaaaaccctagaagaaaacctaggcaataccatttaggacataggcatgggcaaggacttcatgtctaaaacaccaaaaacaatggcaacaacagccaaaattgacaaatgggatctaattaaactaaagagcttctgcatagcaaaagaaactaccatcagagtgaacaggcaacctacaaaatgggagaaaatttttgcaacctactcatctgacaaagggctaatatccagaatccacaatgaactcaaacaaatttacaagaaaaaaacaaacaatcccatcaaaaagtgggcgaaggacatgaacagacacttctcaaaagaagacatttatgcagccaaaaaacacatgaaaaaatgctcaccatcactggccatcagagaaatgcaaatcaaaaccacaatgagataccatctcacaccagttagaatggcaatcattcaaaagtcaggaaacaacaggtgctggagaggatgtggagaaataggaacacttttacactgttggtgggactgtaaactagttcaaccattgtggaagtcactgtggagattcctcagggatctagaactagaaataccatttgacccagccatcccattactggatatatacccaaaggactataaatcatgctgctataaagacacatgcacacgtatgtttattgtggcactattcacaatagcaaagacttggaaccaacccaaatgtccaaccatgatagactggattaagaaaatgtggcacatatacaccatggaatactatgcagccataaaaaatgatgagttcatgtcctttgtagggacatggatgaaattggaaatcatcattctcagtaaactactgcaagaacaaaaaaccaaacaccgcatattcttactcacaggtggaaattgaacaatgagaacacatggacacaggaaggggaacttcacactctggggactgttgtggggtggggggaggggggagggatagcattgggatatatacctaatgctagatgacgagttagtgggtgcagcgcactagcatggcacatgtatacatatgtaactaacctgcacattatgcacatgtaccctaaaacttaaagtataataataataaaaataaataaataaaaaataaagaatgcaaaaataaaagtggagaaaactgaaatagcatgttttgtttaaaaagccaaaaattcctagattaatttttgttgatatttgcttttttgctcttccccatcacacacacatgtgcacacacctacaacacacacattaccacacaaaacacacaccacacacacatccacaatgcacaccaacacaacacataccacacacacaaacccaacacacaccacacacatcacataccgcacacacccaaaactcaacacacacccacagacacaaactcacatatcagcttctttcactttagtttttttgggtgtgggggcaggtaaatggctcctcattctacattcccaggacttctgaatagtcttttgtatagctgatgcacttatcagaacctgaacctccggagctttacaaccacaggtctcattttcaggcaaaaacataaaatgctgaaaacttcccaaagaaactccaggatagactctttttgaaggaacacgatggcttggttgacatgtgccacttaacactaaaaacatctgattttgctaaaatcccaaattctgctctctatactgcggttctgagaaagtcactcacatgttctatttgaggctatgttaaatcattcactctacccgtcttgaggcatgaaagtcccagggatgtggatttaaatatatactgttatgatttcgcttatagctgttaaagtcttagttcaaagcctctgggctcacaacactttcagatacatcttttctctaagctatccacatgtgtcccactcaacactgagagccactgctagagggtctcaagggcacttttaggccaggagagcaagaaacagacacacatacacacaaaatactgttctaaataaaacaacccaaaaatcaggcaaaaatctatgcaagagacagaaggtttttaagagcaccatttagcaaggtgatattcaaaataattgaccaccagctgggatggagctctatggaaaggcctggcggtttccagggcaaccagggaagcccagggcctcctcactgggactcaggaaggcagcctggtttcctgatttgagtgattatattatgagagctggagagagatgtttctcatcaggaaatctctcacttagtcattcccataaatattcgtggcactacctcaataaagctccgtagagagtaaaccctacaatctgcgcaacagacatttttttttcaactgtgcagacagctttgaaaaaaacttcactgaagccactgcagtgtcagggcgatattaattacaggcctctgtggctatgatatggaaaatccatcctgagggaatctgtgttcttagacatggcaatccaattatatacaattgatccaaaggtggctgtttttcaactgcttgtgactatttacagtaacagtaatgccccaaattttatggttatgagatttttttttctgcaaagctttagtgcttcatagatgcttcctaatttatctgaggtcattgcctcacttacaataatcatctcaagtgagatattcaacacccatgcaccatgcaacagcaaaattggtcctgaagaggcacacagacctgagcccatacagcactgtcccatcagggtgaagacggatcatgcggtttttcactgtcactccatgcacaaatgactttttgtcatttaagaaatatgtgtcgggcacccatagctggtcagccactcgattgtcaagcgtgaggttgagagggatcccagaataggcgagccttttatctctccaatattgttgaaaatacatggttaaggtataatcctggggggaaaagaaaagaaagaaagttagtttgtacccagccacaggtgtatttcctccacgaccagccaaattcaggttgcaatctaggctctacagtgaataaccaggagaaacggatgccatttttatgcagaatgggaagcaatggctgctttcttgtgaatgcaaataccagttttaataggtacatgagtctgtgtgtgtcacgtatagatgtcctctgttttacttaggttaagaagcagactagacaaactggcatttaacagataacagcatagaaataaacgggaaaaagtcatcgtaaaatcaggttgctggcggggaactagattgttcccatggatgttctctttcccaccaggcagacaggtgctttaacaacctacaacagatgagctctatctacaaactctctctgcaatttgagccactttcctctggttctgccctccatgagggctataaatacaaaccttccataaacatcctctggagacacaagggactgtgggaggtctccatgccctacctattgtatttcctttttcctccagcttgccgtggccatttctacattaactggaccataaaatcacccggagatgatgacatattcacctgaggaaaatgggaacctaaggtccaagcaggatatgggaggtgggagacagacagggccatggtgttgtccacaggcttgcccacaaaattaccaaatatccacgtgatggttctgctttcgttttgccaaagcagttagtttatcgagaacaaagtgggaaaaaagacaaatcagaggctagacatggcagaacaaaagaaattctctttttgttggggacaatcatcactactcagttctagaatgaccaagtctaaaaatctagtgatattcacaggacattttgcacccttctgtggaaagatacaagctgaaaacatcaaaggttaggaggtaaattatccaaccacggaggggaaaaaatcgctgccattctgcaaaagcagctttctgagttcacacactttaagatcatgtctgcaaacatcctcacttgtggacagcgagagatggagagcaaatcggttgaagaatccagtctcgacacaggcctcctgacaacccctccagtattctttttgcttcttgcagggcaattcacggtgttgctaaactgatggctgtttattgctgctctcaatagtgttggaatatagaggcttagggactgatagaggacatcgatttgtcttcagatgcttgccacaagaaggggaaacaaaaccagcttgtactatatcactgtaaacaaaatacgtttttaagctttgagtcccataaaaattaagagtggaaggaaaggcaagaaagtccaaatgggctggacagtctttggagaggccttgtcttcaagttaaaggagaggcagcatttaagcagatgaaaagaagcaggcattttttttcccagacacttttgtgggcacagctctgtgcctagtaataacctgtgggggccctcaccaccaccaccaattaaagattctcgcagagcaggtgacactaaagataaccctcggctaggtagacagcaggtacagcacatcgaaaaacacatggagtgttgctcttaagggtctgatggaaaagcctgtggagtgcagttttgctggaatgctgggtttatgggtaaaagagagcagagcgatgagtcaggctagaccccagggcagtgaccacaaggtggaaactagaatgccaccttcgcagccaatgaaagccactgatagtttccatggagcagagagccatgaccaggagtattaaccgtgccttttatttctgtgttctgatgctttgatctgcgaccctgtggaccttggagggagggccccttccagggctggctaattccgagagacggctagcaactctcctaggagtgtacttttcacatgcaaaccaaccagtccagaacccacaccccaaccatctcttttgtttgtttgtttgtttttacagtccagaggtcttttattttttatacctattatgccataaattcatagagcatagatttcagcggcttagactccaatcacctcttttactgagcttgcacattctggggtccctatcacccgcttaaactgccccaggtccaggtaatggacaactaaagacagcccctgtgccccaagggcctgaaattatttaaaccagccaattctgagcctgcacaccccgtgtcacccattccttcccagcaaccacaataaaggcatttcccctccctctgctgcctgacccaccctggcactccctgagcagcccccatggcatggtgtggctccctgctgctccagaactggaaggaacacactctcctctcaatggcagttgtgtcctgatctgtcggccttgcctgacctaaataataataaaacctccagtttaaaacacaaagccgcctgtgaggaaaactagcgtagcaatggtgagttcaaggggtagaagggatggtgtgcagaggcctccgaggagtggacagtgctgagtggtgggtaaagcaaaggcctgaaaggttctcggacactgggctgatgcagaacatcaggatgagaatgcaccttcacagggcatattccgccccttcatcaccattacctttcgctggtgtgggcggtgcgctggaactgaggcgtgcaaagttgtggtttcacaacaaaaggaggatgtgttagtggtggcgaccacagagtttctctactatcaccctccatgttacactcgtattgaaatagaagtttcacttgtttctttctttactcctaaccccgcatgcttacgcctgagtcgcgatgtctagcgcccttctcagagtccctccggatgggctcgcacatggcttgccacaagaagggagagaacttgtcagtcagccctaggagcccggctgtcactcacagcctgacagctcgggctccgcgtcttattttggactgtgtcgctctccgcaccaccagcagcgcctctcagtttgggtcttgggtgtctgctgaggtgacttgagtagactagtgggtaagagcttaggtaacagcaagagggaaaaaacagtatgaaaatccaaacccgctgcatgtgatcagccatgtatggcaaggactatcacatcagtgggggcacaaatcagtgtcctcctttttttctgggatacttactagctggcaacaaagggaagggggtggtggaaaggtccaagcctccctccactctcgtgcagccgggagtagcaaatgcagggttttcctgttacgggagccatggtgccgctccttgtgacgtgcagtggtgagcactgagccaggaacagcgggcagccgcttgtgtgagtgatccttcagcaaactccacgccctgtgctacctagaacctcatttaactaggaggcaggtattataattattatcctatatcgatgaagtaacaaaaattgaagagctgaagtaactcgctcctcatccactccctccactccctcaaacactagtaacccgggatagtggaacttgaagttcgggccacctcctttcagggcctggctctcaatgtggaagctccaagggatgggagctaaacagttcctcacaataaagtggagtgagcttggcagggtggggctttgaaaggatgtctctgagcatggagagtcaggtcatgcaggggggttcttcagggcagtaatcagaaccccggcaccaccaactcctccttccacacccaacccatcgccaaacatttagcacagctgctatagaaagaagctttgtaaaagtatccttttcttcaatgcatcccatacatcccagggaagtcaccaatttttacctttgcaatgatgtggcatgaaccaaagagaagagcacagtcacaaagagatggaatttgcatgggatggagagtctgtcagagttttgaattccaagcctgtctgcagaaacagaagatactttgagactttaaaagctccaaggattaaaggaatagcagaggggacactggattcctcacagaacatgaaatggaaattaagcctttgttctttaaccttaatgctcgaggtggactcaggtgacgtctgggtacaaaaataagaaatgactgggaagggtggagcttctcaaagaacagccaagctggccactctgcggcagggtggatccctgttgctatggttcctgctggctgacaaggggctggggaggtagcagtagacaccaaatgagacagactgttgatatcgtttacagaagcagcccgcgtcctccaccaattgagttgctaacgttccctcttttgccagacccccaggctgcacaagaaactatctgtatcattagatacacgcctgccttactttactgtgcttcacagatactgcatttttaacaatttgaaggtttgtggcaacccagcgttgagcatgtaagttgaacaacactgtttttccaacagcatatgctcacttcatgtctctgggtcatattttggtaattttcacaagatttcaatcttagtatttcattacttttatattggttatggtgacctataatcagtgatatttgatattactattattatcactctggggcaccaggaatagcacccatataagatggcaaacttatcgtacaaatgttgtgtgtcctctgactgatctaccaactgacccttaaccctgtatctctccctctccttgggcctccctattccctgagacacaacaatatcaacattaggccagttagtagccctccaatggcctctaagggtttaagtgaaaggaagagtcgcccatctctcatggtaaatgaaaaaccagaaatgattaagcttagtgagggaggcaggtcaaatgattgatgtgcaaaagatttttataggcccaaagttaggccttttctaccagttagcccaattgtgaatgcaaagaaaaagttttagtaggaaattaaaagtgctactctggggaatgataagaaagtccaacagccttactgctgatattgatagaatatcaaaccagccataacgttcccttaagtcaaagtttaatctggagtaaaatcctgactctcttcaattctgtgaaggctgaaagagttagggcagctgcagaagaaaagttagaagataggagagattggttcatgaggtttaagcaacgaagccatttccataacataaaagtgcaaggtgaagcagcaagtgctgatggagaagctgcagcaagttatccagaagatcccgctaaaatcactgatgaaggtggttacactaaacaacaggttttcagagtagactttggaagaagtcttttctaatggaagaagaggccatgtcggactttcatagcaaaagagaagaagtcattgtctggcttcggagcttcaaatgacaggctgactctcttgctaggggctaattgcagctgctgactttaagttgaagccaatgctcacccaccattttgaaaatcccagggcccttaagaattctgctaatctactccgcctatgctcaaaaaatccaacaataaaacctgggtgtcaacacgtttacaaaactgaatatttttaacccacagttgagaccttctgctcagaaaaaacattcctttcaaaatgttactgctcattttcaatgtacctggtcactcaagagctctaatggatatgtacaaagagatgaatgttgttttcatgtctgctaacacaacatccattctacagcccatagatcaaggagaaactgactttcaagttttattatttaagaaatacatttcacaaggctgtagctgccatagacagtgattatttttacggatctgggcaaagtaaactgaaaacattctggaaaggactagatgtcattctagatgtcagtaagaacattcatgatttataggaggaggtcaaaatatcaacaccaagaggagtttggaagatgtggattccagccctcatggatgactttgaggggttcaagtcattgcagatgtggtgggaatagcaacagaactagaagtgaaacttgaagatttccctgaatttctggaatctcatgattaaacttgaatgaatgaggagttgcttcctatggatgagcaaagagtggtttcttgagatggaatctactcctggtgaggatgttgtgaacattgttgcaatgacaacaaaggatttagaagattacataaacttagttgataaagcagtggcagggtttgagaggactgacttcaattttggaagaagttctactctgggtaaaatgctatcaaacagcatccaatgctacagagaaatctttcatgaaaggaatagccaaagtaataaatttcattgttgtcttaaactgccacagctttcagcaaccaccaccctgatcagccagcagccatcaacactgaggcaagaccctccaccagcaaaaagatcatgactcactgaaggctcagatgattgttagcactttcagcaatacagtattttcaattaaggtatgtatattttatagacataatgttattggacaattaatagactacaatgtagtataaacataacttttatatatcttgggaaaccaaaaaatttgtgactcacttcatgatatttgctttacagcaatggtctggaacagaacctgcagtatctctgagggtgtgcctgtatttactcagttattcagcaaatgtttattgagtgcttaccgcctgctaggcaacttgggggaggcgaagatgaacctgaggcactgtgagccctcaggggctgcccatgtggcagagacaataattgcaggttccaagaattcaaaagcaatctaggttaagtgctatactaaacacgaagggatatggcaatcagaaaaagaagccacttctgggaaggatgactacaggtgaattcttggaaaaacaaccatctgatctaaacctagaagtaaaagattcagctatgtgaagggaagggcggctgcccctggagggccagtcttgggtatggacatctggtcgaagcagctcctgttatcaactgaccctacacagctattttcgcaaaaaaaacaaaaaaacaaaaaaacaaaacaaaacaaaacaaaaaaccaaccagcgccacagggctaggcagaggagatggctccacagggtggacctcacattctacctaggttggtgacccccccagggtagctgagggagccctagagagacgaaagggggccagcagaggcctgaaacggcagtcctcaaacggaggctctcaggccttggaaatccgagctgggaggtgtgggggagtcaggtgcaagagcgcctccactccttgtgactgccgagagcccgcgtccccgacttttacctcttctgtctggtaggtggcccacatggggacacgagggagtctcccggtatcccggtgctgaggtcccaaagactccgagagcctccgccacgctaaccggaagttgtgactgtcgcttcctctccatctctgctctttacaggagaggctgaagctcggggaggcgcaggggcggagtgtggggagaagcagctcccgggagacggagggctttgcgaagcggcggcaatcaggggcggggcctggaaaggagggcagcgcggaagcttggccccgagagggaggaggcgtggtctgtggctcgaggggcgtggcccgtagcggaaaaggcgtggcccagctcaggagcctggcgggcaagctcctccctgtgcgcggcgctgtgcggcgtggagaacctcgccctgggagggtgggcctgattagattagcacacaccgggaagagacaggctgtctcctggcactggctcttggctgtggcacaaccagccttatcagcacatctagaccgaatgtgttggcaggaggaggagggggtattggtggagaggtcagagcttgcaaaaatagcagcttccagtggggctgcggagacacagccccgtgtccaggggatgcagaagtgtcctcgtccttggctgtgggtgagccccacaaaccgaaggtggtaacactccacttctcacatcaccaaactcttcagccctggtgcagcttctgagttcaccgagccccttctggttgtaattagatgtaacctgactttagaaaactacagtcttagtgggagttgagatttatagccattcaagcatttataaaatatccctcctgtaaattaattaactgacacactgaatgtgtgttcaccaatactgactcgaacgtattttgttagcacgtgtctccatagccctgggcaccctgagaacgtttggcttctggttaaggtgcagcgccaatcctgagatggggctggccctggatggatacagtacttagaaggctgtaggtaaaggcaatgagaggtcctggcaccccgcaaccctccacgacctctgccaccccatttactcagcggttcaaccccaaaccctcaccagggaaggccgctggggaagcccttgtggagcaattatccttggactcctgcattcctcggccaggctcccggaggtgaggctctttcctctgggtgggcaggagcccagggcacctgcagagaccttctgggcccctgctctacccagtccctctgtacctgaaacagctgtccacagaagggaaagctgccagcacctctggttataccgtgacaggttcctgtggacattgcagccctgggatatgggatttaatggagagtgctcaggcagtgaggaggaaaacacaagggaattctccagtctactgggaactggaactctctggagtatgctctctggagcatgtgagttgttttgctgaattatagtggtttgaactattacagtttatcaaaatcattagataagatgtcttgaatcaatacctttctctcataaaagccttctgaagaacttagaatcagcatgaagaaatattcgagtaagagttgcattcaaaacaaagggtctttcttaaaaacagaacctttctttaaaaaaagggtcttgcttaaaaactttgcaaacaaaatcacttgaattaaaaagccatttattcatcttggcttattttggggatcataaagccctttgataatctaatgaaatcgggggccctctccacagaaaatacaatctctctcagtattggtgtgtgtatcaatcagttagcacaaaaccctgaagttcatgggatgcgtgttttacaagctcaaattgctttcaatactagtgggtggagttccacaaatttgtacatcatttgcttaggatgtctgcagtgttttcctatagaaaaaactatgacaaaaagggttgttaggtttcactccagattatcaaacaatttcatgtgaaggtaagaagccacggttcctggtgagacacgaggactagcccaggctccctgttttggagccacagtgccgctgggaggcaaggaaagtattgctggacctagaagctgtagaggaagccctgagtgccgggagcaggcattctggaatatgagccacccacaagtgaagcatttatacatagtgactgccctttcaaaatctcctgagtatatacaagcagcagcaacaacaaaacaaaatgaaacctcagctcatctttaggtgtataattcaggcagctcagatgaattgcagtaagacatataaacaacaaagtttcttcctgcttttgcaaatctcttggcgtttatgacattaaaatgacaagaatacacatttgaaagcggaaatattgctcattattctgcaattaagtaattgactacattccttagcacaggaaatgaagaaaaaatttaccatccctgagaaagaaatgcaatttctaaaccaaatttaaatatttaactgcagctgtgaaaaccacaggacacctgcatttgcatctggttcagcaagtttatgatacaaaaccttgcaggtaagttgttctcaggtcagggaagatggaaaattgttttgagaagcttacataagccctaggtggtggtgacttcctttgtagtcattcctacaaggaaggttaggctgagggaatcggcacttttattaacaaaatttattttggaaattccaatctattccgtttaatgaccaaaaactaaatatctaacatcacaaccaactctcctcccacaacagacttcgatggtatctagctttccatttgttgactctatttgatgtttaataataaaacagcttccttctctgcctccctccatcttgctttaagcattgattatctaccataggccaagaaccatacttagtgttagggatccagagataaggaagacagaattggtacctttaaaaagctcacaatctagtggggagaaagaaagatggatccaagtacaattagagtgattaggagaagcagctttggaagcgaacgtgccgaagtctcaagttggcctcctactggcccagcaagtgacaggcgacctcactgtcttatgcctgtcactggatctgtgaagactgcctgccacgcattctgaagtccttagcatggggaggacatggtgtgctgagttaagtgtacagcaatgcgaaagaagtatatatgtaagggtcctctcactcagcctagggctggcaggagaggagtccagttactgaggcttttcagcctttatacctgccgaaaggcagagtgtgcatttattcatccatctaaatgctaaatgtagtcagaagatgaagtagtcacctctgtatgaaatctgaaagggctggtgaaaagagatataagtctcccaggcccctaaagctatctgaaaagctggcataggataggaattattttgaaaatgtttttctttataagtctaaaaagatacttttctggagtcgagtaagtttgaaaagcaaaatgattgcactgacctacattcagaggacaaatacattgtactgtgagaagaaatctggagaattcaacctaagccaatgagaaccagggaaatgtaagagagatgcccttcactaaataaactgttcatgcaggtgcttgtttgccgtcggtgttgagtgtgctggagcaaaatgtgtcagactcgctgggtgacacccttgccatgtgccttacttgggaaagttatctaattattctgagccttagcaacctcttgtgtaaaaatgaaactaaaaatgctccttttgcaaaagtgctgtagccattaattgatctaacaatgcttaacacagtgctggattcataacaggcatttggaaaattgtactttctcttgtctcaagagcagggccagtcacccctgaaagaagaccctccagaactgaatgaaaaaggaccctctttattagctgcccccagcccccactattctacagcgagtatacaccaaaccacaaatgaaaatgtgctgtgttttcctgagatgcaggtgaagaaatcccagcccaatggtgtagaattcccaaaattatctggagcaggcttcaccctttgctctcaaatcccaagtttcatcgtctactcaatatccaaatgcaatacaagcttgtttcctgaaatgtatcaggtcactagctttttttcataaaacattttttctgctgtgaattactttgaaattataaattaaaattaaacacaaatttataaaagagctacagtgctaatcaaaatgaaaccaccaccagccatcctactgcagctgaccctgacagccacccttccagtgctccagggctcacctcccacccactctctcttccctgtacctttagaaaaccccatcctatagtcaagtgtaatgcccaacctgttattacgaaccttgtttttagactctcctctttcctttaatcacctagccttgtttccacctgaattgactctcccttagctaagacagccagagagactccatcttggttctttcaccggcagccccttcctcaaggacttaacttgtgcaagctgactcccagcacatccaagaatgcaattaactgataagatactgtggcgagcaatatccgcagttcccaggaattcgtctgattgataacacccaaagccccacgtctatcaccttgtaatagtcttaaagcccgtgcacctggaactgtttactttcctgttaccatttatccttctaacttttttgcctactttatttctgtaaaattgttttaactagacccccttcccctttctaaaccaaagtataaaagaaaatctagccccttcttcagggctgaaagaactttgagcgttagccgtctcttggccgccggctaaataaacggactcttaattcgtttcaaagtgtggcgttttctctaactcgctcagtcaggtacaacaaagtgactcctccatataaggaacattttcaataagcattccctttgcagcctcctttagttgtaagttggtgacctactgtagcctttttttggagaggttgcttcttctcccaaactgggcaccaaagagctaagggagaggggcacccccctttcccactcctgatcagcctctgggtcttcgttcttccactgctgtctctggcccattctactttcctgggatttggatgcattgatcccactgccttctgaacctttccatccagatgccccacatgcaacccaagatcatcatgtcccaaattaactcactgtcttcgtgcctcaaatgtgttcacccacccgcccactcacgcaacccaacccaaaccagaagcaatataccagcctctttcattctcaccctaacctccaacaatcattcagccactatgttctgtcgatactatttcctaaaaatctttcatctctagaatgggatcatgaggtcagctgcagtgctgagggctggagtgtttccactgatgtcgccatggcaacggattagaggatgagtgcctagactcacaaattgcatcccagaagcatgcttacccatggtgtctagagtatggaggtcaaataccaaacctcagacatgttatgggttaaatagaataatatagggaatgaccagatgcctcacactctataagggagcagatgttccaactcaacacaatataatatgaatgaatttctggaatgtgctggtaaactgcagagtcattgcatactctcctttatttaaaacaggtatttatctgaacaatactcactaaatacgtgtgtatatatgtgtttgtgtgtgtatgtatacatacacacatatatacacacatatttatagagagaaaaaactttaaaaattatatatatctctctccaaatattagataatctctaaagattagataactttctcaagtaagtaagagatatatgtatctctaaatatatatatatatatatatatataatatatatatatttagagaggaagagagagagactttatatgttgaaacatatgtgtactaatcaaagccatagttttattttccggcaactatctttaattaagagaattccaaaagggaatgcagtgactccagtgatatcattcttccaaagatgctctgagaactggctgtgaaaaacatccatattgcttggacaaggcaccctcatctccatatttcaaaggtacttgaactgggtgaacattacccctggagactggcgagtgattcatccccattctgactgtgagacgtgtatcaggctggatgatccatgcctctgtgctcttcccctgcttaaacatagctcctgcagatgaccataaggttaagaattctatgttcttaaatagtgatggtcctctcttgggtggcatgatttatggagtttgtattattagatttgctaaactgagtatcacttaaaattacttctctgaatcccttcaagagagcagacaaggcaaaaaaaaaatgcttaaacagaaagaaagacgtttatttatcaggaggaataatttctgatatttggcacaagtgaatgccagaaccgtaccagtcaacctttcttaatgggttttttactccctttcatttacagaatgagtatttctgtcttaagaccgctcccatacccttacactgtgaaaattcaattgccctttgatttcatatatatgcatctagatcaggatttgtcaatggatttcctcacctcaaagacaaatcatgtggattagtgatgccacacattttagagttctttcaatgtctgagatgtgctatttttagagagcaagtctattcatttctgagatcatgcctatttctagtttctgtgcagaacctattagattactgctgttagataaatcacaatatcaacagtactgcacttgatatagccgagaaatattagtttgatagttgtcttttctgaattgctattaattggataaatatttggatggacatctctgcaaggcattgcataaagcagccctttcctctggaatactgtaatcaaagcccaggtagccagacaggaactaccatgcaggtttcatacacccaatcaagcacagtgccgaaggagggaaaacacaagtgttaacctttagattggagaataacagcaccttatttctactttttgaacaaaggaccttgtactttcattttgcactaggcccctcaaattaggtagctggccctgcttgtgaactaaccttgtcctttgtctctgaccattcagatccatgtcttcctccagcatccatggcaccaacttgctagcttgtaattagggcaaaacagactctccaccattctggatacatgctctcctgcctttcctccgacctaaatggctcatcttctttgctactccctccaattctgcctcttctttttaatgctagagggccccagggctcctctttttatgccaccatccacccactctttccaccagaccctggtctcttctctatctgcactccctcccttaagtgattgcctctagctgcatggctgatcctgatcattccatctatatgcttagaattcctaaatgttgtctccaaccaaatttttaaatcaaactccagaatcaactcaacacattcaaatggaattactgatcttactctcaaaaccaatccacttgtggtcttcccagttcacacaacggcattctctccttgcagttactcaagccaacatttctggagtcatttttcactcatctcttctctcacattcttcatcaatctgtctgaaattctattgaccccatgttaaacacagacacaggttccaccataccttatcaccactgtttctaccacccttgtcaaacacaccatctctccccattcctagtctaggggtgtcctaactgggtccttgcactcttctctcccacggtcttgttcccattggagcaaccagaatgattaatgaacaactgaagtcagatcatttgctctcctgttcaaaaccctacagtggctccctgcctaagtaaagcctaagtcaacatgctctggcccacttagcatctctctgaccttacctctcattattgtcacctttgctagcttagttctggcaacaacaccctctatgttgctcctcaaacaacccaggcatccttccactttgcattcgctgttccttctgccttgaactctctttcccctaacaaccttctcctgacttccttaccttagtcaggtctgctcagattcaccctcctgacagtggcaacccgcaccctctacacgctcccatcctcttaatcctaatcatactctagatgataggtttatttattgcacttatttattatgtttctttcctttttccccctgctagaacatcagctgcatgagtgcaggaaattctttctctttggttcgtagatgtatctgcagcatctaggatggtgctgagcacaaattaggcattgcataaaaatctactgaacaagtgtgtagaagttctgtataacctggttgttggtgtgtcccttcagaaaagatctgtatgttttttcagaggtgttccagattggttgatagccttggattacttccagtgaaaatttctctgcagcttaaagttaaatcccaaatccagattagcacaggcatgggatacaaattcttggggcagacattgtcttggccacctgaagcattagcgagacagacacatttccttgtttgatagttggcgaccattgtcctagaacacccttttactgtgtacccctttgattgcaccagctctatgaggactccatttcagccctctgcttggaggacttgcctagtccctagcctcctgtttctgcctagccactgacaccaagccacttggttaccaagggcaaaagacctcaggctttccatcctccaagtgcagcttacaatgctttcactcttagccgggacttcctattattttcttatgaattaagtgatatatttaaataatgtgcattataatttatctgccatttctagtggctttatatggagagttctttagaattggtagtcaatcatatttctggacactgaagtccccatccctcatcagcccaccagggttctgaacctggtccaagcctggtcagagcaaggtcacacaatgacccccaaagggcactcttttgtcctcatcctactcaatatctaggcagatgcagcagggctgagagcttgttctctttatgcctgtctgcccagtctctgtgatacccgctcctcttgcctttttactttactggctggctgctctgctcagggctcccaggatagacggcacctctgttctaggtctaaaggttagattacctcagttgagccgtgctccttccttcctctcttccaaggtgatctcaatcattcctaagatgtttgacaaaaaccatagctgatgacacccatttctggctgaaggccggagacccctctgagtgccaatcccttatccagctgctcttctgacagcactactttgtagtctctttgtcatctttattccttctctttccttgtttcctaatccagttccaagacccaccccagttgccttgagtcagaatcccaggaggtaaagcccaagcctggcatttttttaaaagctccatttggaattcttatttttgcatgtaatcagtcttcatgacattaatacatattctggtcactattttgatttaaacctttcaacttcactcaaatcagaaaattctatttcctgaaatcaacagtctatatttagaaacatgcgcatgtgtgctgagccactggcagaggaacaacccccaccacgctccgccgggaactaggaagagtctgttccggtgaggtgcaagaacacagtcttccactcgcttctgggattctagtggatgtcaatatggtcttgctgcaaaccgtttcaagagggtctccaaaaagccatcaatgtcatgtcaacacctgacatgacagcaagaagacacaggtcatggctctagcatcaccggttttcagatggttctcacggcagcacaggtgtctgaggatggcctcagcatgaggacctgccttcatccaggacctgatgctataataatcatggccatcaacccaatgcccgttgttaattccaaaatgactaggtgtttcagtaaaattaacgacagaaatgaatacttcagaatacagtagaccccctgtatctgtgaattctcatctgtggagtcaaaccaagctcggatggaaaatatttgaaaaaaaaaaaaaaaagatggttatgtctgtaccaaacaggtacatttttttcctgtaattattccctaaacaatacagtatagcaactatttacatggcatttacattttattaggaattatgagaatagagatgatttaatgcatacgagaggatatgtgtaggatatatgcaaacactacatcattttatatcaaggacttgagcatctttgggttttagtatgctcaaggggtcctggaaccaatccttcaaggatatggagggaaaactgtacatacccagtacgtgttaactttgcttgctggctcctatcattatgtaaaggatacttccatatcctacagtgtattcacatagtgtattcatatagaaatcccttgctcttgtgaaattcagacatgccagtacattcgatttctttaagctgttgggtaatgattgtgtttgttttaattcctctaatatctgctcctggtaaatgtaaacagatgtttctaattattccctttcagtgatgatgcacacatatcaggcaggcagatggaagatttaggtttcacaaagagaaggtgaaatgtctatgatgccaacaagagttgtgaatggatgattttcattgtaaaaatcgccatattttggtttgaaagtcagtaaataaacaagaactattaaattactcaaaacggagagcattgttttaataaagcagggcactccctcagctacaagctgtagtcctgttaaactttagcataacatctcacactattcatattcaaatgagctcgagggagttatgacagaggtatggaccagccaagccaacttgaggccactgaatgcaaactttccagtagcattcagatggtgatttaaagtatcaaaacgttggccgggcgcggtggctcatgcctgtaataccagcactttgggaggccgaggcaggcagatcacgaggtcaggagatcaagaccatggtggctaacacagtgaaaccccatctatactaaaaatacaaaaaattagctgggtgtggtggcgggcatctatagtcccagcttctagggaggctgaggcaggagaatggcatgaacccgggaggtggagcttgcagtgagccgagatcacgccactgcactccagcctgggcgacagagcgagactccgtctcaaaaaaaaaaagtagcaaaaggtctctattcaccatggcactggttaaagcatcaactatcaagttaattgtaccttttcctgattttgtgagtaaggttggatattaaaatataggttttccatatgtgagagttgcctcaagttggatagcagctagacgatttttactgtgagaacaataattcaaagtgtcctttatgtttctcattcctttgcaggcactgcacagccaggattcagccaccgcggagatgattacacagcttagagatacactgtccaaacctcccatgagtttggaattgtgcatgccagattcagttgtaacataaccagagatgtcaattcattagctgctgtgttaatcagaattagggtttataatttataactggcaatataattaacagatggtaatttaatcagtcatgattctcttgctttacgttcacctttaaaactgtgaaactgttgtcgcttaaaatgtacaggatgtgatgtcacaaaagctgcaatccttttggctgtctcctgctatgccctggctcaaaatccaacaccctcttctaaccttgtccaggagcaaggttaaacagaacggtatgaggagtggcgaacatctatgaagatccgtagactcccatctcagcctctatagcactacagcccattatcaaatatacctttatgaatgacagcctgcaattatcagatcgccttctgacgcaggacatgaggcggagaaataacacctagaacttgctcgctgcatgctacgacttcccagagctggagccacattgggagactctgcagagaaggcttgcttcagccagctggcatttccccctcacctctctgggatgccttccctctggcactggccagaggaaggcaagacactgaagggagaggaaagtgaattgactggcatagctgaggttcaaaactgacactaaaggagaagggtgctgaagtgcaggagccagcattcctatggaatacaaactcttggttagaatgaaggtttccagcattctatttttgcccctcaactgtccttgattgaagcctttggacctgacaggtagatcacatctgcctctggtcatttccatcagcactgcctgtgggccacacttaccatgccgacactactctaccagttcatggctgggccatggccagatgccccttggcttccctggctgtgatggaggacagctgacagcaagacccatactgatgtcctgcactaatgaagtggcatcaggaataaagaacagggaaaacagacagctgacccttgaacaacacaggtttgaactgtaggggcccacttatacacagattgttttactttttcttctctttctttttttttttttagagacaaggtctcactgtgtcacccaagctagagtgcagtgactcgatcatagctcactgaagccttaaactcctgggttcaagcaatcctcccaactcagcctctcaagtagctgggactacaggccctcacctctgtgcccagttaatttgttaaagaattttttgcgagacagggtctcatcatgttgcccaggccagtcttgaactcccagccgcaagcaatccttctgcctcggtctcccaaagcactggcataacaggcataagccaccaagccttccccccagatttttttcaataaatatagttggacctccatatccaccggttctgaatctgcagccaaatgtgagtcaaaaatagaggatcaacttttcgtgtatggtatacatgggttccacaggactgactatgggacttgaatatgtgtggattttggtgtacttggaggtatgggggtggtcctggaaccaatcccctgaatatactgaggggcaactgtgtatatatatgtatacatacattttcaattccaaactcctggaaaggaaaaaatgaatctataagccacgttagttccacagtggctgaatcctagctgtgcagttcctgcatagcctgcaaagaaatgagaaacatgaaggacactttgaattactgttctcatgctaaaaatagtctaagtgctatcctacacataatcccccctcctctctacctgcatatataagcatatatgtaagtgtacccccccgcacacacacaccaaagcagcaatagatagctgcactgatacacaatttttaaatattgtgagttatttgcgagaaagattatcactcaacagatgaacatttattaaatgaattcatttatttatgaactcagttattgtgtttatccattcatcattttctattaatttattcattacatttgcctcaccaagtttataaaagaaatatgtcatggactcagtccacagcttgggggttgatttcgctactacaccggtattgccagtctgtctcagtccctcggggcttccctgctactctcctcacacggccctcctctgttttcaccatctcacaagtctttcccatctgtcccatctcaccaaagaaccctcagctgacacctccaccctgaccttcttagactgtctcctccattctgcactctgtcagttgctcatctaacataagaaggttatccttaatggccagcaagatcctgtccctgtgaagattttatgtttctccacaacaccacaggccctatatgacagttcaccgaggagctgttctcccctggtctcctgcactgccccgtgcccccatcctggcggccaggtgcctgactgcagtcatggtggaacacagcctcagaatgatgggatgccagaaagcagaagagcaagccatgcaaagagacgaggagccctcagagatggcacagcccattttgagcacatccaccaggcaaccttaaaccctcaagatcagagtcactccatacagcaaactccaaaaacaacagctaagggtaccagccaaagggtagttttcaacttcaggcaggagcaatgttcatgttgtggtgtcttcagtctccctcccatgacacagaggtcaacgctcctatcatcagcattctctttgaacaaggagaacgtaatgaaccaacatgcaccccagctttcatgacactgtgtgtgtgtgtgtgtgtgtgtgtgggttcaccctactggttctgacacacgggaagtccccgtgtgacctcagtctgacctccaaagtgcaaactttcctcctcttctgttactttttcatttattcatccaacaaacactactggtgacccaccacctgccgtcataggggagacaataagacactgtcaggatcttgctcatagtctagcaaagaccaaaactacggatccttcccttttccaatcactcaacaagtacttgtgtagcacttcctatgttgcagacaccgtctgccttagtggggcttcgtggaattcaatgagagaggcagacactgacaaacatccacagaaatattacaccatgagaagtgacagggagttgggcagcgatgactgagggtacccagggcaggaggtgagggaaggaattccaggctgaggggcctaccagcggttgcagggatggacattcaggccagaagcagagggcaggaatagtcactccaagattagaggctctggtacagatttttggttttatttggaaagccttgagaagatactgcacatttttgggtttgcactaaaaatctcagtcttcctgctacatggaaaacagtcttctctacaaattcatatgttggggttctgagccctggtatctcaagaatgtgaccttatttggagatgaagtgtttacagagatgattaaattaaaatgaggttgctagggtgagcccttgtcccacatgactaatgtcctgatacaaagaggagatttggagacagacacgcacacagagagaaggcctcgtgaaggaggaggcagagatcagggtgatgtttgtacaagccaagcaatgccaaagatggccagccaccaccacaaggaggggacaggactggggcagattctcctccaggtcctcagaaggagccaaccctgctggcaccttgatctggggcttccagcctccggaactgtgagggaatgaacttctgttgttgaagaccacggtctgtggtacattgccatggcagccctagcagacggatacactgctgcagcccatgaggagtggtgacagtgacagtcagacatggctgtgttggggagaaatttaagctgccgaacaacagggccttcctgatgatttgtccatagcctgaggagcagaagcaagtccaaggtgggtccacatgagaacagttccactcagggacacatcagcatgtgatggagactcacagaaaacttgataggtttgtagtaaaattttgaaatgagctaaaaggagaaaatgaaaaacacttgcaatgtctccaacacaaagctacacttagtggctcgttcctctaatttcaacactttttgtaagaggctaagaaggaaggattgcttgaggcaattgagaccagcctgggaaacagagtgagaacccctgtctacaaaaatgtgtaacgtgagccaggcctggtggtgtgcgcctgtagtcccagcgttctagaggctgaggcgggaagggtgcttgagcccaggaattccaggtcacactgagctatgattgcacgacgcactacagcctgggcgacggagtgagaccatgtctccccctccaagaaaagaaaaagccacttgttcctgctctggtgaactcttttggtcattttctgtttgacagtgacagtacatatctggatgtgtgtatccaaagatagtgacttgttaacagaaatggaactatctttacatgcctcatattaagaatatagcctttcgaggtaggagtccactcctgtgaggtatggtgatgggtgcagatgcaatgtggctctcaatagcaccttatggacagttgtgtccccaaaggagggatgagaatagctactgaagtcctaaagagcaaccctaactcaagccattggcacacaggcattagacagaaagctggaagttgaaatggtggagtccaacttgtctggaccagcttaatggttctactcctggtaacatttttgtctgtggatggcttgcttgggtgcagatgtttggagaccttttaaaggactccgaattcatgcttgaagaaatgcaggcagacctgttatcctaaactagggtttttaatgaccacagcaagcaagcatgcagcttaccacttgaaagggtcttgcctcacccaagctggagtgcagtggcctttgaagcttactacagcctcaaacttctgggctcaagtgatcctcagcctcccaatggtctttgtagaccgcctgatggagtctcgtggcacaagaagattaaaacaatgtctccaattttaataaatttttgcaatccaaaaaaaaaacaatatatgaaaaatcattttccacatttcagtaatattttaccaaataatgggacctattttttaacaactttaatgaggtataatttacacaccaaaaatttcagttgtttttaagggtacaatcgaatcatttattttagtaaattgacagtcatgcatccatgactgcagtctaactttagaacatatccctcaccccagaaatgaacccagtgcccatttgcagtgactctcccttcacactccatcaccccaagcaacccctaagccactttctggctctatggatttgcctattctggacatttcagataaacggaatcatatactacgtggtatttggtgcctggcttctttcacttagcatcatacttttgaggtacatctatatggtagcatgtatcagtgtttcatttctttttattgccaaacatgattaaatagtatgaataaactaactggttcacgcatttaccagttagtgagcatgtgggttatttccactttagggaaattgtgaatagtgctgctaatctcatccatgtatgagtctttgtgtgggatagtgttctcattctgcttgggtatatacctagaagtggaatttctgggtcatatggtaaataacataagaaaccgccaaaatgtttttccaaagtagctgcattatttcaccccagcaacatataaagtttccaatttctacacattctcatcaacacttattattttctgttttttaaaattatggtcatcctagctggaattaagtggtatctcattgtggttctaatttgcatttccctagcgactaatgatgttaactgtcttttccctatcagccattcatataacttcttttttgtttgtttgtttttgagatggagtcttgctctgtcgcccaggctggagtgcagtggtgcgatctcggctcactgcaaggtccgcctcccgggttcacgccattctcctgcctcagcctcccgagtagctgggactacaggcacctgccaccacgcctggataattttttgtatttttagtatagacggggtttcaccttgttagccaggatggtctcgatctcttgacctcgtgatccacccacctcggcctctcaaagtgctgggattacaggcatgagccactgcacccagcctcatataacttctttggagaaatatctattcagattctttgcccacgtatgttaaaatttgtttttcttattgttaagttgtgagagttatttacatagtctgaatacatgttccttgtcagttatatgctttgcaaatattttattcctggctgtgaattgtttttcagtctcttaacagtatttcaaagagctgaagttttaaattttgatgaagtccaaattatcaatgtttcctttcatcacttgggcttttgaagtcatgtctaagaaatctttgctgagcccaagatcaggaagatttagtactaaggtttttttctgtaaatgtttcatggtttcagatcttacattcaggtggaggatgcattttgagtttgtttctttgtgcagatcattggtctgtaaatttgcttgtcatagaaaggagacagtgcactcaggcctggtaaagagagagcaggtgccaaggccaggcattctacagaacagggtacaatttgaattttttttcaatttgaaaaaagaccgtttggaatgcagtctgtagactcaacagaagtggcagatgttctcaagagatgaaaccaaagccaggccacagcaggacctgtgggactgttagaaaaggcaggataaggcaggatcccagagcggggctgcctggccagcactagggacaatttgaaggatccaggggcacagctgcctcccccactgttagtcgaggaggaaaagcggtggcccacagccttctcaaaacggagacaactaacgggttaccctggttagcaagtggacagaagaaaaggggaaaaacttacttttttaaaccaattgtggtaaaacacatctaacaagatttaccagcctaaccatctgtaagtgttcagttcagcagcattaagtaccttcccattgttgtgttaccgtcatgaccatccatctgcagaactctccatcaccccaactggaactctgtgcccattaaacaccaactcccctgcccctagccccagcccctggccacctccattctcctttctgtctctgaatttactgctctggggacctcatatgagtggagtcacatagcgtttgtcctttgtgactgcttttttcacttagcataatatccttaaggttcatccatgtggaaacatgtctcagacttttcttgcttttcaaggctcaacaataatttattttaagaatgttctgtttgcacagagtaatttggaggtgcctgtggggcaaactagggagaagcaatcactgtgcatgtggaagagaagctctaaagctctaaatttaaaataagtggaggttttggcatggatgaactaaccatggagagggtgtacagtgagaaccttatgatcccgaagaaaggggcagagaaagggccatcagttaaaaatactgaggaggaacagtgagggagcggcaggagaaccaggcagtgggaatcccaggtagccaagaataatgtggcaaaaaatttgagacaaggcatacagaagaggccaaggtcttggggacccaggaggtcacaggagagaaacagtgtctgtaaaaccacagacagaagcccaagggtgcgtcagcagggcgaggcaggagacagaatcactagtgtggagaccatggttcctctctgatggggaaggaaagaactgacagcggctgggattttgagcagcaggtgggtggacagaagggggtgccttcagaatgtggatgactggtggggttccagggaggggctggagcttgtggggtgcctgcagagtgggtggcaggaggagctgagtcatggaggaggtaagcagagatgcaggtgtggaaacagcaaagagctaagagatgagaagatacaaagggtctgggcgagcagggaggcagcagaaccatctacttctctcgcgctgttttcttggtggatccagaagctgggtcatttgctacggtgagaagcattgctacgatatgcgtgtatgcatctctgcaaaattaatatgctgaagcctaatcaccttggtgatagtcatgaagtggggactttcaaggtgattaggtcatgagggctctgccctcacaaaagggattagtgcccttgtaaaagggctagagggacatgagatgcccttctgtctcctcttccatattaggacacagcattcctctctctcttctccctccaccatgtgatgacccagaaacaaggcagcaccttaaaagcagaccgtagtcctcaccagacactaaacctactgccaccttgcccttggacttcctagtctccagaactgtgagaaatacatttctattgttaataaattacctggtctgtggtattctgttatagcagcaggaatggactaagacaggcatgactggaggtagtgtaaagagaaaggtcaggttcttgtaacagccgctacagggaaagtgagctgatgaggagaaaggaaaatgtgctgagcccatagaagaaagcaggacagagccaaggctgtgtgtgtgtgtgtgtgtgtgtgtgtgtgtgtgtgtgaaattagagaggacagggagagagagagaagataagtcgataaaagaatggacggatggatgcatagatagatggtagctatggaaacaatatgaaaatacactaaaatatggaaatatggaatcatagctgtctctgaggggtgggatcatgagtttttaatttcagtctttaataatgttttgtaatttccgaatctcctacaaaggggatattttattagtgagataaaacagtccaattctacgtttagagataattgggcacaaaacccaaacaaaattctgagcagttctgagcgtccaacagagactgaaactgtgcatttgtagtggagccagccagcaagtttgtgtagccttgttcagctaccctcagcagcccagcaacaatgagcttggaataatcaccacgccaaggctgtgcatctctgaaacactcagttcctgtccagagccctgttgggtgcttcatgtacatcaccccaccaccttccaaggctcacattgttatcacaccaattctcaggtgagaaagatgagtattgggttaatgaactcccttgggatttcacagcagttcaaaagtggtgtcaagttggcctcaccccagccccatgcatacccttagccccatctgaacagtgaaggactcagacctgggtaactgggctggagtgggtgatgctgagagagggacttaacctatgaggagaggtcaggctgaagacccagtagggccaaaagagaagcagattttcagaggatccctctgacctcagaagtaaatggaaatagtttcttttgatagcaacaggaggcagccaaatgcctagacagatggggtgggtacccagtgaagccccacctccaagctgaagacaatttaaagcctggaagctaaatttaagttaaatcctcagactggattgagaacttgccttccttctgattgatccccacccttcacctattttacatgtgcctaccctttcctaattggttttctacactgttgtgcccaccattgagtggtgtcttcactttaacctattttgcatgctcacaaaccaatcagcatgcacttcccatcctgtgcctataaagaccccagactcagttggtagatggggagatggttggactttgaggagacggacttcagagaagaggcgatcaggcttcaggaaagatggcctgccctccctgtcccctctccagctccactctctactgagagccatgttcatcacttaagaaagttatccggcttcaccatccttcaactgtctgtgcgaccaacccaacctcattcttcttggatgccagacaagggctagggacccactgagtatgggtacccaaaaaggctgttacacaggccctttgccctcactgacagagggcaactgctctgggcactgccacaaggggccaactgagctgctaacacactgccatctgcagacagtggagctaggacagcaccggaacacgccacctaggcaccactgcaggccccacacagagcttgcccctgctggcgtccagaggagctgactggatccctcacccgcttgttcacacactccctcccacaaggggttgagcacatggactgaataaacagggcacccctgtggtgtgtccagcaaaggggccaagaagaatactgcatcaatttaacttcagccttagtatcatccttctgcattcagctacttgctgataaaaaccagagggtgtactgacttgtgggaacattcaagtatgttcagagctataaaaatcaggtgtaaatatcccttatattagtggtttctgactgaggaaaaatccgtggttagaccccattcctaaatgctaagataatgctaagaagatcagaaagggaaataattcttatacatggtcactgctttcaagtgagaactaaactctgacctttttttctcttgccaaaatacatatctaaggcacttggggagtcacaccctacaaaccataacatctcattttgatgggcttttttcttaacccgatatgatgtgccttgctctccaacctcactctggtacagcatcacatggcagacaggaggccctgaaggaaatcaaaccatgttatcccaaaatatatttctttgacatattttgaaatggctgccacagggctaacagattggaatatcccccacaaagccaccttttgtggggaaaattttcatctgtagtgcatctccattcatgcagccaggtcttccctttctaggcctttcccagatctaggagagattaactgagagcctgacacctttaaggtctgagaagagacattcaccatctattctctctgagggctgccacctatgagccttcctctacataacaagagccttagccccacaacccccttatcttaactcaggcattcctttccatggacttcaagtctttagataatagcttaactctcaacaaactgtcaactaagaaatctctaaaacccacctatgacttgcaagccccatggcttcaagatgttcctcctttcgtggcacaaccaatgtataccttccaggtactgacaattttatctgcaattcacatattgaaccaaactgtaaaaccaaactgtaacttaacggcctcaggagctcttactcggcaccatggtcactcctattggctaagaataaacctgtttaaatgtattttggcagaatttggttttcttataatcatgaggctaacatcttaccaggaacaaagatgacaaatacaaccaaagaaaaatcacatgaattttaactgcatgatgcaatagaaacagttggggccataattccatcaaaacataaatgtgtccttaataaaaatatattaaaaatataaatatatatgtagaagtataaatagaggccataaacatttcctggaaatagtcaacagcaagttgagcattagcctagatgaaacccttaatcctttccaatttatggcttcaaaaaccacgggaagatttgcagtttcctagaccactgagttgtaccctaaaaggagggtaaatctatatttttgtactgcaacaatgaaaatgtttattcacgctgatttattctatctccagaatacaggaaattgaaaatgaatgatgtggggcaggaaagggagagtctgacagcctaaagtttaagtcctgctttcctcctctttaaaataaggataacacgagtacacaccttagtggattgttttgagtaccaagtaaaactgaaacggcctttgcaaaaattgcaacagggagaaaacttatgacagtgaaagagttctgacctcaccgactccatcttgcttccaacctccaacctgccttcttcattcctgggagtaggcagaactaacttagggagaaacttagtttatagtttaactttaaaataagatggataacagacctttcccaaaacaaacccccttcttgcctggggacaagactgcctttgtaaaactaacaaattcaccacaagattggaaattagggtttaggagtcatgcagaaagaggccaaaagattctgaacctccccaattgctcttatggataacatcactattgtaaaacctaagattggtgttcaaggtatttttcaaaccctgcattctaatgcatcaggtggcaccatccataccagtaaactgagtcaaccagttcagcaatcccacccaggcacagaagacagcaagaagaatccacttcaatcacctatgatctcatctccaagctgaccaatcagcactccccactctctggtcccctaactgccaaattaatcctttaaacactccagactctgagttttcagggagactgatttgagtaatgaaactccagtctcccttttagctggctctgcatgagttaaactctttctctattgcaattcctctatcttgatatattggctgtatctgggcagcaggcaaaatggacccattgggtggttacagttaggtcagatctttttcaccgtcataattttcttactgtcataatttttgcaaaggcagtttcagaactatgcatgtaaagttctccatacatcaaataaatgttggcctaaatattttttaaacaggaagcatgtagaaactgagaaggaataaactgcagtgtttgaatatttagataagttccttttttcaaggctcatggaaaatttgggaagcagcttgaaaaagtactcaaccagatcatgactataatgtttattcagactaataaactgcttaaatgttaaaacaataaatcccaaatgcaaagaacaccaggaaataataccattatgaggtccgcaatagctatttcttgcaatctacagaagatgcactataaatatacaaagtttgatgacttcaaatttttaaatttgtggtaaacaaaggtgtttttttgtttgtttgttttttgagatggagtcttgctctgttgcccaggctggagcacagtggcgtgatctcagctcactgcaagctccgcctcctgagttcatgccattctcctgcctcagcctcccgagtagctgggactacaggcgcccgccaccatgcctggctaattttttgtattttttagtagagacagggtttcaccatgttagccaggatggtctctatctcctgaccttgtgatctgcctgccttggcctcccaaagtgctgggattacaggcgtgagccaccgcacccagccaacaaaggtgctcttaaaaatgggtttggccaagtgcagtagctcacacctgtaatcccagcactttgggaggccgaggcaggaggactgcttgaggccaggagtttgtgaccattctgagcaacatagtgagaccccgtctctccaagaaataaatttaaaaaaattagccagcagaggtggcacacacctgtagtccccactcctgggtaggctgacttaagagaagcatgtgagaccaggaattcaaggctgcagtgacctgtgaccgtgccactgcactccagcctgggtgacacagtgagaccttgtctcaaaaaaaggggagggaggttcaatttcatttatctttgtaaatttttttttgtttgtttttggttttggttttagttttgccttttttggagacagggtctcacttccgttgcccatgctggagtacaacagcacgatcacggctcactgcagccttgatttcctggggttagcttatcctcccacctcactctcccgagtagctaagactgtcaccatgccctgcttagcaattatttttaaataagtacattcctttctctgattataaaataattactgtttattgtagaatgtttataaaaagtaaagcaaacaaaaccctcactatcttgagataaggattgtgaatattttggtgaattgatttacaagattgtgttgcacatatgggttaatttaatatagtagagatcatgcttatattgaattttgtgctgcatgcttcacattatgtaaaatttcatgctgaacatctttccacattcaaaatcctttaataatcactttattatgtgaaaatctgtctgatatatcataatttatttaacccacctcccttttaactgttgtaaataacataatgatgaacacctccatagccataaaggcaagtttccacattattattttgtaggatgcagactgggggtgaatgcacattttatggctatgatcacatggaaaaaccctcggtttaggccaggcatggtggttcacgcctgtaatcccagcactttgggaggccaaggcaggcggatcacgaggtcaggagatcgagaccatcctggctaacacggtgaaaccctgtctctactaaaaatacaaaaaattagccaggcgtggtggcgggcgcctgtagtccaggctactcgggaggctgaggcaggagaatggcctgaatccaggaggtggagtttgcagtcagccaagatcgtgccactgcactccagcctgggtgacacagcgagactctgtctcaaaaaaaaaaaaaaaaccctcggtttctgcatacctgtgtacttgtacctgttggtgcctgtatacctgaatggcctcacaactcaggcacctgctaatcagctcattagacagaccaaagagaaagctcattattgttttcatttacattttttatttccaagcacaagtaatctgcatcattgtttttttgagggttggatttattcttatcatagcattctttttatattatggttattaaacctctgactaacgtattttggcaagttagttttcctttctgttatttgcctctcatctcttcgttactttgggatgtgcacgttttaacagccgtcagatacagatgcatattttcacagtggtcagatagagcttgcctcctctgtcaggccgcgtggtacaggtgacagtcccgagctgagctttgtcactctcagcagaactcacctgcctgggcttcagcctccacacttgtaaaaaagggagccagttgtcgtctctcatttccctccagctccggaaagataaactgtctagtgactcagtgcaaggcaaactcagttcatccttcctaaacttcataaatagcaaatgttgccaataaggattaggtgacacataaaatcagagtctctcagacaacctgaggggcatgatttgtttgctgcaaacttacgatttttccttaagtaccttacacatggctaacatttgttcattttactttgcctatcctagaacaggagtcttcaatccctgggctgtggtctgggaccagtccgtggcctgttaggaactgggccacacagcagcaggagagctgcaggtgagtgaacctgactgcctgagcttggccccctgttagatcagtggcagcattagattctcataggagcacaaatcctattgtgaactgcacatgtgagggatctaggttgcacactccttatgagagtcgaatgcctgatgatctgaggtggaatagtttcatccccaaaccatacccctcccccaatcgcccatctgtggaaaaaagtgtcttccacgaaacagatgcctggtgccaaaaaggttggggaccctgtcctaaaacacaggattaaaataaaaaattcttgtctgagttttgagatccttgttgatctaagtcccaggaaatgatgtttcaaatagagactgaaacagcaataatgatgctttacctagtagctccatctgtctcagagtgaaaagtagcacccttcctttctgtatttaggaagaagagaaacacaattcactatttggggaacttacggtctttattatgttcttaacctttttcactgtggtctctgggaaccaattctctctccattcatcttaactcacaccagaagtgaccagtttcttatgagcagatgaccttaagacccgcagcatggacttcatttggggttggccctttgtcgcctgaggagaggcttatcttctttagtgctttatttaatggaatattcttcacctttgagctgttagtagcaaatggtgagtggcttctcgtcaccagttttcagactatttcagagaaaactggtgatcaatggttgataattctctgacttgaatcctaattgccaaatgcaatccaaagttattccgacaatgaaacattaacacatgaatactcacttgccctagtttagtaacagagacctgtacggtctaaatctacggatggatgttaggtgacaagttagccacccaatatgctcaagtgtaggtaaaactgtatttattttctaaacacagtgagctgaagaccagaaaagggaatgcatggtatgtctcagaccctgtgttaggtgctttatatatgtggccttgttgaattctcacagcaaacatgagaagcagaagtatcatctccagttcataggtaactgaatttcaaagggttttattcacttaatgaaaccacttttgcaaaaattatgacagaaaagtctgacctaggaaaattatgacagtgaaagaaatctgacctaactgactccattttgtttctaagctctaagttgcccttggttcattcttgggcccagcctaactaactttgggaggaattcagcttatagttcaactttaaaacgaagaagataacagcccctccccaaaacaaaccccgttcttacttggagaccagactgccttcgttaaactaacaaagtagccacaagattagaatttatggctagggagtcatgcagccagaggccacaaggttccaaacttggccaattgctcctacggataactagtaccactgtaacacctaaaactgatgtttgtggtatttttcagactgtgcattgtgatggaccagctggtgccacccagaccagtaaactggtttaactatttatgtgatcccactcaggaatgaaaaacaagaagacagttttggtccctatgatttcatccccgacttgactagtcagcattccccagccccttgcccaccaaactatctctaaaaaaaaccccagccttctaattttttaattgtggggggaggctgatttgaggaaataataaaactcctgtctcctgtctagcaggctctgtgtgcattaaattctttctctactgcaatttctgtatctcaataaatcagctctatctaggcagcagtcaagaactcgacgggcacttacattgttatggccctaatatgtacatactccagcccatacacatctgtctgattccaaagaatgactctgactatgcagatagtcatagttctcataatcaactggatatctggaggatcccagtgctgccacacattcatctgcatgtgcattttcccttctgatggtcaggccttctgttagctgctgctgcctgaagtgtacattttaaagggattcctccatcattcctgccaatactgccatattatttgcacgaggttccctgtccagcatttgcaggctttgtgtaggtgctcacacatctgtgatgtaatgctgatttcctcacccatagtaattgacatttgaatggaaattggccattttgattgcaaacattctggaactgctatgttgccaattgaaacggaaccctcaaaaccattattcaacaacaaaggaagtcacaggatacccatttggatgataggtcataggtgagaatcactacgctaaaataaattgatcaaattgttcctacaagcaattccatttcagtccctggaatttgttttcactttcctattcagccacatgaatacagaggctgcatccactctattttgctcttgcgaccaaggggtaaagacggtgccttcagatgcctgtgatggctcaggaaggggcctgggaggttgttggaggcagccatggaaccactgtcaatggtacaagtcatgcactattctttagcttgttgaagtttcattttctgtttgaaaaatgaaaccaataatttatctaaaacaagttaaggctgggcgcagtggctcatgcctgtaatcccagcactttgggaggctgaggcaggtggatcacttgaggtcaggagttcaagaacagccttgccaaggtggtgaaactccatctctattaaaatacaaaaattagccaggcgtggtggggagcgcctttaatcccagctacttgggaggctgaggcaggagaatcgcttaaacccaggaggtggaggttgcaatgagccaagatcgtgccactgcactccagcctaggcgacagagagagactctggctcaaaaaaataaataaataagtaaataaataaataacaggttaagtatcatgatgatggcaaatggaaagctgaaaatcttgagactattttcaacaaacttgactgaaatataccattttccaaacaggttcacctggtagtctgaatagagagtagaaagaggaagatggaaatgaggaagaaatacatgttctttgtcaagaaaggagtagtttattagcataatccagcatgttcctggagagcaagcaccatccaccatgagcaccggcctgcactgggccacccatggggaggcacaccagaaagttacattgtaaaagcatcttgttgccagtattgtcaggaatcatggaggaatccctttaaaaagcacacttcagggagtggcaactaacagaaggcctgaccatcagaagggaaaatgaggctgggcgtggtggttcacacccgcaatcccagaactttgggaggccgaggcgggtggatcacaaagtcaggaatttgagaccaacccggccaacacggtgaaactcggtctctactaaaaatacaaaaattagccaggcatggtggcacgcccctgtaatcccagctactcaggagtctgaggcaggagaattgcttgaacccgggaggtggaggttgcggtgagtcgagatcatgccactgcactccagcctgggcgacagagcaagactccatctcggaaaaaaaaaaaaagaagggaaaatatacgtgtaaatgtggcgacactaggatcctctagatactcagttgattaggagaaatatggctatttccatagcaaccgaatgtgtgtaataaacagttttgttacattgtagttaaaaccaccggatctcagatggtgagggatttctgaaatcccaagtcaatttcctcgtttctctcctctaagcttctatatatagaggataaatacatcagagttaatagttgcctaatttagaatgaaaagcaactggcaactgcccaaaatgctttgacagtaaggactattccccaaatctggcgaaagtccaggcctgtttatcatacagagagaaccaccaccacacagcagccagattctgtgggatattttggggaaagcacccaggatacggacaacttgggttgtagatctggttttgccttttctggtcacgactcttgtgagcctcagtttccccacctgcaaagtgagacagaacctgctaggtacaccacaaagatctgttacgatgttaaagtgagatgccaagtgcccacatctggaaattataatgaattataaagatatttgtttggtttgggggggcaaggggttttgagacagggtctcgctctgtcgcccagggtgaagtgcagtagcgtgcactcatggctcactgcatcctgcatgcaccactgtatctggctaatttttaaaattatttgtagaggtgtgggggtctccttatgttgcccaggctggtcctgaactcctggactcaagtgatcctcgcgctttggtctcccaaaatcctgggatgacaggtttaagccactgtgcccagccaagaataaaaaaaaaattaaaagaaatatttcctcactgacaattagtgtaggtaaaaacaggcaaattgagtagtttgagatagtcacagtgaaggagactcatggttcctaatcaccagctgaattctcaactgaattctcaacactgacatgctcaagagaaaactatgacatacccacatacatgcacatgcctacacatgcacatacacacatgcatacaaacccacacacaaagcacatgtacacgcacacacacgcacacaattctttgcctccccttaattatttgcaaactcttaagtatctaacacacttggtatctgagagccaagtcaaattaaagtttcctttaattctgagcacctgtatgcaagacccctgctagatgtctacacgaggcatcccttttcatcatcatattcactcgtcagccagggaacatttacaaggtgcttggggaacgcagacaaaagcagcacctctgaactctggagtggagcacagtagcgtgcagggaaaggcttacacgcacaagagcaagaaggggtttcaggtatggtgagggaaatgcatatgggatgcagagaagatgagagtggggatcggaaggggtcttgcaatgaagtgaggggacacccaaggagatgcaagagctcatcccaccagaaagagcccagctaagcagggggaaagcaagccaggatgtgaacctggacccgcatggaacagcgtcctcccagtcctcaggccgaagtactgcctaggaaggaatttggctatgtgagtgctgagctattaatatggttgttatgtctgacgtgtagctctgattgccacaaaccacatgaaaaaaaatgttgcattatataacagacactgagtattcaattaaacgcagccgagatagtcaaattaaaatataacccacagatgactcatctccactgtacttcctaactttcctcagatgccatctttaataaccatcaaaacacaatccctttgaatgaacggaggctttggaacctgtgcagtgcatacaaaggaagtatgtttaccagaaatatatcttcccagctgatctatacttatcctctttcatctttatccacatttcatacaaagaaaataggcattgctgttaccacagaaaagcatgaatgctacaattctcaaagattctgtgctttcaaagatagctctaaaagaaccctgacaggatataaagggttaactctctattgggttgggcagaaaagaaggtttatccaagggggtaagctcagccatcctccctcccttccatagacacatccaaccacgactccctcactggattacgctgcccagttcacagccaggggcatttccacagctgttaaacctgcatcaggaaacaaacggccttatttttagctttcagtggtttgtgtaaaaccccataataattaggcctcattactctgtgcagctccatgccacggtgcctctgcacagatgaacagggagagctttggccttagaaaaaaggtgcccacaaccctggtccttgcacgcacagctcgccccagcaatcacaagagaaaggccctcacttctaatgcacagtgcacaggcgtacctttcagggcagtgtcattacaaccccaacccaaatcagatcaagaaaggaagacacagtcacatgaggataggaaaagcattaccaggaacacagaggcaactccaacagacccaacacatcttttagtgttagcattcttcatttgctttacagttattttaaagtaattatagctttacaagatgttgcaaatgtttaaaagcccaggatggttccacataccccatgcccagtgtcccccaaggctgtcatctggcataattctagcacaatatcaaaaactaggaaatagacattggtacattccacagatcacattcagatttcagcagctttagatgtaaacgtgtgtgtgtgtctctgtgtgtagttctgtgcaatctcatcacatgtataggtttgtgcaaccactacagttgagatacagaaccaatcagaaccgttcattgtgacaggcctgcctcgtgacccccttcatagccacatcagcctccctcctctctaatcccaaccctggcaatgactgacgtattcaacttttcaattttgttatttttaggaactttatatgattttctatctaatagctctacaaattactaaaagtggggtgctgaaatctccaactataattgtgaatttgtctgtttctcctttaagctattagttttggtatcacgaatttcatggttttgatgcacgcatatttgggactgctatgtctaatcgctacactgatgttttaaattgtgatgtgatgtccttcttttcattgctctttaatctacattatctgacatagtcatgcctgcttttttaaaagttagtgcctgcataatacatcttttttcatcacctgactttcaacttacctgtgctgtcatgtttgatgtgagtttatcggaaagcatgcactgaatttgcatcctagtttttattcattctgaaaatccctgtctttaaattgctatgtttagaccttttatatttaaaatagatattttaatagccttgagaggtcaaggctaaagcctgccaatttatttcttgttttctgtttgttccgttttctatacctctgtttgcttttcctcttgcattcttatagatcacatgaacatcttttggaagtccattttaatttttctatagtgttttccattatatatttttgtatgatttttagtgattaagttttaacatatatgtaagtcatacatcagagcctactggtatcagcattttaacacttcaaacaaaatttaaaaacttgtcctctattaagtccttttattctcccatcttttaaaatagaaatgtcttaagaatttcctctacatttttttaatagagacagggtctcactttattgcccaggtgggaatgcagtgctgatcatagctccctataacctcggactcctggactcaagcgaccctcacctcagcctcctgagtagctgggactacaggcatgtgccaccatatccagctaattgatttttaaattttttgtagagatggggtcttgctatgttgcccaggcctcctctacattcactgaacactacatcagatagtaacgttaatttttgtttcaatcttcaaacatacttttaaaaaaactcatgagaggggcagcctattgtatttatcactcatttactcataccatgttcagggtgttttagttgtggacagggcatgggaggaagagggatacgccatgttggccagaattacaagcctcatcttcacttataacttcattcagtcttgactgtgtatgtttcacggtggaaagaaatcatttttttgcatattaaaagcaatttatttatttatttttaattattatgggtacctcatagttgcatatatttatggggtacatgtgatgttctgatatagtcatacagtgtgcaatgatcaaaccacggtaatggggtacccatcacctcaagcccttatcatttcttttcttttctttgtttttttttttttttttttggtggagtttcgctcttgttgctcaggctggagtgcaatggtacaatctcagctcaccgcaacctctgcactgccacctcctgggttcaagctcagcctcccaagtagctggggttacaggcatgtaacaccacgcccagctaattttgtatttttagtacagacagggtttctccgtgttggtcaggctggtctcaaactcccgacctcaggtgatccacccaccttggcctcccaaagtgctgggattacaggcgtgaacgcccttatcatttctttgggttaagaacactaggaacattccaattctactgttacagttatttttttaacattttaatgtatattttatatataacattttatattttagcattttaaaattaaagtatttaaaatgttaaaatacaaaatacattatttttaactatagtcgccctactgtgccacctatcactagatcttattcattgtatccatctgtatgtttctacctgttaaccatgaccactttatccctcactctctgccactcttcccagcctcaccactctactctctctccacgagttcaatttcgggggaagaaatcttcaagatcatagaattaaatactctcatttaacaaatgcaaaacagaatcatcatgcaaaattgcaaaggtagcagagattaccaaactgttatttgtaaggctggatgtaaacataaaattaaagaaccaagatttaaaaactaaaagtatcttttaaatagctgtagtaatgacagtaataatagcaaattaacgttttctttttgatatttaccctctggtccaccttaagtgacattccatttcccatgcatgacaagaggaggaataggaaataaggcagaaaaaggagctggtgtcaggtaaaaggagaccataaatgctcatgtgggcactcatgttggaagggctgggcactcccgacaagtcatttcatctttctggggcaccatttcctaatcttcaaaatggaaatgataaaacctcatctaactgccatacaggcttatgtgttgttgttgttgtttttcttttcttttaaaggtgctaatgagctacttcatatgacagcaataggaaaaactataaagttgtacagaagaaaaagtataaacctggctatttataatggatgataacaataaaaagtgtgcatttgtgttgaaatggcacgtgtggtaagccactgagacaagtaggtttacaagtataaaacctttctcaatctcagataatccaaagtagaaaccccctgaccttagactgttattttaccaagcacacgcacaaacatgcacacacagaccagctttttagcctgaagccactgtctaaaggaaagcatgcttacataagtacactagcactgaaaaatggcctctgtgaaactcctcaataatccagccaagtgtgatgctatttttaggtttcaggggaaatgaattgttcagatgaaagcattactccttcattctacccaagtaccatattacttatggtcaaacaatttttaaggcaccaactgagtagtgtatttctattgcttggcagatgggaagcaagaacagaatatttttattgtgactctttctgaaaagtaatttgtcagaggtaatgtactttccactcaccagcagcatacccggcttcttgcacgcaccgaagtcactcagcgtggtgaagtaaggggaggccgagggctgcagtgaccctgccaggcttgtcacgagccattggctgctctacatgaagcagttcagaaactacaggtgaacatggaaggatacgaaatggtctgcaagccactgagagcctgacagtcgttacttgtatggttaatcatcagtgcatgtcaaatgcagggcagggcaggaactagggaggcaatctagtgcctcttgcctcttcagggattcctatgtcacctgcaggactcaggatatctacgggaatggaggcctggggcgccccctgccttgaaagaggaaggatttgtgcagaagcaatgttccatggtcctaggacacatttagccagagttgctctcaaagggaagacttgtcaggaagaagaaacatgaagccagtcgcttcacggcccaggaagcgttgagcaagaaggatcagggctctctgtttccactacagccacctctagatctgaacactcatctctgccttcttccagggaggcaaggagttatccatcccttctgaaaatgacctcagccagcacaagaactggtgcccacccccgtgcacaccaattgcaggggttaggtgcttttggtgtgaaaataacaggacatggattgattgagagcacaccgctccataatacatgaatatcacctcgcttcggtcccgaacgcatcctgtattactgtctctgttctacagtgaaggaaaacagagggtcacggttgcaggtttcacacctgggttagggcgcagccacgattccagccaaagtctccaatgccagagcccgaggagtgaactgccaagcagcagagcctcccaggacttgtggggaccatagatgttggcagtggagttttcttatttctagtaggatctgggggtgacacagtccgggacattttcatccgccccctttcatcttaactgctctgactaatgcggccaccggatggagtgcaccagaagaaccagttcaggatggtaaactcttgtgtgacacagttctacctggagcatgtgaactccaaaggcggggtgctagcgctggctgttttaaaatgcatcagccttctacaaaaggtgtggtttaatcaggtttattttaaattcttaaattcataatatgttctctttggtattaaaaggtgacctccactaatcactgagttaaaacaatctaacggtaattccttctgctgtggtctcaggcactcattcccagagtaggatctccagaccggcagtatcagcgtcacctgggcacttgttagaaatgcacattcttgggcctcatcccagaccagtttattcagaaactctggggctgggatgcagccagctgtgtcgaaacaatccctccacgtgactcagaggcatgctcaagcatgagaaccttgggtctgcaaatcccgtatgaagtaggaagtccagatgcaagctcagagcagcaggccaaggacttgcatttaatgcactgtagtgaggttggccagagaaataaaacaatcaaaacgaggtttgaggaagataattccagaaataggaaacaagattccctgcgtaacaccctgcgtaacagtggttttaagaccacagttgctggagtcacccagacaagagtcagagtctcagctttgctacttccttataatgcaggccattctccatgaaccttgattatcttccctatagaaagggaacagtaacaggacctacctcacaggtttctttgcaagcaaggaaataaagaatatgcctactcaaaatgaatacaatttacttaacttagcaaagtaaattggaattaagatattttaaggtaaatagtgttagctattttagtgctaatgtgctataaaaaattaaaaatatgaaaacaagatttgatactatgattggcagaaagcaaatattctatgactatcatttgtataagctcttactacatgaggccgggaatgcctgcagcccctgcctagggccgaactgactcagtcacaccaaggctcactcttcttttgagaaccctcagcctcatacatacagttttccctttaccttggatgtcatttatgtgtttttttctgtcaattggcctgtcagctcttgctaagagcatgtagtccctaaatactccctcttttctatcttttcttgagaaagttatttaatcagtggtgttgaagaattaatgtgtactccacaaaataatacatagctaagattaaatcatatgtaaatagagttccctaatcaaggggagtaaattgtatgactataacatctgaggaagtgagcagcaaaacctctctatgcaaaaactgtacacattaggccctcaaaatatcaagtcccatactccccaaggttgtagaggactatgatttaagaagcataaacaaagtttaaatgaatgcatgggtgattgattcataaatgaacatattccctgcagggtacccttgggtgaaaagcaaggctaagattaatcacaccatatcgaacacaatgaggatgactatgcatccagataactattgtacctgcccctccgtgatggcagctggaaagtcctggtgtcaaactatctgattccccagagtaaggctcactgctttccataaacagccccacactccgtctatctgtctgtttccctcttcttgttctgtctcctttcttggtttatctcttttcccacctctcaaacccctggtgtatctgctctgtgacccccacagaatcctgccctttccttgccacaggaattttatctctttcgtttcagtgatgtccttcctacttagggaagtatctccaaaatttagacagcttggattaagtcctggctgcatgttcgctaagtgtgtggcatcccaaagctgcattttcctcatttgcttattggggattatgctggtatcttcctcgttgatgtgcagtgagcagtgaatcatataagctgtccaaagcacctagcacattgtctgccatggggtaggtgtccaacatggtaatattatcatttcacttccttaattattgatagttcacaccacaacctgcttttccctccaagaacgtggtggcctgtaatcttgggatgttctcatcacccacagcctctttccaagactcactctgtctctctctctctctctctccccacccctctcctttaacttgcactccctcagtagtcctcctattctgacataaaaatgtccctttctttgaccttttctcttggctacttaaatactggtccaagacttcctatttctgctgtctttcctttgctaccttttccttccatcttctacaaccaccatcacccactccctgtaagagctctgagttgtttcaaggttcttgttttgatcctgatcctttctctcttttgggtcaagttaacctttcctgtgattccctttctcaggattgggtgccactgccttttgggcattctcctgatgccgtgcactgcacctgcagtatgtgtgtctgaatccagtgtcacttccagagaggccctgtccatcttccaatgcacccctcatgctgtgcaggaggtcacagtcacggtcacgggcacagagccacgtgaagggagctgctcgagcgccccggagcctcacctgggaggagacgcaagaagtctcccggtgcgggagcctacagggctgagcgcggagaccgctacgccccaacgcgggctcaagcccagcgggtaagcggggcggggcggcgagcgggagggaggccaggcagagatgtgcaggatgctccaggtgggcatggaggggcgggagaggtaagggtaggcgggaagaggggcccgggacacagtctgcagcagcagggcagggcacggcgcactggacagacccggtccaggcactgcagcatgggctccgggaggtggcaggtgcaggtctgacgacagcagggtcgtggctggctgcggaggggcgcgggaggctgggcgcagaggtggccgccaaggcgcggcttcggagcacggcctgggaagggaggaagggaagagaagaggagcccaggcccgtgccgaccgcagctccacgccagctctcgagccgcgcggccgtcacaggagcccgctccggccgggctttccataccccggctgcagcttttcccataaatatcgagataggaaaattacaattctgggatttgggaggatgatactactgacactgagaaaattatgaagtgtaactgtactttgagcaatttgatgagattcatatatgcatacacaagacacaagctacaacttgtaaaaaatttaaaactcgcttttcctatgcctctttctttcttttaagcccttgccttttccaaagaccattcatagctaaacatccttatcacacagctactctatgagatatttactttttaaatagttttattttatttttatttttttcagagaaacgtcgctcagttggagtgcagtggcacaattacggcatcaacctccggggctcaagtgatcctcctgcctcagcctcccaagtagctgggatcacaggtgtgcaccaccatgcctggctaatctatgagatagttgactgctgaggaataagccctacgccacttaaggaagtaagaaatactgtgatgtgtaaagaaatgacaacattatgccaatcaagaagagaaataaggccttttatttccaaaaatgtcctcagaacagaagctgaataactggtcattttcctttcaggttcttgattgatttaaaattttttccatgataaaataaattaggagaaacttccatcactaagtgatttgaaataaacagaattcattatgctactcaagtatctggcaaatttgtagcaaactccaaattcatttttcaaatatgtctaagaagacatgccagagatggccttagttgtaccacagttgtgccggaaggacaagaagaccagctaagattggagcagggacacattcctccaagttcccagatgaaaccagtgccactaaaaagagaatctctgggtgagggcttcccgtttcgagagtgctttaaacattcatcaagagaccaacagaatctataagggagttgtgtgctttataaatgctgggggtgctttatggatgagtcgtattaaagaattataaatttcttatttgattagttggggtaggctttcctgctagaatctcagactgattttattgtgcttcatcaattttatggttgacatgttttcaatttactttgtactattaagaagctgaaatgagttttggaagtgcataatcaagcctttcctcccctccccagtgccacggggggacaaggtggtgagggctctgagcctgctgagcagaccacacgcagggaattctgttttctctcctagtcactgtctcaaagagtttgagctcatttgatcccagggaaaaagttacttgtcattttcacatctataagtttgctaattcactttgatatatatcaacaaatggtttcactatagaaacaatgggtcataccgagaaaaatttggaataattaccctgtatccttcttgttttttcttaatgtttttctcttttcctagagttttcttttccctccctccttttctttgcgtgcttagaactttacaaactgttggaaggtccagaacgtgccacagtgacataggattattttgagctgaagacatttgagaatcaaggaacgcaggaagaaactttctctaaattctcatttttgcccagaaaagggacccttcaaaaagacctcaactgtcataaatcccatctccaggcattttataaccagggaagattgactgttatcacaagagagcagagaagtcagcgccacacccagacatcgtcacaagccaccacatggcccatctgtcctcctaagacccacttatagttcctgaagatcatctgctcttccgtaaatggagtttctccctctctctttcccctaagaagattggtatcagctctcaaatctcacctctcctttgcgtattcacttctttccatgatgcccctatgcacataaaatttagcagtaataagttagtaggccttttcttctgttcacctgtccgatgttgctttaattcacagccctccacctccagcccctgaacctaagagagtggagaaaaaaatttttcttccctacactgtccaataccattgatttcttttcttggcgtaattctccatgtacacacacaaattaaagttttgatgatgggaatgtctgtgggctcaaacatcatgatcagagcagatgcgcaatgtttacaaggacggatgaaaaatatgtgatggaggaagaatgataaaatgccattaaagagagaaaaacaccaagagaaaggagacagcaaaagaaaatgtaggcctgttggggttgaataactacttatttcatggagtcttaaactcttgtttcataaaaacattacaagcacatgtcatacttacttatcaaaagccaatgcacaaaatggaaaaacttgcattttaagcaaaaatcagagtatatcataatggagctacaaattgacctcctatcgtgttttcctggggtcactctttctgggactaaattccaaacaagccgggcacagaaagtgggcatttcttaaaactcaagtaactcttgaaactcaacattcattaattctgctagaaaaaagttgcaattgtaacttccttccttccttctttccttccttttttcctttctttccttcctccttccttccttcttccttagagggtagatgcaggcaacttagtaacaaggcttattttaacacattgttttaaaccatagatgagtgaatagctgagttcagacttcagcttattcatgttcttcacattctctctggaaagtgagttcttgtggccactgcatttatctctattacttaccggacaatgtcagcagctgtacctgttcacctaaaatttcgcttcatcccctaaggtacttggagtatagtaagatagaatggtaacctcaaaatcctggccatacagtgacactgatgatacgaattactcttccattcttagccatggagcaaagaccctatccagcatggctgtgaaagcagtgactgtgaaagccaccagaagctccctcattcagagcaaatcagacaactacgtgcatcacaagacaaaggtcccaggcaggaaggagaagccagccccaaatgccactcttcacggcagatgcccatcacgcataaatctagaaatgcaccagagtgttaaaaactttgtccaaagcttttattcttggaatggaatagagctagaatgtgacaagttaattaatgacccattatggggaaaactccacattaaagcagatttctgtttctatttatatcttttaccttagcagtattgttatgtaagtcctctcttaaagatatatacgcctaacattgttaatctataaaacgtgttatctggcagcaaaagccaaactgtttcaggagtgtgtacattaatgtattaattcaatcaatcaatcacatatttaacccccccctttttttttttagtatttcctgagatggtgttttagaaaccatgggcagagctagcagggcgcagtggctcacacctgtaatcccagcactttgggaggccgaggcgggccgatcacccgaggtcagtagtttgagaccagcctggcccacacggtaaaacactgtctctactaaaaatacaaaatttgcctggcatggtggcaggtccctgtaatcccagcttcctgggaggctgaggcagaagaatcacttgaacccaggaggcgaaggctgcagtgagccgagatcacgccactgcactccagcctgggtgacagagcgagactcagtttcaaaaaaaaaaaaaaaaaaaaagaaaagaaaagaaaggaaaggaaaggaaaggaaaagaaaagaaaaagaaagaaagaaagagagagagagaaagaaaaggaaaaggaaaaaaaagaaactatgcacgcagcagagaggaatataagaccctgtacttgcggcattgaaattctagaaaaaaaataacaaacaaatccatatacatttaatgaagtgagggagactgataagatctatgaggaaaaacagagccatgagaaggggcaggcagggatgccacaaggcctctctggggaatgactttgagcagaaacctgagggcatgtgcccaaacgagacctgaaatcgtgaaattagaaccaggaagagtggctgcaaaattatgggaaaggatttcaacagaaatccttttttccaacagaaatcaccagttttgagaagggcaaggcttacaggatcaacaggacactcctgcataaatggaagggatggcttcattttagatgtactgttttctccttgaggtcaaggtaataacatatcaaataaaaccaagttaccacaaggagttaaccttatataatccaagcatctgccttccttctccctgagaaggtaggatcaaactgatcaagctagtgggccttcctatgaaataattacttgtggtttcaaaagtctcaggagtccctgggtctcttaatgaggaactgaatattaaattacactcgagagctctgggtccagttgagattgtggagctgatttctcatagcactgctatttctttttctcaattttctgaacaacaacaaaacatgttaaagatcttttgcagcttataaaaccaaagatttgatttggaatcagtgccctgttctactgaagagtggagcactggctcaaaagagggagctccaccaccttctgttcatttcacatccacactcgggcccttccaagaggacctaacccaaccaggaacccgtttaaagactggatgactctgaacaccccctaccttgtgtgtctgtgtgtgtgcctgtgcatgtgtgtgagtgtgtgtgcgtgttgggagtagaggtaagcagtgttaaaaatgactcatgacatttgttcaagaaaataaggcagactttattcagaaccattgagataggtataagggctattgagataggtataggaaccactgcagtggatcctgcagctggggaggaaggtcagactcacttcccaatacaacaaggaaaggtgggaatttatggcaaaagagcagaatgtgtttatgttggaggtggggggaggtcagtcaatagcaaaattactaggaggtaacatcaagggtaagggaggatcctggaaaaactgacctaactttgtttttgctaaagacaggccagggtgatcaaacaccaccaggcagatggtaaatgagaaaactgaacagataccgaagacagtcagatatccagggttgggggttctggtcgaaatgatttcgcagggttcttgctaaaagtttccaatgcagagatgaacactgacacccaaaggtcagggcccagttgagaagtgagttcagaaaggcctgattagagtttggtcaaggagagactctttgtcatcagaacttatgcagtattcaagtgtccttaagaaaggaattgagctaattaattacagtgcttaaggagtcaccactagaccctctatctttttgcatccataagcacagagcacacctttcaaagttcctgagttgttaagcaatgaattcttcagcacctgcttgcaactatttattttgtttcaacagacttctctttgtgactagcacttgattaagttacacaaaatcaaatatctgcggctccccccagggtttttcctcttctcttttcatttctgactgtggtcctgccaagtccctgggggtggaaggctggctcagggcattgtccatcaatctgtgagatgagagtggaccaacaaggagtggacaggctcccagacacgaaacagaacccggtaggactaaaactaccacttgggaagatcacagagactcaaggcactgcacttgtgtgtgtacacacatatacacacacaggtgcacaggggcagaactgccatttctttataagtgttcaatttcttatcagaaatggctcttaagttcaagctactaacacaggaagaaaagaacttagtgagctattctatcttgctatcttagatttcagtttcttaggcatacatacactcctaaattctccatgcttaaacatctccatcaggcttaaaatagatcagtcttaaataaatcttgttaattccatcatttacattacactcccccactaacagacctaagcatgaatgatgttaatcaaataatactttcaagataaaataaatgattatgatttccacatgataccagatattatatatattttttctttgaattttttctcccttagatttttaaaaatttatatagtgactttggtttaaaaatctattttagcaataatattaactagagaagtggctcatgcctgctcattttaggcttgtcttttgagtgaactgggtatgacaggtctgggacctgtgctgggaagaactcttccatgattgaaatggtagcacatggaataacatcgataagttggatcccagttgcctcttttgacctctatattacttttattctttggcctcatctaaaacatctgaaatttaagtcctttagatcaaaagggcaggactgaaaacagctgtgatttcagaggtaggaaggctgttctgccccccaaatacgttccctattagatgaaaggtgccccaattcccagttagaacacctttcccttcgctgatttcaaacatggactgtttaaatgcaaatatccatagaagagatcatacaaatcttgttcattcatttgcaatgataacttttaaagtcctctcattcatggacatcttagagtttatcacagcctttcctaaaagctggttttgggggagagaaaatacaggaagccaagggctctggcctcctcttggccatccttctccacccgggagacaccacatatgcactttacagaattctagggctcaagcttgaagaagataccacccacccaatttctggggatccagaagaatgaagcaaaggtagaacagctttccttacccattccaaaaaagggaaaagaaagacaatttacggtaaagggaaccaaaattacaatactacattgtgatatggaggatcagattattttttactatctctttgctctgacttcttggttatttactttgaagttaactcatgaaaatgctttaatagtttgggctcctgttttgttcatgtttaagggctatcatgaagttcccataagaatttgtaaatcagggaactaaaactgtcctcccaatttcacccagatatcagcacacaggagggcaacgagggcctccagaaacacatgaagcagcctccactacatctgtgaaagagaggtcaggaatttattttccaattaggcactgggggccagctctatctaaaactacgctgtgtgggcattttagcaatttgactagtgccagtaacaaatccaaagaaaaaacagagtgggtgtcgcaccaaagaaaggaaagcccaaaacaagagtgagagcagaaccatgtgagggctaggatagggctgcccccaaatgctcttgagacatcttcataagacccactcaatccttggtgatttttatcttcaccaaccacagcaacattctcattatgatttggcctctcaggaggctgactgcagggagagaatgagctggccctgtggacttctatgcttaggctgctgacaatttcttattctaaattaattgacacacattctagtgcctccttcaggctcccgacaatgttgttttcctggccttcagcaagcacggtgttactaacacacctgactgcagagtgcggggaagatcctggcaacagcctgcccaggccccgtgctcttccatgcttctctgtgaaccttactgcatgagaaagcacgagaaagaaagagaaagaaagccagagggagaaagagagcaacacaaggagagagagagaatgagagtgagagagagagagagaggcaaagagagggggagagagatacagagaggaagaaaaaccgagagaaagccagagcaagagaaacagtaagagagattctaaaggaaatatggatggatcgactctgaggtgaccatggctctcaacccacccaggaaggtgagttctgaaggacagccaggtatacactgggaagctgcttttctggagccctggttgctgggagcaaaaaggcaattgggggctggtgtttctctgtcccagatgaaagtgtacctcactgaggctgagttcagttcaagaatcagaggagcccagtgattgtaaaatttccattaagtgggaacccatgatatgttagtgtgagtttctatgaacctcaactatacagacagagtgggatagctcaagggaggctgttctctgcaaagacccacagggcagggtccctctaggcaggtctctatggaacaggagacccagaacctgcagaaagacctccagcatccgccccgggggcaccaacaaggtctatatcattggcgatgaaaccaacacttcagtcataccttatgggacatgaggtgtgggttgttgtcttttatttgaatgtgtaaaatcaaaatgaaaacattaactcttttggggggaaagtccctctgccctctggtacttgcttcttagcccctcactcactgagcaatgtggctacactgtccactgaaatctgtttctgacctccttagtgtaagcacaggctggcatctacctttctaaaatatcctccttgaactttcagaataaaacggtgagaatcgcactcacctgctcttgagaagtcgcacatacgtactagcatttcactctgatccggtcacacgcattgctctatgatgtggtgtctattatacattcacatcacaaacccagatgctcgtccctacctcaccccacctccctactttcaaggtcaggttgaccatttattttggaaaggaaatcatttttgatgatcacaatatcttaagttaaatattctctaatagagaatagcagagaatattagaactgaatctaggaccacccagagccagaaacagttccctccacaaaagcccagagccaatctcactgcttccagaaagcttccggagatgggggaatcagcctgtcccagtgagcagggcaacttgctcttccctgcatcagatgaaatgctgcatcctggggctgggacccactggatccacagcataaatctaactcctcactctctaaggcacttgtcaatcatatgtggagagactgagccctgatctgtggccaggttactctacagattaactttcttattagcatcttccctctatttctttcataatctggtgtggtagttaattttacgtgtcattcattttgttgggtaggctatggtgcccagatgtctgttcaaacacaagtctagatgttgctatggagctatttttcagatgggattaacagttaaatcaatagattttgagtaaggcagattcccctccacgatgaaggtgggcctcatccaatcagtcgaaggtcctgaagaagcctgaggtcctcccaggaggaagactgcctgtagactaaggctgcagcatcagctctttccagggtctctagcctgtcagcctgcacagcagatttcagaattgccaggcttcccaattgtgtgagccaactggttaaaatgagtatctctctatatacatcctattggttctctttctctggagaaggctgacaggcactttatcactcttgctcccttcctaacactgcaagtgaaatgaatccccaccttggaagaactggcctcctagtcctactttgctcacaccctatatcctaccctatgggcaccctacagccttgttatgaaattgactcttcttggtgtaacagtcaagttctattgtagccaaaaatgacacatgggaacactgttcgatatgtcttctggaatagatgatgcttacctttcagagtaaaaattcctaaacttgttcttctcttcatttaccgcatgattaaaagcaaagttgtggtggtcagattgactgcagtgttaatcatttactaggcagctaaacttttttagctactgactccatagaattggatatgagaaatatccaataagtaggcatgattattcaacaacgtcattaagagatacactactttaaatggtggcagcagtgagtggagaatgcagcttgctccctttttgaggccccagagaggggtttgttgtcaaactcaggtcaaggaacaccacattcttactgaataactatcctgtctcctttatgctgcttgctagaaaaaaggaagtaaacttgtgtccttcctcttgcaattgtagcagccatgaatgcgtgcattttgtaagattaaccctcttcatggctttatattacttcattctaatccttgttttcctttaggcctgatttcaaatctcttccttttaaaaatcgtattgctcattatgtatttttgtaagctgccttcaatcttttggatgtgatgagaaataaacaaaccaaccaaccagcggcatttctaatattagaaatggatgcgatcatcctggattccttcctcatttcattcagaacttagactcaaaatgacaaggggaagggatgatataatttgccttccatctccttcctcagggagaaaatcaatgcaagtttctaaatgcctattactttccctcgaaatcagattattaaaaacataaataatatccaaactgatattctgcccccccgtatgggaaaggggatactgtcagaacccaggtgctacacctgaccatgaagtggttctgcctcacgttgtgtctgtgctaaggtatgcaaagtcagagcacccaggaaaagtccctttgtccctcctccaacgggctatggattcctgtccttctcgatgttttcaagagttgagatatatataattttccatgttacaaaacagaaactgtaaatttatcttggttctaattaatgacaggcattcccaggccttgcagcttggaaatgtatttccaatgatgtaaaagaatgtctttggtcagagacagtggctcatgcctataatcccagcactccagaaggccaaggtgggtgaatagcttgaggccaggagtttgagactagcctgggaaacacagtaagatcctgactctacaaagaaaatgttttataagaaaaattagccaggcatggtggcacgtgcctctagtcccagctatctgggaggtggaggtggaaggatcacttgaggatgcagtgagctatgactgagccactgcactccagcctgggtgacagagtgagactctgtctcaaaaaaaaattattatttcacaaaattatcacagcattgctaactacttgcttctgtttaccctgaatattttctgggtcttttcattttattttattttttggaggaagattactaaatctttgactcaaatgatttacccttaggtttgtccttataagacctggtgctaatgtctgaccgtcagtttcttgcatttctcaacggtgccgcgaaggcagtggtgactcatccacagcacaggcaactctactttccccttcacattcacaacgtcctcaacaaaggctgcatggaatcctgggatgagcgcttcaataccttcctccctctcccactccctgtgcaactggccctttttactgttatactgaaggaaaatgcccgggcgggtttccataagcttccccattatttgctggcacagagcacataaagccttatcatggagcaaaatgaaatctgagcagggcccgtgaaaagaccagtactgacataaccccatgcaggatgtacagacacggagcccggcacgggacagcccccgagcttacttaaatgaaagagcatcaacacaatgttatagaaaactcactcttgtgctggtaggagcctgatgctgaaagggaatttggagttctgagtcccagctttgcccctaactagcagggtgacttggagtagaggtcacatcccttgcaccttaatgtcctttgacataatgatggatttgtaccaactcagggattacactccctcatgcctggaggcccagtattgttagacaatgaggtgggaggacttgaggctctgaaaagacatcccttgtcctccatgcatagggggcactgcccctctgttcagggccatcactaccctgcaaatacacccatcaacctcccagaacactcggcaagctggggacacagccggccactcagcctggagcccaaagagcagctcctctcacagtgccaggagctcctgcagctgtggcctgaatggctgttggccactagagagtgctgcccccaccactgcccccagcagccggctcactgggttctaggaacaaactcagggcctgcacttcttcctctgcttcaaaacagactccccaggccagccaggtgagagctgctcacaaaaaactcttccatcaacaaggctgctggctgccaacgctggatgttggtgtgatgcggattgtaaacactcttttgtcgggcctctattataaaataatagaaacatttataataaatgtttaagagaattgataaaattaataaattgtattattacaaaataataaagacagcatatgtgagctggaacttcctctaggtatctgagggtcgattttaattccagactaggcacccacctggagtttcagagctcccccatcgctgggtttcctggtaggaaacagctcattgctgggtggggtggggaatgagggctacccaattggtctgttctttgctccatcaccagcccctagtccagttcctgatataaggtaaatgctttaaaaggttggtgaatgaatcaatggacgagattgacacctttccattgacctctaggtgcagacatgattgtcgtagcagagaagacatacgtgaacctgatctatgtcagatgttctgccaccctcgtctcctggaactggaagacaggaggaatctcaatacagatcatgagtttagacctgaaaaacgctttcatggcttttccaccacatgctcctagggggcagggtcggggggaacaaaacacaaacaacctgttagccactctaaaactatataggattatacactctcatacactcatgagtggggacctggcttgtggaaaaggaaagaatggcatgaagaatgtctccaatcggaggactggagacctctctagggaggtgtggagattgctgtgacgtttccataactgacctaggaggaggagggcacaaatccacctccaggttttcagatgctgctgagttattataaggaatataataggttcccttcatccaaggaatgggaaaaaccacagaagaagttttgagtgagatttaggcataagagtgacagcaggtggcacttcagggtgtgcacggttaggttaatagactgacttaccaaatgaacagctccacactctcattttgcaacctaggaagtgggggtgaggaatatgctcaggacgtcccctgaagaccctaacattttctttagtccgaaacttacacacaagtctggatccacccaggaggatggaaattgacaacgaagagacaataggtacacccccacattgccacctattcctggacgcagggtggaggtctggtggccacaggcagggacgcggaaatgcagctgaaggcggtcaatctaggtgaggagaacaaatgatggggagtacgagagaaatgttcacatatgggaagaaaaacgcaccagagtgcaccagtgtgtagcatttgcaatttctttcaataatgtttcctttgcactcacaacttggctgtttggtgcaagaagcctagctttcggcctgttttggctttcggcgtgcctttctcactaagcttaatcatttctagcttctgatttacactgagggacgtgcaactcctccttgcacttgaacacttacaggccatggtagggttattaactggcctatttccgatagtgctaggtctcagggtataggaaagggaagcccaaaaacaggagagagagaaagagagagacggttggtggagcagtcagaacacacacaacactgatggattcagctcgccgtcttctatgggtgctgttcatggtgccccaaaacaaccacagtggtaagatcaaggatcgctgctcacaggtcaccatgacagacagaatgataacagaaaagtttcaaatattgcaagaattaccaaaatgtaacttgaggacactcaatgcgcacatgctattcaaaatctggcgccaatagacttgctcgacgcagggttgccacaaaccctcagttggtaaaaaacacagtaactaaagcaaagtgtgataaagttagatgtgcctgcactgtgcctcctccttttctcaggggtcagatgacactgaagcatagcctttccctgcaggtcccatgggatgaagctccaggtggtgacaagtgaattaaccacggggctttggtggctgccttcccacctgggtcactgccctacttctccgccagcattcacaaccctctcagatgaagccccttcctctcagctcgtcttctcagtgtctgcttacaggggagccaactaaggcaattcatagcagagctgaggaatcttgcagcacagaggctaatgcatccccctatgggatggagctgatgatacaggaatggaggcacgaatggctgatgattagaatgggaagacataaagataggatccaactctataacagcacaatttccaagggaaaagagaatttggatctgttttctatatttctgaaaatacttcaccaagcatttgtgttatgtgttaccccatatacgagtacaaaaaaatataatgtagaaaaaaatgagatagttttaggtatcaagcagatgagattatctcaaaaagtaatgcaggatgaaagaaatcattagattcaagaatactttcaatacgattatgaaacagtttattcaaaataaattattaaagagatctagtgatagtaggagtgggcctctaacttgtcaaaatgatggctaggaaagacccgcaaatgtacagccgatggcaggaatattggactgatctcagtagtaagatggtctttttttttttttttttgccctagagacggggtctcactctgtcacccaggctggagtacagtggtgcaatcatagctcactgcagcctcagactcctgggttcaggtgttcctcccacttcagcttcccacgtagctaggataaaaggtgttcaccaccatgcccagctaatttttttaaatttagttttttgtagagtgggatctcgctatgctgctccggctggtctcgaattcctggcctcaagctatcttccttcagcctcctgagtagctgggactataagtgtgtgccaccatacctgactaatttttttattttttgtagaaacatggggtcttgctatgttgcctaggctggtcttgaactcctggcctcaagggatcttcctgcctccacctctcaagttgctgggattacaggcgtgagccactgcacccagctctaagctggttcttatgttcctaaaatatgaatgactgttataaaaatgaccaccaactattttgaaaaaggactggatataaaaatagattttcaacaaatgaagatgagatgtcactgaagttttcagggggcattctcacctctttgctgttgttgagaatattcagtaccctcacaaagtgatactgataaataactaagtgatactgataaataacagtatgagatccattactatacacaaagctctaaaaatcatgcaactcctatcagaaggcaagaataggtgttgacatctcagagacattttgatggtcatactgtgtggctttaacaattaacatgataacagtgtcatagctcatggaaatataccccagatcaaagggttttcacaaagttaaggtaataggccagcagtgttgccttgccttgccctgacagtgtcccagggaagtgctgagacagcatgagcacagcctccttagcgtgctggcacagtgacgctaccaggccacagggcacccggcgtgggatgccatccaggagtcgctgtgaatggccaacttgcacaaagtctgctttggaaggaatatatttaacagaagctctacctagagtgtgatggttctccacaaaatggaagttctagtatcaatagtagccgcatctgggaaagtgccaaggtgaaactgacaagctcagcacaacaggcataagctagatgaccacgcagccacccgccagctctggtgcaccatggggctccatgccaagaggcgcacagggatggcgagctggctctgggacctagggccttcccctgccactctgggaagtgagggtgcagggaggagtctctgggtgttctgactcgtgtcttcctcctcatcctactgtcagatgactctccactgtgctccagggagctagattgaacacttacatattcagctttctcgtgcagtttcataatttattttaaggatatttcacaagaaatttatcaatgccaccttttcaaagaccaaaattatatatgtgtatgggagatttagaatctggtgaagattttaaaatttcaaagagctttattaaatcatatgttcactcatataagtaactgcatacagatgcaactgcctagatacaaaagaggtgacgctaacaggatacgtgtccatgcaatgccctaaatcagcgtgacctgacacatctcgacatcatgcttctctttctcttcctctcttcctccgcctgcctacctctcccatcccctcccttctctctttgcttcattccttcctctcttcccttttccctctctcccttccttccttctcaatcatttctcagaatgatgaaaaatagtataatataaaatatttagaaccatcacatcctttgttttgtttttcacttaattgagaaaagtttgactgacaagagcaaaatggggcaggtcttgcattttccacaccgattgcttctgctgccctgtagcatatctggagctgttaattacacctgctgactgaaagttttaataagtacttctgtgatgaatgttcttttcacatcattagaaaatgtgtatttaaaaagaagcccagcttcaaaccaaataattacctagaataaacacctattattttaattgttagtaggttacaattactgaatcttagtaactttcatcttttccagagcacgctttttgagtccagtggacaacctattactgaggaagacactctgactttatgacatatgaccttcagccaaaaagtgtaagaaactaaaattagaaagttttcttcatttcataatgacgacaagactggtcatttgagtggaaagctcaaaatctgtcattaattaccataaagatggcatagtttggagtcaatggcaagtatatccaatacctttttctccctccaagtcctggttactggatggacgactgtgctgggcacagcacaaacactaaacgggaacatcagccccgtgatcaatgggacaggatgagcaaatgccagccgtgtgccctggaattaccagagggtgcccactacccatcactagctctatgaccccagccagcccttcccactctaaacttcagcaggggcgatggctgacttgaggctgaaccagcattttacaattatctgtccatggattaagcttctaggactctatgccgatactggttttgtggttgtttgttttgtttctttgggggtggggcataaagaattcagagaagcagaggactcttcaaacatgctctgaaggaatcaataaaaatgagagccataggtgtgtcaccgatgctatttgtggagtttctgtgatccatctcctaagttattgcttatgtccatctggagttcaaccatactggataaaggctactgtgatccacattcactgcattggttctatgggacaggaatcatagaagtcacttttgaggagtggctgagaaattctgatgctacataaagctagccactgacagctggctacccaggctgaacactgtaatattcaaagaatcctacaaaggtttccatagatgatttcagctgtcttaggagtggctaagctgttgacaggactgtaaagcacaaatctgtaataaaacttcagctcctctttattctggtttctttaagccccattttcttatgcagatcctaaagcaggaataacactcctggaattgcctctcttttaaaaggttcacagagatttcaactcatatttgtcctcgccacattcctgcagaatagagatgggttggtggaatcacaaggcctctttatgaagtgagttcagtggtttgtaatttcaggactgacccaggatggccggggttagtcccaggtcccccagtgccccgcctgggacagtcttggtctcctgcacctggcttcctgcgacctccatcgcagacttgccctggtgactcagatgcttctacacacaccacaggaaaagggacagcaaacgtgtactcaatcacacctgtcacctggagaatgacaaggttcataaacctgaaaaagagaactttatttctcataaagggtcacagcctgcatggccattctgacaggctgggaagcttgactacccaccacaggctggaaacagacacttccaggaaggggcaaaaggaactggagtttatgcagagtgaggtggtcaagtaaacatgtttattaagctatgaggagtcacgaatatttatgcaaggagaaacattacacttcatgcctcattacacgtcatgcctcttcttgggacccatgttcaaaaactggtggcgttagcatgaccccagagtggagttttcagccctctgacatcaaaaggtgaggcagaggacacgaaacccctcactgtgcatccatgtcaaccaaccagaaccactctgtgctgggtggtccccaagcaggaaggaatgctggccggttgttctgctgaaattacaagggagaggccgcctggggaggctgtctgccatcagcggtgaagccagcctttccaaagggctggtctgtttaattcttaagaaagaagcctaatcatggtcagcaagggagggacgataacgaggcgtgcctgatctcccctcctgccatggctaggaaagttttcaagattgctctagggtgccctcggccaagagggtgtccattcagtcagctggagggcttagaatttcatttttatttctctaacctaaactaacagctctaaaatacatctaaaatagggtattggccataccccactagatacagctcttttttttaccaatctggagaatgagaaggtacacggatttttttttttttttgagacaaggtctcactctgtcacccaggctggagtgtagtggtgcaatcatagctcagtgatcctcccgccacagcattctgagtaactgggaatacaggtgcatggcatgacacctagctatttttttaaactttttgtagtgacagggtctcactatgttgcccagactggtcttgaactcctggcctcaagtgaccctcccacctaggcctcccaaagtgctgggattacagacataagccaccatgccaggcctgaaattcttgtacaaaagcagttacaaagacttggggacaaatacattggaggcactaatggtttcattctaggcaaataagaaagaaacggtttcttgactaccaataagattaatcctgagccaagtcaaattatcactcagccctggcctgttggtgtcggcatggacattaggacaaaacgtagatcaggtggggacatagagctggtgatgggtagtgggcacactctggtcattccagggcagacggctggcatttgctcatcctgtcccagtgatcgtggggctgatgttcccacttagtgtttgtgctgtacccagcacagtcgtccatccagtaaccaggacttggagggagaaaaaggtattggatatacttgccattgactccaaatcatgccatgtttatggtaattaatgacaggttttgcataattccttgcaccagagatcaaaattcttgctctgtttgattctggtgcaaggaattatgcaaaacctgtcatcattaaatgcatgattacatcagtggtgatgcaagagttctggccaatcgcatttgttctacagatctctttcaaaccccagctgatccagtcctcttctcccctccccactcactccccctcctcctgttcgcaatgcatcttcccattcctggtccttattccctcctctccctccccttcttttttcttcaggattcttttagcacaggttggacagcaaataccttctcagctggtactgagacactgagtcccagtcttgctctccctgctctgttttcatttctatcttctcaaacatcccttaggtttctcttgttttttccctcttttcccctttttaatatatgagttttgtatatgagtttctatggtaacatgaagcaaagaaatgatttctttataaatttcctggtacggaaggaaagaaccatcaagatgcaaagacggggaagaaaaaagaagcctgaacaatagaaagtaaaaaggattaggggacttcacatgggtgaatcccaaaaaggccaccccagggagcctctggccctattagcatcccttccattcattacatccactctgcttccaggcagctacctcagctgagctagcagcctctcagagtaaggaggatagataggaagcgaatgacccatggcgaagggaatttgcaagcaggttcttcagggaagggaaggaagaaaaaaaattgaatcacaatttgtttaatgacctaatctcatgaaaaaggaattacaagaaataaggttacttatctgttccttccctgggggttcttctatacttaattaatttcctacctactgatatcaagacccaatttttgggtcatttcaaaaattctcaacaagttgagaaaacaaagaaaacaaagaaagaaagaaaggccttgctagtaactcaataatctgccccacaacccattccttatgtgcagctcatggatcttacaaatatattggtgtatcttccagttttagcatccttaatcaaaatgtattatttatattgtatctattataactaacctgctcactggagccttacaccagggtcatgtgttggttcaagtggctgtgattagaatttactgattcttctcagtagcttgccacaaatcagtctatagtaaattagactaaagagaacataattataaaaattagaattgaaaataacccagaagaacatatcaacctctgcttcaatacttctcacattgatcaactcaatattgacgggcttcaagccaagtgtcttttctgccatccaaacatgaattaatctcatggaggtgatctttctcttctcagaaacaatcccttttctggtttgtggttgtctaagagagagggtatccaactgaaatacactttaacattacaacagaaataagagaccaaacagattgcatgcaggaggaaggtagttacagctaaactaccttttcttggtggcagcagaaaccttttcagatacaaaagttcccatgtttgaacatcacaaagatctcctttatatttctgtgaaatctttagatattagtatttggtaaaacaatcagttatagtccaaaagtaattttctatcccgccaagactgtaatcaactcaaaaaagcaagtattttgactctagcttggaagctagagatggcattaaattgtgattattaattccctaagttttgcactcaaaggcttatgttctgcatcatgcatggctgactactatttggaggtagctgataaggatacatgcatatttactttagtcacaagtctacatgtgataatcccaatagcttttgcaatgaaggcagagaaaaaaatctttttcgtattatttatactgctttgataatggtatagtataaatgcatgtacactaggatgctttgtgaatcagaactacacacaatcagaccaagaaatctcgttttacttagcctagttctaatgtttccaattttgagaaaagttcatttcttttctattggacaaaaattttccctaaagagcaaaggatttagatccgaactttaagaaaactattggttacacaaaggattgagggagaatatatgcaaaaattagagtccatgaaaaccagaactgcacaggaagatctctcccgctcccaggctcagacgtctttcaaatattaaggatctaatgtcacaacagttccagctggccaaaataaacccataccaataatctataaacagggatttctcattctaaagagcctttgtacattgttttacttgactctgacaagaatcaggtgaagaatacatgtatcagtaaatgttttcacaggtaagaaaatccaaagcacagaaagattattgagttgcctgaattcactcagctgattaatggcagagccccaagctggctcagcgttcctagcagtctctaaacgtttccagaaaaatgaaacagcaagaggaaacataagagaggaaatggaaaggaatttcccctgcgagatcatgctaaatacacaggcacttcatgtgcccttgttggcctggtatgaggagttccaccagagcggtatttccaccacatgagagctacacttcacactcccagaggaggtgatcttgaaacctctggcagatttctgcctcccactccaacatgtaaagagcctgaagttcatcactcctgttctcacaacaagaaaaaaaagctgaacaaacaaaacaaaacaactcttattagatccatccaaaaactgaatccataggacaaagccctgaaaactggagagagagagagagagatagatacagagaatcatagctcactaagaggggaaactgccgctgtagccagcaactgttgggaaaacatacttgctgagattgtagatggagcatagcctaccttgagagttaaaaattcctgggggcccagtcttaggagagcccctatacttttgagagtttttcccaccaataggcccatcaagttctcagatgaagactacagaaaaatccccttgttcttccagcaggaagagaggaaaagaaatcatcttccactgggctcagtggctcacacctgttctcccagctactcaggaagctgaggtaggaggatcacttgaggccaggagtttgagaacagcctgggcaacatagtaacatatgtaacagcctgggcaacatataaaaattaaaaaatttttataaaagaaatcatcttaaaatccacccatagagtcttcttcccttaacaaaggcctatctgcaaggataactactttactagagcctaaccaatatgggggaaggaaagtacctgattccagacaaatctattcttcttctctcacttaacggggagaaaaagagctgagaagcacttgtgaaggtcacaggccagggacacagacttactaaaaactgtgacctaatcacagaaatataaaatacttctccctgataccttaccatgaccccaacagggctcttgtgtaataacaaggaatcaccactgaagaactgaaaggctcagattctatttaagaaggaacgtctagagaagcccaaagacaaaagagaagacaaaaacaagaacactagatgaaactttaacctctaacatctacagctacagcaaagagtaaatacacttgaacccctagccagataaatataaagcctcactctaaagactgatttaacttagttctctttatccaatgcatcatgtctggttttcaacaaaaaattacaagaggctctaaaaagcaaaaaacacagtctggagacagagtcagcatcagagtcagatttagatacagcagagattttgtaattatcagacaaaaaataaaaaatagctatgactaatatgcttagggctctaatagaaaaaatgtgcacagtatgcaagaacagatgggttatgtaagcagagggataaagacactaaataaggattgaaagaaaatgctagaaaccaaaaacactgtaacagcaatgaagaatgcctttgatgggcccatcagtagatcagacatagctggggaaagaatcagcgagctcacaaatatgtcaatagagacttttcaaactgaaaaataaagagaaaaaagacattgacagaatatccaagaaccatggggcaattataaaaggtataacaaacgtatatgtaatggtaataacagaagaaagacaggaacttaagaaatagtcagtgtaacaatggctaagaattttccaaaattaatgacagactaaatagaataaatgacccccaaaaaatgtacacttaggcatatcatattcaaactgcagaaaaccaaggaccgagagaagatcttcaagaaagtcagaaggaaaaaacacgttgtctatagaagaacaaggataagatttataccggacttgcttccagaaaccatgagaacatacagtagagtgaagagctggaagaaagtcagaggaaaaaggataagaactacatcaaattttctttcagaaaccatgaaaacatagagtaacatagttcaattgttgaaagaagataactaacaacctggaattttttattcagcaaaattatccctgcaatgcaaaggagaaatagtttctcacaaacagaaattgaggaaatttgttgacagtagttctgctttgcaagaaattgttaaaagaagttcttcagagagaaaaaaaatttacataggtcaggaactcagatctgtataaagaaagggaaaggattaaagaaaaaaataagtgatggtaaaataaaatattttattttcctaattcttaattgatctaacaaataactgttcaaaatgataatagcaacaatgagtttggtgactacagcttctggataggtgaaataagcaaaacatcctggaagttcttcccaaatcctagaagccaaaacagagagcagagaggcttttccttgatactgagacagtaaatccaaggaaactgtatcttcaggcatggagaggcaatttgtcttttctttctgcctatgaaaactcccaaaagtcttttcttccacggtaggtttaagtaagaaattagtaagtaaattctacatggggaaccatgaaacaatacgaagcaaaaccggaaacaaaaagcaacagtgtttggaagctgaaattatttctctctaagatggaaattttacattctttgaggtctcttcccatattggacttataggaatctaggttataaacatccttcctcctccagcttatttccacaggtgcacacatactgataaagtaaacagtgcagtctctgtcactctgtcacatactttatttttttttattttaataatagtcacctgtttttaatgcctcctgtgactaggcatggtgtttagcattttgtatatacattttcccatctaaaccccgcacacctttttaagataggtactactgctattactattataattactgttattattattatcattcaaacaatgaataaactgaggcccgatgacgtagagcagaaaggtgcaggattgcactccaaactttgggacctgcaatcttacctcccatatacaggtaatcatcttttcctggggacagagatatgctatgcctggtataaccccatgtactcagtcagaatggattttcaatacagcaaacctgtatacactcttagcttgacactggatcaacagttacctgaatctagacaggggtttctcttctcagggtcccaggcaatctgactcttgtctccccagcaaccagcagccacactgccttttgccacgtcgacccattcaccacacttaggctggaacctgcagagggtctcagggacccacagtacaatcgagagtacctgaacaccaatgcgggtgggagactttgatgtcaaagtgctcccacaaaaaactcgcatatgaagcatgtgtgctctgtgacccctggcactgcaacactgggctacttctgacattgcaatattgcaccccgacaatggccaacatgcagtgaatttaagggaatgtcaacaaatgacaaaatcaaatttagggaatttttttaaaagaaatgatacatcaaaacttgtgctttaaacacatttatatccaaacccacagagttgttaagaatccttgcaacatacaagtctcttctggctacttccacctacttgtggccttgcaatttcagatccccacagattccttagagtgctaaatgcatggaaagtgtaattctaagatttcaattatttttaagcacaagattatgaaaaatgtttcttaagaaacacattaccctaagtaatgatctattctcaaagggtaagcttttccttattattaaaataatgtgattttcctttgaatgccttggaaataaacataacctatatgtgcttttctttaaaaaagtaaattactagatttctgcttgagaaagaacattttctggagagaagcaaagtctatcagcacaatctgttcaatgaccaatgagtcaatgtctcaatccctgaccaccaagggtaagcctcctacccctgctgagagtggcctgtctccttccctccaccctggcacactctctcaggtccttctcaagtcctccagtgaagcaggacctcagataatgcaggaagagggagcacatatgccagtccatacccacattcacccttaaatgctgcttttcaattctcatcccacggcttcagagagagtgtgcaaaaagtccaatgtgtcccctgtcccctggggttgaaaaaagggactgcaatatctctttatatccccctcctccaatccaaacatttttgaggtcactgagctggtaaatcctgcaagccctcactgaagaaaattggtcttaaatacaagcttcttgaggaccaggcaaccacgctgtgctctcatttgtttctccacgttcactgtttctcccagcagaactccgggctcttatcaaaagagatgccaccaaatacttttatttttccgttgaattacagatctatgaaataatttagaactcatctggcatttcaacttaccccacctccctcatcatcttagagctgatcaaaggagtcccagctcatcaactaagcaagcctctgtgaatcatgcccagcaaaagagacacaacagcccccgtgcaatctgcacaaaagacagatgcaaaggaagctgccaggttagcctcccagactgccaaagaaatgtcaactgattataccccaggaggaaagcggacagatggattgacatgaataacgtcattagcctctttgcctctgagaattagaaacagggagaaaatgcaataaagtgtttacccatagactccacaacgttagggtcgggtaatattttggttgctaaaatattgccaaaagatgtatttactctttattacatattcttccatttcttttgtgaactggctatgaattccaaagtgaaatctattagaattcaatggatcatcttgtgaccacactcagggaatcacaattatatacacatttatagggtactgctctgcaaacataaacaacattgtgacaagggacctgcaacaagaaaaaaggaagagattctttaaatgttcaaaaggataaaaatagaaaagagaaaaaattttaatgacaaaaagtatacatccaagagagaaaacaaatgataaaacagaatgaagagggagggaaggggcaacgttaagagagggtctgatgggagatgagcgatatttatggggctaatcctccctcttttgggctcattattgcctttcccctgtcgctccccaaaggctcccgcctggcttgtgttcacagatgcatgtttattctccctgcactcagctgtcagaaacttcatctgttaaaatgttagcttcaaagactgtgaaaaagaaagccgatatagtaaatctaattcatcaactaaaacaatgacaaaaacataacatttatttttgagtgagctatgttgaacctctataatagtgacataattgcccattttagattaaataattaaaattttaataaaactaagagaaaaaggaacgtcattcatatagtgtgatgagcgtttgattttacattaagttaatgttatgagaacagtgaaaaaaaggaaaaacggacacaaagtgcattgagaagcaggaatataaatattagaggaaaatttgtcagagtttaagaagaagtttccagaactgggaacagtatctgttcccacagagcagcattcatagggcatgagatggagtacacagaaggtcttgcctcagtaatagtaatgattaaatctagactaggcaatgctccagtattgcttaaccaatattagcaagacccaaaaggataaaatgtttccaagtaacgtaactgtgtcaaagaacaaagcgcaagaatatttctaggaaggcaaaaatatccagtactcagcaagttaaaattcacaatgtctggcatccaaacagagattaccagacaagtaaggaagcatgaaaatataacccagaatacggaagtacatcggtgaatcaaaaaaaaaaaaactcaaaacttttttaaatgtcagaattagcaaagacattttaaaagttattataagtctattctcgatactcaaaaagttaactagatccacaaaagataacacaaaagactaagattgagcttctagaaataaaatcaataatatttgagatgaaaatacacagatggaagtagctatacactagaacttgcaggagaaaaggtgagtatatttgaggacattgcattagaaacaactcaaaataaaatacagagagcaaacaaaagaaaaaataaaagagcgtaagtgagatttttgaattgaataaaaatggaaacataatattgtgggctgcttaaataagaaatatttaagaaaatttacaaccactgaaagtctattttttcaaaaaaaaaagtttcaaatcaatatccttagcttccactttataaaactggaaaaattagataatattaaacccaaagttagtagaggaaagaaaataataaagatcagattagaagtcaataagagagaaaacaaaaacaatactgaaaaatcaatgaaacaaaaagttcttcaaaaaaatcaataaacctttaccagactgataaggaaaaaaaacaaacaaaacagagaataaacaaaattactaacattgggaataaaagaagagacatcatttcagggcctacagatgtcaaaaagaaaactaagggaatgttatgaacaactttatgctgatacattctacaatgtagatgcaacaaattcttcaaagacgaactattgaagcaaactcaagaaacaatagataacatgaataaacctctatctatcaaagaaatttaatttttagataaaaaccttcccacaaacatgatttcaaggataaattctaccaagcatataaggaagaattaatatcaattctatgtaaactcttccagaatactgacaagtagagaacacctcccagtttattctcaggttaaaattaccatgagccctgaatcacaagtaaatttcaagggaggaaaactgcagatcggtatccctcatgaacattttggcagaagttttcaatagaattttgtaaatcaaatctaactacatataaaaggataatatatcttgaccaagtttccaacaattcaaggaaagtttaactttttttaagtcaatcaatgtaattcaacatactaagaaaaaaaattggttgatcccaatagacatgggaaaaacatttgacgaaagtcagcatcctttccttgtcttacaaaactctcggccaggtacagtggctcacgcctgtaatcccagcactctgggaggccgaggcgggcagatcatgaggtcaggaggtcgagaccatcctggctaacagggtgaaaccccgtctctactaaaaatacaaaaaattagccaggcgtggtggcgggtgcctgtagtcccagctacttgggaggctgaggcaggagaatggcgtgaacctgggaggcggagtttgcagtgagccgagatcgcaccactgcactccagcctgggagacagagcgagactcgtctcaaaaaaaaaaacaacaaaaaaactctgcaaacgaggaagagaagaggactttctcaacttgagacagagcatctgtgaaacaactattacaaacatacttaacagtaaaaagactgactgctttccttctaaatcaggaacaagacaaggatattgctcttgccacttcttttcaacacttgagagatccagccagtgtggtaagttggggggaaaaaaatagagagaaaagccatctagattggaaaggatggggcaacactgtctttattcacagatgacatgaaaatccaatgggatctacagaaaagctactggaattaataaacaagtttaacaagactgtggggtatcaagtcaatgcacaaaaacaattttatttctgtatactagcaataaacaattgaaaatttacattaaaaatactccttatatgatagcctacaaaaataagaaatagagatgaatatgacaaaagacgtgaatgacctatacaatggaaaccagcaaatatttcagagaaattttagcagacctaaataaatggagagatatgccatgttcacaggttagaaaactcatattgctaaggtgtcaattctcccccaagttaactgtgtattcaaatcaattttaatcaaaacttaacaggcttttcaatgcaaaaattgacaaacattgcaaaattcacatgcaaattcaaagaacctagcatagccaaaacaacattttcaaaaaggataaagtcatacaactaacaccaccttatttcaagagttattttaaagctacagtaattatgatagtgtggtattggtataactatacatggagagatcaatgaaacagaatatagtgtccagaaatagactgaaacatacctgaacaacagattttgacaaaggtagttagttcaatgaaaaagaaacatcaataaatactgctagactaatttgacatctgtatatccataggcgaaaacatccataccccaaaaagaacttcaacccagaccttccactatacataaaaatcaagtggaaaagaaccagagacctaaatgtaaaacctaaaactataaacttctggaaataaacacaggaggaaacctttatgatcttatattgggaaaggatttatttgattcaataccaaaagcacaatttgtaaaaaacactacactgaaaaacttttgtcttttgaaacatacagtacactgctaaaagaggatgaaaacacagactgggaaagaatatttgtatagcgtatatctgataaagagcttacatccaattatgtaaggaacccttgagattcaacaataaggaaataaacaactccataagataatgggtaaaagagtggaacagccactttgcctaagaaaatattcagcaactaatcacatgaacaggtgttcaacatcacttgtccttagggacatacaaatcaggagcactgcaaatctactcgagtggctaattttaaagagattgaccataccaagtgttgacagaaataaggagaacctgaaacactcacccactgctgatgagaacataaaatgatactatcacagtggaaaacttgtgggttatttcagaaaacattaaatgaacacttaccatatgatccagccaatacacccctgagtatttacccaagagaaatgaaagcatatgtctacacaaagacttgtacatgaatgttcatagcagcctttttaatttaatagtcaaacctggagacagcctgtcttaatccatttaggcagttacaacgaaatagctgtaacaaaataccataaataccatctctcaaatagatgtgaggaatacatttctgttgtttacagccttttggaggctggaaagtccaaaatcaagtctccagcaaatttggtgtctggttaagggccctcttcctggttcataaatggcctttttgctttaatctcacatggtggaagaagcaagaaatctttctccagtctcttccataaggacattgatcccattcaggaaggctctgacatcaggatctaatcacctcccaaatgccccacctcctaataagcatcattttactccattttgtactgccataacagaatgcctaagactggggaatttataaagaacagaaattaatttcctcacagttctagaggctggaaattccaagattcaggcaccggcacctggtgggggcctttttgctgtatcttcacacagtggaaggcagaaaggcaacagaaaaccaatccctcagtcaagaccgtttgcaaggacccctgatcccatttgcaagggaggagccctcatggcccagttatcctttaaatgttccacctcttaatcctatccattggcagcacctgaggactcattcaaaccacaacaatctgattctggccccctaaacgctgtccttttcacatctggaatacattcactccatgccaatagcccaaaagtattaactcatctcagcatcaactttgaagtctaaagtccaaaatctcatccaaacattgcatgagtgacattcaaggtagaattcatcccaaggcaaatttgcctccagctgtgagtctgtgaaatcaaacaagttatatactttcaaaagacaatggagggccaggcataggatagtgccaaaagagaggaaagaacagggtaacaggtcccaagtaagtccaaaacccaaagggggcaagcattacatcttaagactgaagaacaatctttgactcaatgtactacctcctggacacactggggtagaggatgaacccccaaagccctgggcagccccactttgctggctttgcgggacccacaccttagctctcatacattcaagtcaaatgcctgtggctctgccaggctggcgttgcatattgatggctctacattctggggtcttggtggcagccaggccccaagactccactaggtaatgcgttatggaggctgtctgtgatggttccacccctgtggcagttctccgcatgggccttctctgagataggctttgacatctgggaggaggaaggcatgccaccacagctcttgcattctgtgcacccacagaatcagtactaagggtacactgccaaggcctagagccactgtcagagccacagttcagcctgcttcagcaacagccagggtgtctgggaagtgctgtgccagaatgtggagaaaagacttaaagtagccttgggaagtaagtcctgaggtcccacaggtgccctgcatccattctgccatcaaggttgtagcatttggagtctgccatgggaagtccttgaacctctctcaagtgtctttgaggtcattctcctattgtcttgatgtatatagcccctggcttccttttatccgtactaatctccttgccaaacagtcatttggccacacccttggttttctctcctaaacacatttttttagtctttaaatggccaggctgagaattttgcaaatctctacattgtccttcccttttaattataaatcatctttaaatatttctctcttctcatattttactgtaagcatgtaaaagaagccacgaaggatcctgaacaccttgctgctttgagatttcatctgctaaatatcctagccattgcttttaattgctgccttccagaaagtcctacagcatgtatataattcttagctgccttataacaagggtgacctttcctccagttttcaataccttgttcctcatttccctctgagacttcatcaaaataatcatcactgccaacaccacttaggtaatctctaaggagaatgaggctttcccttcacctctcctcttcttctgagctctcaccagaatcactcttaatgcttcattcactgcaatataggcttttttccagcgttcacttcagaactgtcccaagcactaaccactgcccagttcaaatcccacttctacgttttttggtatttgttatagcaacactctcctcctctgacttaccctatcaagtcctgccctagtccagttgtgctgctataacagaatgcctgagactagatgatttataacgagcagaaatgtattccttcacatttctggaagctggaaaatgcaagatcaaggtgctggcataatctgttaagggctttcctgctgtgtcctcacattgcaaaaggcagaagggtaagagggaaccaactgcctttatcaagcgcctttataaagacatctgatctcattcacagggaagaagcctcaccacctcttaaaggctacacctcttaatattatcacattggcacacctgaattttgaaaaggaaacattcaaaccacagcaacatcgtattgggggttaggatttcaacatacaaattttgggagacataaacatagtccagcccaaatgtccatcaacagatgaatgataacaaactctggcatatatctatataatgaaactctattcaccaataaaacaggatgaagtgttgatacaactcaaacatggataaatctcaaaaacctatgctgagcaaaaagcaaaacaaaacaaacaaacaaaaaacccagacaaacaagagtacattctatacaattatatgtatagaacattctaagagacaccaatcagtgcagacaaaagatgagggtggacacgagagaggaaggaattatgaaggagcagcaggaaacatttgggggtagatgaatatgttcattcccttcatgatggtgatggtttcctgggttttcacagttcaccatagggtatcatttaaatatgtgcagttcatggacataaagatgggaacaatagataccagaaactccaaaaggagggagataaggaggcaggcaagagctgaaaaacttcctattgggtaccatgttcaccatctgggttccaggatccaccgaagccccaacctcagcctcatgcaatatacccttgtaacaaacctgcacatgtttcccctgactgtaaagttaaaattaaaaaacaataaatagataaatacatatgtgcagtacatggatgttgattatgcctcaaaaaactaaacaaaacaaagactatcccactccactcaatgttcattcacttcaatcagaagatgcttcaggctctatccaccttcgaaactcaacggggtcccagcacaaaaattgaacctggcacagcgcctgaggcaatacccgcctcatgcaacgaaacaaccaggcatgacacatacttatccataaaatcttcatacaaaagagttcatacagaagtgttacaggagcctagaaatccttccttggaaattcacacttagctgttattttcaaaaacctaggtaatagtcacttagggctttggaatcaaattgaggggttttttttttctgttccttttcattttatggcatgttatgctttgttaatatattcattgcttcatcaaacatttatttagcacctaatgtacacaaagaaatggactaactgcagttaaggagaaaaaaggtttgcttccttttctgataaaatctgcactaacttgttttaaaacaacttaggtttaaaaaacgagaaaataggggtaaatgcatgaatagagtaaaaaggacctcaaagtaaaaaaggaatgagtgaagcagagtcatcaacaagggttttcagggaggaagggtgtgttttttcattcatttatccatgtgttcatgtattcattcattcaacaaaaattctttaagccattatgccctaaatctgtacacagatattctgcatgaaaataaaagggagtctcagcctcccagccatcttcctttaccctcagtccttctgtgaggagtaaaggtggagatggaagtttggataggaaggagggtttgtatttgagaagcagtgctgaagctgcaactctgtgctggccaaggtgctaggtgtcggagtgccaggaaggatgagactgtggtttccaccttggaggcactcacacaatcaacgggaaagaatcggggaaatacatgattgcaaacacatgataaatattttaacaaaatgcaccagatgccacaggatcataagagagaaagtatctttggaggctagaaaggcttcacggagaaggaagaattgcactgagcactgtggataaggttcccagtgagaagagcaggacaggcatgttcccaggaactcttttgtatggaagttgtgaggtaagaccgatagatattaaaggaatatcgtgtcagcacaggggatggagagcaagaccagcggcagaggaaccagttgggaaatgactacaaagtccaggcaagaaatggcaagatgttgaatgaaaactgtggtgtttaggctggaaaagacggcagagacttgaaaaatatctaggatagagtcactcagagtgaatgtttaattagaagtgcaggcttagggcaagaaagggtcacgtgtgagcctgagtatccaccataggtcatggaaaaagagagaatatggtccaggaagaagaggatgcattcattattggcaatggtgcatttgagatgtggaaggcattgccacacagagcaagacacatttcctagctgcagaggtaattagggttcactgccccaggctaagttgtcaaatgctgcaagaggacccaatcgtataagtgtgaacagtgtcacttaggcttggcaagtaggtggacataggccttttaaacatgaggtgtttcagcataatgatggggcagaagttacatgaaatgggaagactgcagaggagaggaggaaaagaatgtcccccaaaatgatacataggtgaggatctcttatcagaaatacttgggaccagaagtgtttcagatttcaaattttttggattttagaatatctgcattatatcaattgatcatccccaaccccaaaattcaaaatcttaaatgctccagtgagcatttcctttgagcatcatgtcagcacagaaaaaatttcagattttggagcatttcagatttcaggttttcagattaaaaatactcagcctataatacatgaccaggtcagaacttccaagaaaattctggaaatactagttttcctagagatgttctatgagaaataaaaatgttcatgttcttctagagtttgaatctttaaaaggatgagtacaattgattgttctacatgacagtcaccctcaagaaatgtgtgctatgtcccagttggctccctaagaaatgatgaagcagaaagtgagaacagatccacagatggcatttaccaactactattcagctcacttgttgactaactcctgctcaatacaggtgcagatcagatagtgccaagaaatgggcagctaccaggtgcaggcactgtactaggcagtacactccagggacaggcagtcaatgagggaatgagggcataggcaaaagtgactgctgcttccacaaagagagtcctgggtactagggcactgcatgaggagaggagctatatgggagggggtgaaagaatacctccagggaataggcgatgaagctcaactccaaaaagagtaggagtcatcgcagggaagagaaggttcaagagtgtttctgcagaggaatcagcatgtgcaaaagacctgaagtggaagatagcacgccacatccatgggcatcagcttgtctgtgattgctagccaaactccaaggctatcagagtttcaatcctggttccaccagttaaaagttgtgtgaccttaggcaaggtatataaaaccagcttttcccttcctcagctcccttgtctgtaaaatgaggatcagtacaggacctttatgcgggctgtttggaaggatccagagagctatcacatagaagcacataactggtatgtgttagctattactattagtactgcatatcttattttgtactatgtttctaagaaaatttaaatattgattattatcttttctactaaaagatcatatggatatattttttacttccataaagcaacttattgaggtacagtttatagataaaacaatcatccattctaagagtactgctcaataatttttagcaaatgttttatagtcaagcaatcatcaccactgatacagtttggatatgtgtccactccaaatcttatgttgaactttgattcccaacgttggaggtgggagctgtctgggtcatgcgggtggagacctcatgaatggcttggtgcccgcctctgggcaaggagtgagttctcactctatttgatcacaggagagttgttaaaaggcccgtaccccctacctcccctctcttgttccctctttctccataggacatgctgaccctccttctacttctgccatgattggaagcttcctgaggccttcacaagatgctgatggtgccatgcttcttgcacagcctgcagaaccatgagccacgtaaacctcttttcttttttttctttcttttttttttttttttttttttgagacagtcttgctctgtcgcccagactggagtgcagtggcgccatctcagctcactgcaagctctgcctcctgggttcatgccattctcctgcctcagcctcccgagtagctgggactccaggtgcccaccaccacgcccagctaattttttgtatttctagtagagacagggtttcaccctgttagccaggatggtctcaatctcctgaccttgtgatccacccaccttggcctcccaaagtgctgggattacaggcgtgagccaccacacccagtcataaacctcttttctttataaattacccagcctccagtattcctttatagcaacacaaacagactaaggcaaccacaatccagttttagaaaatttccatcaccccaagaagtttcctcatgcatttttgcagtcattctctactttcacccccaggcaagtactgatctactctctctaaatatagttttgcctttcttatataaatggaatcataggctatgtagtctttggtgtctggcttatttcacttagcataatgttccttaaggttcatcaatgtggttgcatgtaccttctctttattgccaaatagtattacatggtacagataggccatattttgtttattcattcaacagttgaacactggggttgtttttagtttagggctgttttgaataccctgcacagaaatcgtgtggcatataatttgtttttttgttttgttttgttttgtttgagacggagtgtcactcttgttgctcaggctggagtgcagtggtgcaatctcagctcactgcaacctccacctcccaggttcaaatgattcttctgcctcagcctctccagtagctgggattacaggcacctgccaccacgcccagctaatttttctatttttagtagagatggggtttctccatgttggccaggctggtctcgaactcctaacctcaagtgatcctcccaccttggcctcccaaagtgctgggatggcctatattttcatttctcttgggcagatacttaagaagcagaattgctgggtcatacagtaacgctatgtttaagttcttaagaaaccttcaaatagttttccagagtgtctaccattttatattcccaccagcaatgtataaagactccaatttctccaaatgcttcctaatacttagtattgtcaatcttcaagggaaatattgatacaaagagtgtgcccatttttcaactgggttgtgtcttcttactattgagctataaacgttttttctatatactggacagatatgtactttaaaaatattttctcccagttagtgggttgtcttttcattttcttaatgaataacactttgatctttttttttttttccatctctcagttctcctgggagactgtttttgacttctcctgggagactgtttttgacatctcctttaatctaagcacatactatgcctcatgagctctggaagtagtctgaaaataccttataattttttggtgttttctatcaagttcaacaccatctattccaaaacaaatctagatagatcattctacagccaattcatctggcaaatggattccaccatcttccctttggaatgatatcattggcctatattaatgaggaaaggccagcaaaatatatcactgtgtttactttaaagatgtttttgaggacattgtcatatggcaaagaactcctccttttctatgaggatgtcggctggtcttgaagacagaaatgactgtattttcctaagcaataagtttgattcccgggtagacaccaccacataacagtaagtttctccttctgggaaactggccctccgacccccttggatgataatttgtggatctcacatattacagcttcgtgacggatgtggcatattctaaatccactgctccgctcggcctcatatcatttccatctgcttcatattcattttatgaatgtattctattgtgtgtgcatgagagtgattttgactggctcttatctagatttgtcaacactacctcccccgccccaggctccccatctcccattcttctgagccttagcgtacaaagcccatgatcacagcaggacacgtcagagtaagcccgaaaatgtggggaaccaacctgagctcctgcctggaatggctctggttgccgctagcatggaagaagactttcctttcttacagcagcagccagcagcatcaaccacctgtcttggtattgtaatgaagtagcgaacgtaatgaaataaactaatgatttcacaatgcgatcttaacacttgtcaatttgcgaaaagtaaaacaagtaaggggagagagagggactgcatggagaggaaaagctgctttggaaacaggaagagctctttgaggagaaggcattttagtatcgatctgagtactgagaagaagagagcttggtgcagatcacgagcagagcaggctgagcagctgagatgcaagggcaaggaccctgggtgggcacagacgtcatgcactggtgagacagcaggttggagcacagggcctaagtgggaggccagggaggtgggcagagggaagactggggaggatgtgaaggagaaggagaatgctcacatcagtggacttttctttctttttttttttttgttatacagacagcatctcattatgttgcccaggctggtcttgaactcctggcctcaggcaattctctcacctcagccttccaaaatgctgggattacagacatgagccaccatgcctgcccatatcagtgggttgtttaagggaataaatgtggttttctctggttactctggctactatgtaagaagcaggggaaccagaagagcagcaaggaggctgggagaagtgtccagatggagatgctgaagctgtgggaaagcaggggtgggcaggagtggtgagggggggttcaatctgtgcagctgttgcaggcagcacactataggattctctgacgaacaaggactagagtgtggggaagccgagagcccgtgactccagaatcctattgtggacatttgatatctgcggtgctgaaacctccaagtggtcatttaggatgtgagtctggcccttgggagaagtgacagcttgtattacatgtcagtgttgctgcagtgtgtggaaggcactggaaaggcgaggagggggagagaaagaagaagccagggccctgtgcccacggccacctcgggaaggtggggaggagatgcccttgaggagaccacagcaaacagctgggaggcacagagcagatatcgtggccggagcagaggctgaggagatgtgcagggaagcttcaaggaaccccgcgggctgggaaacccaaagccagccacaggaagcagcacactgggctgcaggcttcggaaactccgcatcatgctggctgcacagcgaaggcagacggaggggcgaggttgctggccagaagcagcatgccaccatgggggagttccagggtcaggtaggggtagaagaaaggacagctttttaagaagtgggagaaccaggctctgctggtcaaggtgcccatgagggcaaggacgaggaaacggtcggggtcctcctgactctggtttgggcaaccaggtggcgctcagctcctgagagcggctgaggcagggtgcggcagtgggaaaggtgtcccaggaggccgtgactgtaggggaagggcagtggtagtgggaggacagccaaaggaatttcctcttgataacctttttattattttttcatggtgtgaggccgtctgctgagaatgtggcgggcagagagaatggtaccagaggcagaggatggacaggcagagagtggacgcacaggagaggggagacccaggccctatcagcaacactggcagctcagtcgcctggtgccatcagtcatctctgtgggccccgaaacacaatgctgggttcaggagtaaggagagaggaagaggctaccgggatgatccagcctggaggtctgtagggtagaggctggaaaaacatcagagatatgcatcaaaaagattctccaagaggggccaacagggtgggaagaatgaatgccatggacaggcaatgctggcacaggaaggagtgagaactggtggccgcaacacgctgtttccataagatgtcgtgggtgggagacagcatgctccccgtttccatctgggcactggttgcatgagcttatgtgcaagtgagcattcatcaggcagcacactcctgtgcccacttctgcctccttactgcaggtgtgctgtacctcagcaaaccacacaccctcaggggaagagacccaagaaggaagcaaacccagcagaggaaccagggatcagagacggctggtggaggttgaacggccacatgttgtgagtgtccaaagtgccttccccaggcacacttgccatggcggggctgaggtgaccactctggcagagactctgacccggaaggaaactcaacacgtgccagcaacgagaacaataataaggagaatatgtttgtcactgcattcaaacacacagaaaacagccgaggaaggtgtgcagaatatttagacgtctgagctacgacaaatcacctattttccctaagcctcagtttcttcccttgtaaaaagagcttcataagtgtccctgcattggggtcggtgtgaggatgtagtgagatgatacacagaaactgcttgacacagtgcctgaactataacaatgcccccataactactgtgaaccccaaaaatccgagacaggtttcagttaatttagaaagtttattttgccagggttgaggctgcaagtccgtgacacagcctcaggaggtcctgatgacatgtgcccaaggtggtcagaacacagtttggttttatacattctagggagacatgagacatcaatcaatgtatgtaagatgagcattggttcagtctggaaaggccgaacaactcaaagcaaaggcaggaagactggaagtggggcggggcttccaggtcataggtagataagagacaaatggtcgagttattttgagtttctgactagcctttccaaaggaggcaaacagatatgcatttatctcagtgagaagaggggcgactttgaatagaatgggaggcaggttgaccctaagaagttcgcagcttgactttttccctttagcttagtgatttagaggtcccaagatttattttcctttcacactatctattattattttcattatcactgttagtaattattaaaggtgcataggaaatcactcaggactgtctcaatgaacagcagttcaggaaataggagtgaaagacaaatctgtagtctgtggagaacactaagttctcagaggtcacaccaaaaacagagaaacacaaccatccgctgcctcaaggggagataaagcacatcccaaaaaagccacgtgcaaaaaaattacaaagccacatagcagttaggcacaaaaaacaaggtgccaggtaaatatatccatactgagggcatgcagacaagagggcaagagggggccatgggcagctccttgaggacctgggggggtctgagcttgaagcaggaggcaggtgtgagcaaggagagagtctctctcaccaggaccagcgagcttttctaaccatcccagccttggaacgaggcaggaacacacgtgggagacttgggctggtgattgaagaggtcagaaaaatctgagagacagcagaaaaaccaattattcaaagctgccatttccagccagcaaagttaactttgggttttgagggtcctcagaagcctctctaagaactgagcaggaaacagagcaacagatatgatggtgacagagaatttttccctgcagctgtgtgtgggatgtgctacatcccagaagagagaggagagaaaacccacacgatgtaataagacttgcacaaaaatgccaaattatgacaataagtccttaagtgccgaggcaggaacgagaaggacatgacttagcatttggtaattatgttgaagaaattatgaaataataactatttataaaccgattctcttactagtcctgagcacatacaatatgttttcagataaaattatagataatgaaatgctagaaaatgttgttaaggtgcatggtgttggttgcattgtgatatttaatatactaatgataagtagattactctgatgcatcccgtgcctgaatcatctgttgtcttgtgtgcaaaatccattcttttattagtaaactattaaaaacatccatggtctgtcatttatgggccttctttattgcaactcatttataatgtatagaatgtgacctcaacactccatagtttgctctaagatttccagacttgctacatcttccagacacaaaaagcaaaatacacagagaacaagccatggtaagaacacacactgttgtgaacacagtgctggttttcaattagaatgaaaagctgagccatgcaggaattccccacaccttctaaagcaagtgcatccaactcaagctatacatgagctgatcaatatcctgactcaagggaaacaaacagaaaagtctcatcttcaaaatgtaagattgtattgatttttttctcctcaaggcccagagagtacaaactgcaaaacagctctcagcaactgaatgctacatgctgatcctcttcccactgaacgtggctgtgtgtgtgatgggtgtgcgctgggagtggaggtggaagcacatccaacaaagaggtaggataatgaacctgatgtagctgatgatgctgcattcatatttatagagaaccacaggctcctaaaacccctatctcagccctttgtgtcataccacagcacattcgagtccctcagagctaagagctcccctctgtatttcaccatgcagcacctaacccatcttcacaattgccatgaagaaacgatgctcagggggtttgagcaatgtgtgcaagttccccaagcaggtcaaacccataaaccgtcttcaccaacttctcacagcctgcctcacatcaacttgtgaatcccacttacttacatctccttagaggcctcttgtgggttctcactgccaacagcaagtctcttctatttctttaagaatcatccaattatttttatcaccaactgcctttctctttcacaggccatccagctcacatggcatatatccagtaacagcccagctctgaggacctccaccaaatgacagcccagctctgaggacctccacccaaccacagcccagctctgaggacctccacccaaccacagcccagctctgaggacctccacccaaccacagcccagctctgaggacctccacccaaccacagcctagctctggggacctccacccaaccacagcccagctctgaggacctccacccaatgacagcccagctctggggacatccacccaatgacagacagcccagctcttgggacctccacccagcgacagtccagctctggggacctccctccgatgacagcccagctctgcggacatccacccaatgacagcccagttctggggacatccgcccaatgacagcccagctctgaggacctccacccaatgacagcccagctctggggacctccaccctatgacagcccagctctggggacctccactcaatgacaacctagctctggggacctccaccctatgacagcccagctctggggatatccacccgatgacagcccagctctggggacctccatcctatgacagcccagctctggggacctccacccaatgacagcccagctctaatatccacccaacaacagcccagttctaatgacattgctctccagctctgaagctcccagggactggataatgtggaccatgtgtaaagctaagaccacacatcctagcacttcgattacttacccatcaccaaaacagtaacatgctgtgggttccagggaagatgctaccctgaattctccccttgtccaaatcatgccttcccaacaacgctcatccagaactggaactccacattttttaaagacagcccttcagatctgataattggatggaatctctctctccccctggctccctccctcacccatcacacgtaatgcgtcatgcttctcttaggggtactgattttgttttcccttgctccatatttttcttccctcccattgaaacagacacctctttacaagctgagctggatcttcgtcttgtcagtctggtatttggcgttaaccaagagaactcaacagctgtaacaaatccaagcattccaaagccatttgcctcttaggccaaaggtagagatcccttgatccttgtaaatgatattatcctctgttaatcattttaaaggaagaagagttctcacttctgcaagtacttccacaatcagtttatctctcattctgtctcattctttctcttttgcccactttggaaaagaaaaacaaccaaaaaaaatgtcatacataacctatctatggcagcactgtttagtgttcttttctggaagctgttggtcctgcacacacctgaaaacaaaaaagaaacttccccaaaggtctagtcaaaggccagaattggcaaatgacaacttgtacaatttaatagcttatttcttatttatttatttatttatttttttgggacggagttttgctcttgttacccaggctggagtgcaatggcacgatctcggctcaccgcaacctccgcctcccaggttcaagtgattctcctgcctcagccttcccaagtagttgggattataggcatgcgccaccaagcccggctaattttgcatttttaatagagatggggtttctccatgtgggtcaggctgctctcgaactcccgacctcaggtgatccgcccacctcagcctcccaaagtgctgggattacaggcgtgagccaccgcgcccagccttaatagcttatttctattaatacttataaagaatccatactaacgctgcaaaacattttgcatacaatctcaagattaatatgatgctcaatgtgtttttttttcttattatactctcgtctatagttattccccagctgatccagataatccacctttcctccttagcagcaggctttggatggctgtagctatctcagatattcagaacaccacccaccatccatcatcctccacaaggtggccagaatgatttttcaaaaatgccaacttaatcctgttactcctgaagctgtacacctccgtgctcccacactgctgaagtgtggccctcttgggctcagctcgcaagcccaatgtgatcagatccgaccccctcttcagcctgcctctccccacacttgctgctgacatgctgtggggccacttcaccctctggtgtcctggacaagctcttcctctgctgcaatgcttcctccactgcccttcaccaggcccctctgtgcatctcctcatggtccccaccgccacctggcaagtggggcttcctacaagttgcctgcatgcaccacactgacctctgggcaggcacatgcacatcggtctgaattgtaattattcctgccatgtccacaacagcacagcaagctcctggtcttcgctctgcatgcgaagcatttggcatagcgctaggcacatggcaggtgcccatgagtgtttgctccacaaatgtgggaccaactaaagagtgaaggaacgaccctgctcagcacggactgttccaggactccgcacacgcactgacaggtatgccttcctttccaggaactcaggttggcaccctctacaaatggaatgtgcttggtttcaatttcacacttcaaatcaggcataaaatcattatatgaaaatccatggcacaatgattcaaacaattgtcaatcgttcctaaaattattattcaaattttattcacactttaataggctcaattttgcaatatccatgggtaaaagctaagttttaaatattcagctttgaatggctgacaacactacttagcagatatttattatcattcaagcacagtgttttaaaatgtctcgaggtgtgaacacattgatccctgcattgtagcttatcgtcctatattgaccactgtttctgtcatgaaatacgtcagatcatcagtttggacacagctatgctaagaatggtcagctctgaatattaacttcacaagccagttgaagaaattaggacaataagagaaagatgagaaacagttaaatccaaaaattcacccaataactgatagcataaccccaaaccggcgattcccaaacctgactggtcattgaaacctgtcttactgtcaggcctctgagcccaagctaagccatcatatcccctgtgacctgcacatatacattcagatggcctgaagtcactgaagaatcacaaaagaagtgaaatttaaatggcctattcctgccttaactgatgacattccaccacaaaagaagtgaaaatggccggtcgttgccttaactgatgacattaccttgtgaaattctttctcctggctcaacctggctcaaaaagctcccccactgagcacctcatgacccccactcctgcccgccagagaacaacccccctttgactgtaattttcctttacctacccaaatcctataaaacggccctaccccatctcccttcactgactctcttttcagactcagcccgcctgcacccaggtgattaaaaacctttattgctcacacaaagcctgtttggtggtctcttcacacggacgtgagtgaaacttacctgtcacctctatcagctcctgtcagtcattatttttctcctggctctctgatccctagctcaatcacacagcattgtagaacttagtgtctgaaatatccatgtgatgaagattcaaaggtgctgtgacttaggaagacgagactggggcaagcaggcatcatttcagagtatccagggacccagacggtcaggtttttaaaaattggcaactgtacaatctcttcccctctccccaccaaaaggaattagattttacttagaccacaaataccttctcttaggaataccaagagtttctgattcatgagctgttacattctttctctttaaaccttctttatacatgtatagggccttcacacatacgcaatccctcaggattttctagctacttcaaaagggaggaagattcctcaaaagggaacccggaatcgaggttgaaggacgaactgctgaggaacaggaacaccttacttctgcaacatggaacctatattctagtgaagtgcattgtgcggatattcccaagattctgtttattttatcagaaaagtgttaaaaaaatgttaatattatcattggcccaaataaggcactcaaaggggatgcaaacaagatcctgcaggggtgtgtgtagggggtagaccgccccaacatgtcaaatctcagtaaacacttcattctgcaaggctttcaccctcctccatccgcccaggggtccccacaagctctccctgaggggacctgaaaatgtgtggatgctccggctgtgggattgcagggagtgttgctaggtgcagtaggtagggacagagaagctgaacctcctgtaggagtccagaatatgccaccccaaaatatgcttctttggcataatgatgattttaagctggtaattttgagaaactgcaggcaggagaagctctggaaacagagcagaagtggccctttggaagggaaacttgcatctaagaaggaaatctccatttgtaagggtgtcttcctctgggtaccaggaagaagaggactctaaatcactcatcaatggagaggcgcccgctgaaatctgcataacaagccttattcttgctcctctaggtcacctccccaagccaggcctccccactcccttcttcgtttcagcagaggatgacagttaacctgaattcaaagccacctctttgagatgtactcatttctctgggtatctcacagctgcacatgggcatgcattaatcttctgcttgtttttctcttgttgatctgtcttttgttacagagctccgtctcaactaagaactgtaaagggtagaggggaaattatttgtccactcctgcactcctacctacctaagggaaagagcctgcaccacaaaatatagagcccacctcaaatgtctacagtgctccctgacaggcatcataaatctgatgagacacggctgcctggtgagtcagtggagacaccaagaaagagccaggactagcagatttcagctgcaacttcattgctcccagaggatgtagtggcatctgagaacatcaaagaaagaccattggtccatgataattcaattaaagcttcctgatgtggtcacaggttacttttctaactgtagttccacaccaagctcagttttccatctactcaatattgctaagaaaaaagttttacattctttaaattgaaatgcaatccattttttttaatgagccccagtagatgcaggttccatgcaataaatcttagcttacctcacctaatttccttcttttctctttgctcagatatagtttgccccatctaggtcctcaacaagggttgctcattagaacaacccggagagcttcagttgggctggggtggagcatgagttatcaggattcgttgtaagatggtttcgggaattgccaaactatctcacgaaagggaggagacctgagcagcaaatgaccaagatctctggacggctgtttgggttgcttgtttataagagagagaatttgagaatgcaggactaaaacatttcacaaacactgaggccctccagttgtttattcttctgggccaattagggtcttggcgacataggcactcagatggaaaacaaaccacatgacgtgctgtgaaaatcaaaactggcttctcaccttcatttcttctttgtggctgcagttgaagggggaaattctaaggcaatttattcactgaactttacgttaatattcagtcctcgtaatctgacagaatttcaagcttggcagcattgtcgtccctaagtatcttcttggcaacacttttgactttatagatagggaaaccaaggcccaaggcaaaggcattcattcaggaataccatggctggcccgggaagcagtcacagaaatcagggttttctgactcctcccataacactctttctgttccttcagatgtgagtcactggatccgagggctgggcttcctcgttctggctccccgtgccatagccaagccctgctctcccactgggtgcctctgctcagctgcaactgtgactgcctctccctgcccactgctttgcctcagggacctatcagcttcacactatgttagattgtatcattcatttcccaggagagtgatttcattttaataataatacgaaagctctcaaccttaagacattcagagtagcttccaaaatgtcactcaaaagggcctcttttcttccattgagaagattccaagttctgcaatcatggtaagcacattaataaaggggtaagggtagaggtcctgaagtttacacaaatcagaggaaaaaaatcatagaaaaattccactccatttgcagaagacatctgtcaaactaattttatcattagagtctttacaaggtcacaatataaaattatgtgtgctttgaacaagttatacccatcttttaacttttcctatgtgaaaataatttgagtcttttgaatgttgtattctgctttgctgaaggcattctttctaattccacatcctgataagtgtggaactatcttggaatataacccctccctacctagggtagttattttcacactaagaaatcctacattttggcattcatcagctataattttgcaaagaatgaactacccacatttaatttaagcaaataattatcttcacagatatgaagatagaatgtgcttctgcctgcagacacagtgttgagcacccatgggtgggaagtgcagcctggaggggacacacctgacctcccagccatggtcattgtcccaatgaattctcctagaagttctagttcactgactctgtccgttggaaacctgtatgtttcaactcagaaaataatataggtcaccaggaacgtgaggaacacataggtaaacagaaatacttgttttgtgaatgaggatatcactgcctaccacatttctctctgattatccatgaggcaaaccaaggccacgattcctaggctccactgttttttcacaaagaaaaacttatcagacacgtgatgtaaaccaattgtaccagtgttccctgacttccttttctgtgagaaaaaaaaaatgtcataaacaagaatggtaattggctagccccaaggaatgggcacattcctcagcagggaacctcataatgtggacagattcctttttggtgttgtttcccacatttcattggctgctacagtccacgtgtacatcactctgctctcctggttcacaagctaagcttttcatattcattttttgttacttatgcagagctcttcacccacaacactcttctgccagggaacattctgcccatcttctagaaatgtcacttgttctgaaactcttcttttctcctccatgtcacataaatctaacagtatcagtggatcctctctcctcctgggccatcacagctgagaaataaaaatgaaaccctaaaacccccaaccagttgaatgaacccccctcttggccaagaattccctagggaaattttggaagctgagttcttggccattatgggatgcaaggtcagaaatgcctcattatatatcctttcccttgctaaccacctttcttcccaggggctaaacagaaaccagcccttttgaaagactccaccgatagcaaccaactgtctgaggctgcctcttgcttgtacaatttcagcaaaataaccaaccagcattctttcctgataagagaccaccaaccatggagtggttggcgccagtctacagcagatgtacagtgaggggtaatgcatcctctgcttcaccttttgatgtcagagggctgaaaactccaccctcagatgataacaccacagattgttaaacataggtcccatggagaggcatgagactaactgcacatgtgcatggttctcctttcttccttcataaatattcatgactcctcctacagtgtattaaatatgcatatttagccaccccagtctgcataaattcttgttccctttgccccccctcaaagtatctgtttccagcttctaatgggaggctacacttcccagcctatcagaatggccatgcaggctgcaaccctttatgagaaataaagctcccctttccaaatttatgacccttgacattcttcagttgacacagcccatggagctcacaatacactatgtgaatgttggccatgacttgtcaaaggcaattggtatagtgtcactttcttgaacacaatgccatttctaattaactgctgtccccccatcacagtgcccctccttgtacatagctcatgctacaggtatctgtagaatgaattggttcttaggaaaaggtgccttattccctcaaacatacacacaaaggtctggattttcatagccttgtgaggagtttcaactgactgaatatttttctgggaaggtactaagtagctgtaacttcaggtgtcttttcaggctgatgcacagtctttaaataagtttataattccaccatccctccccagaagctgtcccctccaccttcccctcctcagaggcacatgatctaagaaggctggggaggactgtggtgcccttattgatccacccactgactgccacctctgcatcatcctccacacaccacattggacaaaagcgccaatgttacttgctatgaaccttgacctcatagtaagtagctggtaatgatgcttacatgcaaattacttctaaattctttaatttttaattctgcactttgaaatgatttcaaacttttgaaaatgttgcaaatctagaacaagttgactatcccttattcaaaatgtttgagaccataagagtttcaaatttggagtttttttcatatttgaggatatctgcaaatatataatgagatatcctggggatgggacccaagtctaagcatgaaattcatttatgtttcatatacaacttatacacatagcctgaaggcaatcatgtataacatttttaatatttaataattttgtgcatgaaacaaagtttgcatatgttgaaccatcaaaaatcaaaggtgtcactatctcagccacccatgtagacaatctgtggttgttcagcatcaccaccaaaaaacacagtgagtaatgctcatgagtcttggtcccatgtgggaacctgctttggcatgtccagcctgcacatgtgtcattttactcctcattgtgggtgtgctactatgggggaaatctgggtgtgctgggcatgcgcacaaaagacatatcacagctggagggagctgggagggtcgttttttcccttggggatactgaactgtacattgtgtgcctgcattttgactgcagcccatcacatgaggtcagatgtgaaattttccacttgttggtatcatgtcagcactaaaaatgtttcagattttggaacattttaaattttggatttttggattagggatgctcaacctgtgtaaagatatcccatataccattagtctagcttcttcaaatgttaacatcttacataactgcagtaaaatgatcaaaaccaggacatcaacaatggtctcatattaactaattcacaagtcttatttgaatgtcactgatagttccacgttagttcctttctggacccggttccaaacaaggaatggacattgcatttagcagtcttctagaagtttggacacttcctcaatctgtctttgtctttcatgatcttgacaccactgaggagttccgacaaggtatcctatagaatgtctgcaatttaggatagcctgatgtttcctcgtgattcaattcaagttacatatttttggcaaatatgtcatagaggtgatgctgtgcccttcttggtgatcatacaaggagggacacgatgtctctttgtgccactgtcagcaaggttaacttttaccacttggtcaagctggtatctgctgggtttctacactgtaaagtcactgttttgcttttcctttcgcaattaagaggcattatgtggggagataccttgagattgtgcaggtattttatttctcattaaaatttcacacccaggagcggtggctcacacctgtagtcccagcactttgggagaccgaggcaggcggatcatgaggtcaggagttcgagaccagcctgaccaacatggtgaaacctcatctctactaaaaatacaaatattagctgggtgtgatcacatgcacctgtaatcccagctactagggaggctgaggcaggagaattgattgaacctaggaggtggaggttgcagtgagttgagatcgtgccactgcactccagcctgggcaacagaacaagactcggtctcaggaaaaaagaaaaatcactcaccagttttagcatgtactaatgactctcacctgaaattttggttattatgattcctgtcgaatgacgactgtctaattccatcaacctctacagtaaggaagacatgtccctccttccttaggtatttacttatgtatatatctatttaattatgtattgtatcagtgtggactcatggatagtttattctatggaatacttttattctataggttttagtacaaaatgatgtcattattttgttgctcaaattgcccccgatttggccatcaggagacccttcaattctgttctatgctgtttcaatagactcccaacatttgtaagcactttcttactttctgatactaaatgctcacctaagcttacctagcactttccctaccccagccttgaaatcagggattgctcctagaagccctgattcagtttattggaggatattagaaaccaagatcaggaagccaggtatgctcaaatgacactgcttctcagccatcgctgtagccagagctgggacctctgagtccatttacacacagccacatccatttctctatctctctctgcatatatatcatgacctcatgtgttcataccaataccactgattccaattcaacatcacaaggttcatacaagccttacttgtttccttgtttatcactcttttcttagacaatgagaaacttgcttttattattgaatatacccacttatttactcacatctagaatacagataatttcagaaattctatcacgtacccctgagagaaactaaaatccttactaactagaatacaatacttgagaggagctgttattcccttctagtcaatggtcaaaagactgtttttcaaagttacctacattgattcttgattctgcccatcccagaccatccagatacactgcatctaaaggtaacatttaaacaggaagtgagacattcctccagggaaacaactgagggattctctgtcaaatggcttatgatacctcattctactaggtgaggctcacaactgtatcaatgagaccaaaaccccaaacaccatcaaagtttaaatcttccctctgtaacagcactagacaggggaaacaaatgagcaaagtgtcccctccatgtattctggttcccacacatatggagactctgttgtcttcagcacctgccctccatggttggcccagggactgcctccagtccagcacgcacagagtcttcatggaaaataaacaccgcgtgctggagtggaggcagtgactataaggatgcacatcacttctgctgaaattcaagcccgaggtctcatctaactacaatagatactgggaagggtgggctagctccaggcccaagggagaaaataccatggatatggtgagcaggccacacagcacacgctgccaacacaaaatattcataatggagagatacacttaaagtgccttttcaaaaagctctggtagtggtattctatgcagtcatcattaacgtatttcatctttcatgacgtatttgctctaggactttcctcagactttcaaactcaaaggactctcatgttgttacctgtatgttattttccaaaagatctctggtcctgtctagatttatcagctcatataccagcagctggcttttatttcatcccttatataggcaaagctttgtgctaagcaatttaaatgcatatggttacataaatttgctcacacaacactaaaatgtgcaatgaaaatgtagcttcctgatgcaattttcctcaagaaggtccgggttttggtggcataacagaaacacccttatactgagtatacgtgagtcaagtctgacttaagtctgacttagtaacttataagaaagatacttcacctgttttaaaaatatatttatcattcagatctcacttgctttcccccacgcctctgcaagtgggcatctgctgatcttgcagcaggaaagaggtctgggcaaggggccgggggcctctgtgttctcagtggtcccgctgcacagtgtattcagactgctcagctccccaccctggagaacactgagcaacactgcctccgactggccctcgggagtgacatgtaggtaataaacctacagctttagtctggcagactgacccaccatccctccccagaagctgtcccctccaccttccccctccttggaggctcctgaacccaagaaggctggggaggactctggtgcctttactgatccagccactgactgccacctctccatcatcctccgcacagcacactggacaaaagcgccaagctaatggctagccttttaggaggcctgcagactttgcacacaacccctgcagaagaagcctttaagttaatctgggtatttctaaagcctccatggatcaggcccccaaattctctgtggatgtggagggtggggaacaaaatctcacttctccctataacttcttgagccaaaaatagatcagttcatgctttactttttcagggcagaaaggttcacaccatctgttccctatgcccccagcaggctccttcacttcctccaggtgcatgctcagattccacccaagcagcagggccttccctgcactccctacctgccaggctctgccatgcccaacagcacacactaccatccaacacaatagatgtttacttgcatgtttgtttgtagtctgtctctctctacagaacatctgccccagcatggcagaggcttcattctattccctgatgtaacctcagtacctagaaccaagttaggtgcataagagatatgcattaaatattgtcaaatgaatgctgaactcataaatggcctggccgtgtcaggcagaagcaatatcatctctatacttacaggaagaacaccaatatacacaaaagaaatttagaagaaacctggctttcaaatattctaaattcctgagacatctagcaaatatttgttcttacagtccaagtggagaaaatgtatcattcttctgttggttatatcccatttcctgaagccctgttgcccctggattaattgaataagaccagggcaataagacttacaggatgaatagccgggcgtggtagcgggcgcctgtagtcccagctactcgggaggctgaggcaggagaatggcgtgaacccgggaggcggagcttgcagtgagccgagatcgcgccactgcactccagcctgggcgacagagcgagactccgtctcaaaaaaaaaaaaaaaaaaaaaagacttacaggatgaaacaacagtttcccggtgcacaggcacctcaccaccccccgtgcggatgaatgcggtcacgtcccattgtggagagaaagaagaggagctgaagaggccagagccctcagcccagggccacagagtgaatggccagggtggggctgggtccttaggaccattattcttcctttacatcttaaagtcattttaccattttggacttttttctaggtttggtatctatattaatgaatgacctaatgaaaagtagtataatagagaagataggaacgaaagtcagtgccagatgtccaagcttaaatcctccatctgttttttgctggttatgccatatcgcacgaattgctcaatccaaatacacttcagtttcctcatatgtaaaacagggttaagagtgaaatacttttctcataggagcattgtaagcagcaaatgaactcacacatatgcagcacttataatagaagctaacagattacttttatcaagcaataatgaatataatttgggttcaacatttaaccttacaggtgtgatcttttcagccactgctgcgaagtcttattttcagcaacaccagtattaatgatgcaggctctctcactcgctctcgctctctctctctctctctattaatattttcaacaaatcaatgactattttcatacaaagattataattgacattgatctcacagttctgttttaaaaatgagatcactttatagaacacctgtgacctattaaataaaataatgaaagaaatcaccaaacaacagtataacaaaaataaacatcatgaagaaaaccagcagacatacatacttactacaatgagcattttaactgaggttttcaaaagactgcttcccaccagggaggcagttacttttcattgtatacagttcttgccagaatcatatccttgttgaattcttgagttgaataaaacctttttgaggctttgccagctccatggacctcactttggagtccatacagaggaggttgcacctcagtggttctttctggtacccacatggaaagtagagtagacatacacccacacagatatgccagtgggggatgcaggccagcaggagacctatttttgctccctcctttgaaattcagctcaaccaggagattagagtttataagataatggccttccctccctgccatattcatattctcacactctgcatttttatttctgcatgtaatgttgcacacactgatactaactgcaaatggtttatgccaaaattcagtaaacaaacaaacatagcagacatgcacagcagagttgtgaacacgaaaaagcagatcctgcataccatttagcggtgtttttaaaaagataacaaaacaacctttacctcttcaacaaggtaaatgtggctaaaatgaagatttaatgatatctgggtactgatgtttatttcctggtaacaaagtcagtataaaatttgattagataagaccagcttctcacagataggtgaattgatgatagccagatggatggacagatggacgcgtggacagatggacagatggttggatggatggatgggcggatggatggatggacaggtggacggatgagtggaagggtgcatgggtggatggatggatagatgatggatagatggatggacagacagatggacagatggatggatggatggaaggatggatggatggatcaatggatgggtggatgaatgtatagatggatgggtggatggatggatgaatggatggatgggtggacagatggatggatggatgaatagatggatggatggatggatgaatagatggatggatagatggatggatggatggatggatggatggatggatggatggatggacggacagatgagtagatagagagataaataaacagcacatctatgaatcacacttcttcttacagtccaatttccagtatgattatccattaacacaaaaacttccatcatgtttaaagattcttaaaaaacagggaacaacattttgggaggcagagatgggaaaattgtttgagaccaggatttcaagaccagcctgagcaacatagtgagacccctttctcccaaaaaaatttttttttttttttgagatggagtcttgctctgttgccaggctggagtgcagtggcactatctcgactcactgcaacctccacctcccaggtacaagcaattcccctgcctcagcccgctgagtagctgggataacaggcacgcgctaccgtggccagctgtaatcccaggactttgggaggccgaggcaggtggatcgcgaggtcaggagatcaagaccatcctggccaaaatgatgaaaccccatctctactaaaatacaattcttttttttaattagccgggagtggtggtatgtgcctgtcatcccagctactctggaggctaagataggaggattccttgagcccgggagtttgaggcttcagtgagctatgattgtgccactgcactccagcctgagtgacagagtaagaccttgtctctaatagaaaaaaaaaaaagccatatatgaaaaactcacagtgaacatcacactcaatgctgaaaaactgaatttttcttctaagatcaggaacgaggcaagaaggcctgctgtttcctcttctattcaacatagtactggaagttctagccacagcaattagacaagaaaaataaataaagggcattcaaattggaaagaaaaaagtaaaattctctccctttatggatgatatgatattttatgtagaaaatacatactacacacacatacacacacacaaattgttatagctaatagatataaattaagccaagtagcaggatacaaagtcaacacacaaaaattacctgtatttctatattgtaacaatgagcaacctgaaaagaaagttacagaaataattttattcatgatacaataaaaaataataatacttaggcattaaccaaggaggtgaaagacatgtacaataaaaactatgaaatactgctaaaagactataaagacataaataaatgaaaacaaagtccatgattttgaagacttaacattaagatgacaatactacaaagtgatctacagattaaatacaattctaaaacccattgatgttttatgcagaaaaagaaaggcccatcataaaattcatatggaatccctaatagccaaaacaattttgaaaaagaacaaagcttgagcactcacacttcctgatttcaaaacttactacaaagcaacagtaatcaaaacaatatggcattgatgtaaacacagacacacagatcagaccagtggaatagaatagaggcctcagaaataaatgctggaatatatgaacaaatgacttttgacaagggagtcaagactgttcaatagggaaaggacagtcttttgaacaaatgttactggataagccagatatccacatgcaaaagaatgaaggtggacctttatctaacaccatatacaaaaattaactcaaaataggtaaaaaacctaaatgtaagccctaaaactatagggctttttttttttttttttttttttgaggcagagttttgctcttgttgcccaggctggagtgcaatggcatgatctcgcctcaacacaacctccgcctcctgggttcaagcaattctcctacctcagtatctcgagtagctgggattacaggcatgcaccatcacacccagctaattttttgtgtttttagtacagatggggtttcttcacgttggtcaggctggtcttgaactcccgacctcaggtgatccgcctgcctcggcctcccaaagtcctgggattacaggcatgagccaccatacctggacaaaactataggactcttagaagaaaacacagggcaaaatcttcacaacattgtatttagcagtgacttcctggatatgacatcaaaggcacaggcaacaaaagaaaaaaacagacaaactgaatgtaatcaaaattttaaaacattgcatgtcagaaaacactatctggctgggtgaggtggctcatgcctgcaatctcaggactttgggagactggggctggaggactacttgagcctaggagtttaaggatacaatgaacaatggtcacaccactgcactccagcctgggcaacagggtgagtctcaaaaaaaaaaaaaaaaaagcctggtgtagtggctcataccagtaatcccaacactttgggaagccaagggaggaggattgcttaaatccaggagttcaaaaccagcctgggcaacacagcaagaccccatctctaaaaaatttatcttggagtggtggtgtgtacctgtggtcccaactacatgggaggatggcttgagcctgggaagttgaggctgcagtgagctgtgattgtgccactgcactccagcctgtacgacacagcaagaaccagtcaaaacaaaacaaaacaaaaccctatcagtagagtaaacaggcaacccacaaaatgggagaaaatgtttgcaagtcatatatctgataaaggattgatatccagaatatatagaaaactcctacaactcaacaacaaaaaacaacccatttcaaaaatgaacaacagacataaacaagcatttttccaaagaagatacacaaatggcgaataagcacatgaaaagatgctcaatttcattcatcattaggggactacaaatcaaaaccacaatgaaatactacctcatacccaacagaatggctactaacaaacaaagagaaaataacaagtgttgatcgggatgtgaagaaattggaatgcttatgcactgttgatgggaatgtaaaatggtatagccaatatggaaaacagtgtggcctttataaagaaattaaaaatagaattaccatatgaggtagcagttccacttctggataaaactgcagcaactccacttctgggaatcccacccaaaagaatcggaagcaagtttgcaaaaagatagttgtacacccatgttcatagcagcattatttacaatagctaaaatgtagaagtgacccaggaatccatccacagatgagtggataaacaaattgtggtatatctatagaagggaatattagtcagccttaagctggaaggaaattctggcacaagctacaatgtggataaaccttgaggccattattctaagtgaaagaagccagtcatgctaggcccagtggctcatgtctgtaaccccagcactttgggaggtcaaggcaaaaggatcgcttgagcccaaaagtttgagaccagcctgggcaatatagggagaccccatttccacaaaaaagtaaaaataaaaaattagtgggggatggtggcacatgactgtggtcccagctacttcagaggctgaagcaggaggatcacttgagcccaggaggttgaggctgcagtgagctatgaccgtatcactgcactccagcctgggcaacagagagagaccttgtcttcaaaaaaaaaaaaaaaagccagttctaaaaacacatatcctatataattccatttatatgagatcctagacagtaaaaatcacagagacagaaagtaaggtgatggctgctagggactgaggggagaggtgtgcagagttactatttaatgtacacagtttcagttttacaagctgaaaagcattatggagaaggatagtggcaattattgcacaaaagtgcaaatgcatttaatgcaactaacctgtgcactttaaaatggtcaagatggtaaattttatgtattttacctcaataaaaataaataaataattttttaaataagctacttacataaggcactatcattggcagaatcacatacagttactttcccattagtataaagcagacaagaaatacactattcaataacatgataaaattataaggcataacttgtgcttcattttaacctgaggtaaatggttaacagtttacagggaaggaaataataaaacatgacagaaattgctgtcttgagaagtactccttctgaaattgtttgctaaatgtttgtatcaggcaacttcaatccggagtttgaggaaagcatattgcaatgtcactctgtgagctgcccctcggcagtgagccggggcagcagggaggaggcccagctcccgcaggagaggccagcattccaacttccatagggtggggtgctgcaggacagtggatctggagcatagggtagctttgtgacctaagaaaggaattcgctagaatgtgttccatttgcacatcacacaatgtgggttcttgtgaggataggcaggtagcaaatcctcagggaacactgactgaatgaacccataactcaatggccacaggcctggacagggagagggccaaaggggtctgaagctgctgggtgaatgagaacatcctttgactttgatgcaaaagtcaccggcacttcccaggttaggtctgcaaagagtgcattttccactaaggagggcagctggcaaagcacagccttgtccttttgggtttaacgtccttgattttccctcttagcctcctgtggcaccaccaggcctccagggacaccaccgccctctaaagtgctgtcgcaatgagagaaactctctaggtctgttccagagaacacggctgaggccactggagcttgccccctctgtgatttgctagtgagatatctgactggaaaagtggtccctgtctgtgtgattctggtgcatgcttcaaaaggctgggacctcaaaagcagtgatgactcgatagcccagggaaggaagaactcactgtacaaaacaagactgagcatggaaaacaagaggactgcacagtcaaccaccaaagtgatttgaaatcaggtgcgttttgtttctttgactatataaatgaaaacattttcaccaagataaaaactgaaactaaagatgaatgttgcaggacaatggaaagagactcttcctgtcagtcctcaggcccctgctatgtgtatgtgctcaatgaatgtctttaggacaggggcgggaaaaacagagggtagaagatagaacatttgaaaaataataaagaagtacacagaataaaccaaaagaacttcctgtaatctatccaggtggaaagtcaatattttaatttactacaatgtgtgtgtgtgtgtgtgtgcgtgtgtacaaaaggggataatggggttaaaataaaatcaactcttttatatatacaagagctgaccctgggatgtggacagggtaccactgtccagcccagttcttatatatacacacactaggggatcattctgttcatacactttcatatcatacttttttacttaatgttatataaacattctcccataaggaaatagttctgaagacatgaatttttattgctgtgtaatattctatcgtttcaatatacaattactcactggacactgagtttgtttctcctttcttgctactaaaactacaatggggcacgagtccttgtctaagttcctgaatgtttctgtgtggttgattgctggaagagaaattactaggcaaaatttatcgactttttgaagagtcttcggcttatgttttgttttttttgttgtcgttgttcttcttcgtgttgttgttttgttttttgagatggagttgtcgcctgggctggagtgcaatggtgtgacctcggctcactgcaacctccacctccccagttccagcaattctcctgcctcagcctcccacgtagctgggactacaggcaccggccaccatgcctggctaatatttgtatttttagtagagacggggtttcacaatgttggccaggctggtctagaactcctgacctcagttgatccacccgcctccgccccccaaaatgctgggattacaggcatgagccacagcacccgtccagtcttgggcttactgacaaaaaggacggatttctctttctaccagctgcacctgagagaacctttgtccctgtctccttgtcttctatgagaattataattcctttttttggctgaaactatttaaagggacctcaataaacaatacaatacattggcagggaaagctaagcttgtggtgaatactctcacacactgagactgcaaaccgcaaggactgactctcacggcgcccttgcctgttcacccccttctttgtacttatcttccctctgtaactgcacctgttgttaccacctcccatcctaccttggaattccgtcccagacaacgtgtaactttgctgcaatcaggagagaggctcagtctcactttccaggaggaccagggcttactctctgtccacattccctggctccctgagctatctcagcctgagggttagatgcatttatccatgagaaattagccatatatcttaataaaacagaaacaattacataacagaggaagagaaagtgggtttttcacatttgatgaggtaaacagaaaaaaaggggaagaaagacctaggatgtattcagcacgtgcagttttctttcctaacaatatgtctaatttaattccaacaacaaccctgatagataaattgcaaagataggagctcaaatatgggcttagagaagggacaccgtggcccgcagtgacccagctcatcactgcctggtgctgatgctccatggagtcctagcacagctgacactgggaggcggatagggcacctctgtccagcctcgcccagcccagccctgtctgctccacttggccgtcctacatcacactcagtaaggtcagtgtctacagaaacccacaccagcttgttctcaaacaacagcgacgcttggccaagtagacaccactgtgtgcagcttattctcgtctctgcttgtttcagaagtgccgagtagaaggaatagttaacttccctaaaaatccagacagctttatccttgttgacaaaaactacttgtttatagccaatggttggtccgatactgttgctgggaaacagaaatctatgaagggatcagcaggtgttcagtaaatatttgctgagtgaattaatgcattaattaattcacctttctacaccaaatattcacaatgcaaggaggggccggtttggcaggcagggtgagcgttccttttctcattgaccaggtatttctaaatagcaaatactaggtgtctagactataaatttggaaaaatgaagtttgaaaatttattagaaaaagatttttattgatacataatagatgtgtatatttggggggatatatgtgatattttgttatgttcacataatgtgtacaaatcaaatcaggataattggaatatccatcacttttcttaattggactatccatcgtttatctttcctttatgctaggaaaagaatttataaaacagaaaacaggataatggggttaagataaaatccattcttatcttcagaaaacaaaaggggctgcacacaagagatttgctagagcaagcctcttaacagagacctttccacttcctgccgtgacacctgcacgagccgctcatttgtctctgcctccaagactcccttgcttttaaacaacgtgtcaacaaaatgatcttcctctaagccagtgtgggtatcatcactctcttgctgaaacaacaatcggcagcttcccagggctgaccaagtgacttgagatccccccaccatccccatcctcacagtgtgccaggtgctaggcttggcgagcaggtaggggagctaggctggtgtctctgttctgtaggaacgggaagcccacaggggacacactccaatgagccaacactcaggataatgtgaaaagtgcagctgaagtgaatgcagggctcaggggcccaatggggtagaagtagtgatcaattcaccctggctgaataggagagggggttcactatgagggggaagacaggctggctcttcaaggatcaaaggataccgccaagcagatgacaaggacgctgcagtgaggacctggggactgggctgtgttcctggcaggagaaatggctgaaggagcacctgcatctgaggtccactgcagcccgaaagcacctggtccactcactgggtctgtcttctctcctcctcctctggagcacccaagggaccaggacaacctccctctgtcccgtgggcaccccaggaagcctccctgtctccacagctgaggcttggctctccctccttggaatcctcacaggacttttcctaatctgtgctgtgaagcacattcacagtatcaggcaataggagccacatctaacgtgatggtcagttttggtggccccacgttgtccaggacagccttggccactcctgcttgtcccagcagagtactaagaatgtactcattcactctcagagtctgctggtgtgcacaatgtgccataagacacctcccaggttccccaacacacacaagcactgctggaagtacttggagggggagatggcgggagcagcacggagccgactctgagtcagaatttcagatgggccaggagaactcacagaatgcctcgatttcctcacctgtagaatggcaggatgggcgagggaggaataagtgtgtgtgtgtgtgtgtgtgtgtgtgtgtgtgtgtgtacaccagtactttatacaagcacatagcaaaaaaattcctatatggactttatctggtgttacttccttttctttttaatctttcatcccttgaagtaccaagcttagggtcagagtggaaaatgcagaagccttatatgaattgagttccccatcatatgatgaatagttgctttcagtgatttctacatattcttcagagaagaaaaaaaggaaaataaacatggtagcctttccaatgggcacagtgccattaccagacactgacagacgagacccatcacagtcatcacagtctgctgtccagtatctccatctccattaaaaagacaatcttatacacatatacatgtaagcaacctatgacttcatctccctgacacctcctaaaagaactaaacacatcacccttcttggtcacttccggtttatatacatttatttctaaattcatgtccatcctacgtatgctggttttgcaaatatttatgactgcagcatcatgtgagtatatacacctcattttcgtttgtctgttttttggagatagggtctcactccgtcccccaggctggagtgccctggcaggatcctagctcactgcagtctcaaactcctgggctcaagggatcctcctgcctcagcctcccgagtaggtgagcctacaggcatgcaccactatgtctgctaatctttttaattttttgtagagatgggggtctcgctatgttgccctggctggtctcaaactcctggtctcaagagatgctcctgccttggccctcctcactctttggagagttttacccaattgtctgacagtatttatgctaatttaaccagcctttcctactatgagtatttgcagttctaaaggatgcaattagaatctctgtaacaatcatgtaaatattttcggaggaaaatcctcacaatgcaatttctgggttaaaagtacgcggttttttttatactggccccttatgcactcctacacgacatttttcagaagcacattttcccatatccttagtaatgctgggtgaaaagtgacttatccttatgtctctctaagcatatcattgatactgactgcctcccaattaccactatccatgtatctcttagagtttgcctcttgggtccttcccaggactggctctctgatgtctttgaagcccgggagtccttttactgcactggatctttaccctttggcgtgaatattgtcccatccattctttacccaatttttagtttaaactctgttcttctttagtttctggtctatgatgtattgaaaaaaaaaaaagcctctcctactctaggattataacttatattcaagatgtggtccaaatattcctttatgttttctcccaagtccttttaaaatgcgcaagcttttgctccatcagatatttcatacgtggcatgagatagaaaactgtgtctaatgttttcacccaacaccttaagtagactatccctttgccaaggcttgacgcaccatctttattacctgtctaaatccccatgtatgaatgtgtctgctacagaactgtcttttctcttccactgattcactacatcatcttgctgtgactgacctgccctcgtttccaactgctttttaaatgcttaaggaaagtcctgtaattcatctttttctcccaaactttgttattctcacccatgtattctgtcacatgaactttatcaatttatcaagttcttgccaaaagttataattccaattggaattttatcttacatgttaatttgggaatgactagtatctatacaagcctcctcaccttatcattagccattagagattctttttttttttttttttttttttgagacagagtctcgctatggcgcccaggcgggagtgcagttgtaggatctcagcacactgcaacctccgcctcccgggttcaagtgattctcctgcctcagcctcctgagtagctgggattacaggcacgcaccaacacgccaggccaatttttgtatttttagtagagatggtgtttcaccatgttggtcaggctggtctcaaactcctgacctcgtgatccacctgcctcggcctcccaaagcgctgggattacaggtgtgagccaccgcgcccagctggagtttgttttctccttgaaaatggcacacatgaaatagacaatactcttttcttctgcctcccatctctactcttcccacagcccctaacacacccctcagctctgcaggagaaagatttcaggtaggagttgaatcccagttccacgaaggctacatgccttggagcaatttacttagtctctttgagtgttctactgtgactgatggctgttgttatttaaccatacaatctttaacttgccctaaattgtaggcttttggctactggtatatattattgtaaatatttctcaagtcagaataatgccagagtatagctaagtgttcacataaaggtttcattagatcaatggacagtctatgccagagtgaagaaaatccaacattgtggggaaggtgaacatcattagtttttctgtatgttttgttactcagcaaaatgtaatccgacagccttaataggaaaaggccattttctgtcattatagtgactgtcttccccatctgctgatcacctctctttatgaacacttaccttgcaccagttgcattcctaccaagcaactgactccaagctgtgattagattggtcaccagagatgaatgcagatgcacacaaatatcaacagcaatttgtatgctttgagcactcgtctctaagaaactcatttcagatttctctaaaacaaacttctttctcaactctccccgctaagtaggaaagagaatgcatttactgatggggaaggaaactagggaaaaagaatgagaccactcaccccaaaacaaagtcttatgtacttaattcccctcccagtgtgaccaacatcgtgtctcccactaaaacaccagccaagcttcacacaaactaaagagaaggaattttacacggggcgaggttttctgagtgacgcatataaaaatagcacaatctacatgctcttatccatgcaattgggcatggttcaggacacagcggttgagtatttgaatttgatattaaaatcaagcatgaaaattctcagatatttcacttaaaaaattagataggctgtataaacatttaactaattttgtaactcccatgccttttggttttgtaatttttaaaaatttaaactatgcttccttattgaaataaagagttaataactacagtggaaatcgttttcaacttaactcatcaacaataacagaaaactttttttttttgagacagagtcttgctctgttgcccaggctgaggtgcaatggtgccatctcagctcactgcaacctctgcctcctgggttcaagcaattctcctgcttcagcttcccgagtacctgggattacagatgcctgccaccatgcctggctaatttttgtatttttagtagagacgaggtttcaccatgttggccaggctggtctctaactcctgacctcaggtgatctgcccacctcggcctcccaaagtgctgggattacaggtgtgagccactgtgcccaaccaataacagaaactttcattaaaacttgaataatcagtatcaaactcacgacatcaaaaatcatattttcaattttcaagttatatcctcaagaaaatttttacttattgacatttatttatataagtgtatacgtgtgtgtgtttgtgtattaaaccatttttgcattgctataaagaaatacctaaaacttggtaatttataaggaaaagaagcttaattggctcacagttccacagtctatgcaagaagcatggtgctagagaggcctcggggaacttttactcatggtggatggtgaagtgggagcagcacatcccttggcgagaacaggagcaagagagtgattggcagggggaggtgccacacgcttcatgtaaacaaccagatctcgtgagaactcactcactaacagccatgaggacagcaccaagccatgagggaattcgtccccatgacccaaacgcctcccaccaggccccaccttaacactggggattacagttcaacgtgagattaggcagaaacatatattcaaactatttcaataggttttcagaaagtttaacatttttttaattttgaaagaaaaataaattcttaagaagttgtaaaaaaaattgtactgggaggttccatacccagttttctcagtgtttacatcttgtgtaactatagtacaatatcaaaaccaggaaagtgatatggtacaatccacgacctcattcagatttcaccaggatttcatgcactcgtgggtgtgtattcatatgtgggcaggaacagctataggtctatgcaattttatcataggcgtagattccctgcagcctcgacctcctgggctcagtttttttctcacatcacaaggctccgggtgtcaccttctttacccacacccctcctccactggcctccgccatctatcactggcaaccactaatgtgtcctctttctctgtaattttattatttcataataattatgtaaataaaatatagtgtaacctttacgcttaataagcataattccatgagcgccatccaatttggtgcctgtagcaatagtttctttctgttgctgaatagaattccatggtttgaatgcgccatagcttgtttaacgattcacaattttagtttgtttccagtttcaggctattaaaaataaagatgctgtgaacattcgtttataggtttttgtgtgactactggttttcattcctctgagataaatgccacagagtgcaattgctgggttgtaaggtaactgcagatttaattttataagaaactgccaacttattttccagagtggctgtatgattttctaatttccaccagcaacgtaggagtgatcaatccagcttctctacgttctacccagtattaaacagtgtcactttttttttattattcttacagacattctgataggtgtttaggaatatctcactgtggctttttttttgcattttgctaatggctaattatgttggacatttttgcatgtgcttattggccatctgtatatactctttcctgaaatgtcagtgcatatgttttgcccattttctgactggattgtttgttactgctgaattttgagaattctttatatactccaagttctttgtcaaatgcatggtttggagatattttttctaagtgtacggagtctttagagtcttttgcagaacaaatgttttaatttgatgaggttcagtctaccaatttttccttttatgaatcatgcttttggtgttaaatttaagaattcttcttctagccctatgtcctaaagatgtttttatgtttttttccgaagttttacattttacatttaagtccgttttttgtttttttttttttttggagtttgtgtaagtctgaggtttaggtcaaagtcatttgcccatcaccactgttataaaggcactccactgaattgctttggaacctttgttaaaaatcagctgggtggccaggcacggtggctcacacctgtaatcccagcactttgggaggccgagaggggcagatcacgaggtcaggagatcgagaccatcctggctaacacggtgaaaccccatctctactaaaaatacaaaaaattagccgggcgtggtggcgggcacctgtagtccagctaactcaggaggctgaggcaggagaatggcatgaacccgggaggcggaacttgcagtgagcagagatcgcactactgcactccagcctgggcgacagagcaagactccatctcaaaataaataaacaaacaaacaaacaaacaaataatcagttgggcatatttgtgtgggtctatttctgaattgactattctattccattgactactgtggtaatatagcaagcgtaaccattgtgcagaatgttcccccacagtgtcctcccagactgggattctcctcaaatcagtctatagcttttatgcaatccctgtcttcagacttcagtataaatccccttctcccagacttcaatataaattttagagtatgtttgtctgtgtgtacaaaaatccttgctgggactttgatagggactgcataaaactatagattgatttgtggagaattgacattttgctatggtaagtcttccaattcatgaaaacgggaagtttctccatttagttaggtcttctttcatttcttttaacagcattttttcagcatacagtttctacacttgttttattaagtttatacctaagtacttcattttcttagagtgattctgaatgttatgtctttattttaatctcagttcccacatatttgttgttagcatatagatgtgattgatttttgtgttgatcctgtatccagtaatcttgtttaattcacttatcagttccagaagtttttatataaattctttgggatttattatgtggataaccacgtcaatcagagactgttgtatttcttccttcccaatctgtatgttttctatttatcacctgtgctttactaaagtagctaaaataagataggtgaaagtggatatctttgccttgttcacaatcgggggaaaaaatccagtcattcacctttaactataatgacagctgtaggatttttgtagattctctttataaattaaggaaattctcccctattctttttttttctgtaaaagtcttgataatttatttttttatttacaatttttatcatgaatgggtattgtatttttcaaatgcttttttttttttttttttttttttttgcctacaatttttttctttagcctgtcaatactgtggatacactggttgattttcaactcttcaaacagccttgcacacctggaataaatcacacttggtcatggcatataattcctctaagatattgctggctttgatttgcccatattttgttcagaatttttgtgccattgttcttgagagattttgttccatgatttcctttagtacactgtctttcttcctggtatcagtgtaatactggtttcgtaaaattagttgggaatggttccctcctcttctattttctagaggagactgcatacagctagtaataattcttctttaaatgtaccatagaattctccagcgaaattatctgggcccagagatttcttttttgggaacttctaattacaaattcaatttctttagtcattaatggactactaagattctctacttcatcttgggtacattttagtaacttttgttttttaaggaattggtctattttttctgaagtgttgaatttatatgtataaaattgttcgtggtattcccttattttcttttaagcgtatgtgggatgtgtgatagcttctgtttcattcctgacattgatgtctttctctttttatttttgtccaaggtttatcaaattaattgattttggggggcaagataaaaatttttatttgattaactttctctattggtttttgttttcaatttcatttatttcttcttttatctttataatgttcttacatctgcttggtttgggctgggcacaggggctcatgcctgtaatcccagtactttgggaggccaaggtgggcagatcacttgagaccaggagtttgagaccagccttgccaacgtggtgaaacccggtctctgctaaaaatacaaaatttagccaggcgtggtggtgtgcacctggagtcccagctagttgggaggctgaggcaggagaatcacttgaacccaaatggtggagggtgaatgagcggagacagcattactgcactccagcctgggcaatagaatgagactccatctcaaaataaataaataaacaaataaaaataagacaaaatcatctgcttggtttgggtttgttttgatctacctttactagtttttgaggacttaaatttgagagtttttttttctttcttttttttaatcgttcagtgctacaatttcaccatcagcactggtttaactgtgcactccaaattttgatatgctgcattttcattttcattcagtactatgtatcattttattttctttgagactttctcttagacttatggattacttaaaagtttactgtttaacttccaagtgtttagtgatttagtgttatctttctgtcactgatttctagtttgatttcactatgcttagaaaacataaactgtataatactaatattttaaatgtactagagtttgtttaagactcatggtatggtttatcttctgaaatgctctctgggcagatgaaaagaatgtttattctgcttttgttgtgtaaaatgttctataagtgtcaatcaaatcctgttgactgatggtgtcgtttggttcttctgtatgttgggagcacatcctcctgtttctactcagtggtgggtgaaagattagctcccagcttgactgctgaaacgaggaggaagtgcatgcagcttttggatggtgtttggctggagtagggtaggcattatcaaaaagttttttgtgctcttagaccatctttttcctggtcctttcgcgggggcttttttgttggtgtttgtttgtttgtgtgtctgtctgcttgtcagcagtgtcaggttgcagacttcccagagcagtatctgggatacatgaaaggcaaaaagaaaacctaaggaactcaacgcagcatcattcctcaagtcctgaggttctcaggcaagctgcctttctctttcaaccttcagattcttcctgtgtttatttgttgtgttatggccagagttttgtgttccaggaggaaggacctgggaggaatggcactattccatcttggccagaattggaaatctgtttagaaaaaatttttaactgtttctattctctcttcgatttcttcttcccctgtgtcttcacgccttttgattgtattcctgcttctaagcacctccaacagaaagaaggctgcgaaattaaaggagttggaattcaaatcagtccatgttgctatacattagcaactctaggagaggttcagtgaaggaagaagttaaaactacttactaaaatgaggtttccaataaactgtgggtgttaattatccattcaacccaagccctcaattagcagtagtggaatactaaggcttagaccccattcactaccaagatactgcccttccgttgctttttagatgaactgctcagagaatagggtattccccactcaaactgagaaactgtatgatataatggaaatgtcaatttttttgttaggaaagcataaattatgctttaaaaattttctttgctgtgtgtcaagcaaagggaccagctgacatggtacctatcttcgaggcatgctcagttaaataataagaatcgggcagaatactcagagacaagtgaattaagattaactaaaatgtgtgtttacattaaatttaagctgattatgaagagaaaagttaatgcaagaagctgctttagagtaaaatggctttattattaaattgaaacaaatagaatttcataaaatgctcaactcataaatagtagaaaactgccagagatatgaaagcctgtaaaaaaacctgtgatgcaggctagaaagtgaagaagtcaaggcaatgctgttatattgaatgaataagaaaaagtacatttttttgctaattacttaatgaaactcagtttctatcatgaattacagacattttgccaaacatttattttcagatttcattatgatataatcagatgtgtttattcttaagtccctcaagtaacaagtcagtatttggccctttttttcctctaaaattatgtattataaaatacaattcacacttaagaatagtgaaatctctagatttttataatctttccagataacaaaagattgaagaactgctaatgctgaaactatgtgatgcgtttttacaaaagttcttcaaaatctgagcttttgtattttccatgttagtcaacttggggaaaaaatggtttctgatgataaggctatctagaattcacaggattcctttctttctttaacaaagcacgttttactatccatgttaatcaaatatttaaaataataaccttttaaacatcaactggcaacaattacattgtagaaattcaaaccagagatgctcaggaatgtgtccagaacaattgcagagggaaagctgcattgttccaaaggctacaatttccgactcctgaaacacagcccagcagtaataacagtgcagtgatcagatttccttcgttaaaaaagggctctctagacacagaagatcatgagataaagaatctgaaagtaaccacctccactgcctcctcctgattcagaatttgatgttacactcctaattttcattatagcctattatttccaaagcacccttaaaaaaatcaatagtatgtctaactcattagtatttttggtaatgaggggtcccttatgttgggggacccctcataagggggtcctttatgttactgttgattcagcattccagtaaataaattttggtccaagcataaatcatgccttcatttctctagatttcatactgtcaaatttgttcctttcctagctaatttcagatttttattttttaggaaaaaaagccatgttcttgcaccacactagtaaagtagaaaccttacatgcattgctgattttcaggcaaactatgtaacatggctttcaatgggtgcttggcaaggaggaaacatgggctaataaacgaaaaatataaatgtatctgaggtggcatgtctgcctctcccaagaaataaattgttctatataaaaaacagcatgctttaaaacattttttaaaagtcaacaacctagtgttatttaactagcacaccaagagcctcctcatgcacaccttctttctgtctttcctttctggttctccctgtaaccacagtacctaagggaagggtgatcagcaactagcagacatggagagacttcctgcagactctcaaaatttcagaattgatcgcttgctctctttattttatttatttatttatttatttatttatttatttatttatttatttattttgagagggagtctcactgtgtcacccaggctggagtacaatgatgcaatctcagctgactgcaacctcaacctcctgggttcaagagattctcctgcctcagcctcccgagtagctgggactacaggtgctcaccaccacacccagctaattttttgtttatttagtagagatggggtttcaccgtgttagccaggatggtctcgatctcctgacctcatgatccactcgccttagcctcccaaagtgctgggattacaggcatgagccaccgcgcccggcccctctcctttaataagtgttttttcatgtgtattcttaatttatgaataaaaactgtacatatttatgatgtaccacatcaggccttgatgtgtctacacgttgtggaatggtataatcaagcgaatgaatatatccatcacctcacatccttagcattttttgtggtgagaatatttaaaatcccctcttggcaattttcacatgtccattattattaactacagttggcacgctgtacagtagctctccagagcatcctccttccgagggacgctacacgccaggacaacatctggctctgtctgccccactgcactctttctctgggcaatgctttccttgaagattaggtcctcttctgcctctggtcacctcaatcaaaatagcatcactaccagtacacgtgcttgaggtgtctattgttcttctattgttctggcattttctcagaaagaaagctaaatcttgtttcttgtactgaccaaatggtgctgcaggctctgatacctcttgagaacctcagaactccctaacttctgagctaacttctgagctgccccaggcactgagggctgcccggatgtccacaggcactttccccagatggtggagctggtccttattcttagtgtcccgtcaccgcagacactggctccagttaccccttcacgacacacatcaagcgggcactgtagagccgtgagggctacctacgctgggtgtggcaagaagaatcgactgataatactgtgtaagaggaaccagaccacaggagattcacaggtgaaagacagatcagagaccactgcagttgagggctccacgctgaggcactgggaaaaaaggagcggtcttcactatattaccaaaattactaggcaagactgggtgaataattacatattggagaaagaagaaagagaagaagatgatctttgggactgagtgacaagtgaagcacaattcaggagacctggttattgactttggtcccagaaactgtccagaaatacatggtgggaggtggttgtaaaaaagaactcaaccgttagaggcagtgcagccaagcaaagggattggccagtctcttttaaatacagatactttctatttcctatatgaagattaaaggaaagaacctgatggagaagaagctatcattttagaaaggagacagtgaatgtgggtacaggaaaagccgaatatacagggtgggtagagaggtgaattccatggggagcagcatctctgtgagaaatacactggtctggggcgagggcaggctacaggtaaaccaatgctgttggtcttctgatggaaacagaacttgagttccataactatcagcaaagatgggatgttaggatgaaggccttgaggacagagaatgttctgggtggtgaagacgatgaagataaaataataaatgtatttactaggagacattttgtcatcagagaccattttctccagtgtgtgggcttgcttcagatgttttccccagcaacttttggaaggctggaaaaaagcaacataaacccatgatttaaaggagatagagggacttgaaacagatttctttgctgcctaagatgggaggcagaatcaggcaattaagcacgagtcgaactaaaatttctgaaagagcagaaggaagagtaagaatgggagagagggagagaagacgaccagcaacaagggttctcgaaagcagaagagcacctttgctcaaatgcctgacaatgtaaaacaagaaaagagagagacagagacagagacagagagagatcagaagtagttgagaaacttggagaaatgtgaagtcccttctgagcagatttcaccaaggtgctgcttttctgggcatgctggaaggagtaagaattagggtagggaggaaaaacagttactgattcatttcacaatcaatgtggaaaaatccaaattagtccaaatgcccttcccaattacatgttaatagccacttaacattttgtctctgcatcagtagaccaaactttgaatcatattaaatgatgtctgactttttttttctcattaactacatggaaaacagtctccgaaaatgttacccatgtaggcaaagtaaactaatggttcactaaacaacacctccaatgaatcggtgctcacttggcacaccctcattgcactccaacaaagatcaaggcaacgacacaaaggaggaccccttaccccagaggtgtgtgcagtgatgatgggttcctctcagtgccaagcctgagacctcagtttccccacactttatttcaccactgtgtcatgcactcaaacacccgaggggtcgaggctcggctcagccgtggagataaaacacaggattaaacggagatttaaatcccttggtagaatctgaccatatggaactccagataaaaatggttagagcctctaacaactttttttttttttttttgagacggagtctcgctctgtcaccaggctggagtgcagtggtgcaatctcagctcactgcaacctccaactccttggttcaagcgattctcctgcctcagcctcccaagtacctgggattacaggtgcaggtcaccatgcccggctaattttttttgtatttttagtagagatggggtttcaccatgttggccaggatggtctcgatctcctgaccttgtgatctgcctgcctcagcctcccaaagtgctgggattacaggtgtgagccaccgcacccggccacccctaacaatttttttcccaacttcttaggcctgacttctgagaaacattttcttttcttgtgtaagatttactgcggaaattagaattagtctgaatgactaaaccaaaacaatgacttgaacatgtgtattctattgctcacctatcagaatatcaaatatataattaaattaaagtcaattttaatgtaaaatgaaagtatatgctattttttactattatatgagatgatgttggaataatggcaatattcagaatatctggggatttaactcaattttactttgcattctaatgttttttgggctacagttgtcttcccatttactaatagaaattgattctagaagtatagatatagaacattcttggacattccaatgggagcccaaagtgaaagatcttttcttgaaagctacttggttacatggataaaaaacctgaaaacaatattcataccatttgactcagtaatcttatttaatgaaatatatctcaaagaaataatccataacacatacagtaacttaggcacaaagatattcatcaaaacattatttagtcaaccaaatcagagcaagtaatctaaatgtccaacaatagaaaactactaagtaaaatacattatttggccagtcaagggaatattatacagcccttacaataaatgtaaaacatatttaatagcacaagagtatctataatataaagttacatgtaaaagtatgatagtaacttgtatgtacagtgtgtaaataatagtgcatacatattaaatgtgcatgaaaaactaaaagaaatacatccaaatgtattcacatattataaaattttcttcatgacaactttttttaattttggaaaataatagatattattttgtagaagcagtcaaagagtaatgagtatcaaatttcctaaataatgatcttatcgactccagatgggtcttcatttcacaatttaaatatacagaacaggctgggcatggtggctcacacctgtaatcccagcacttggggaaaccgaggcgggtggatcacgagcccaggagtttgagaccaccccaggcaacatggtgaaaccccctctctactaaaaaaaaaaaaaaatagaaaaattagccaggtgtggtggtgcacacgtgtagtcccagtgactcgggagcctgaggtgggagggtcacttgagcgcaggaggcagaggttgcagtgagccaagatcacaccactgcactccagtctgggcgacagagcaagatcctgtctcaaaaaaaaatttttaaagtacagaacactccacacaggcaaaaagttcctgcacctgacacaatgttaaaaaaatataaaaatgtaatatcacatatgtgttatgtataaagtcacatatgtgctatgtataaaaacccatggggtgtacagatcatgtatagagttcacagctaagtgaaggagaatgtctgcctcacttctttccacttaaccattctcctacctgctttcctccctttcatcacatctgaacagagcaggtgtctaagcaccccataagtttgcagctctgaaaacccctggagattcttctgcaccagctccttgcaggttgtaaccctcttagaaactatgtacccaacatggctgccaccagaaggatgatggtagaaacatttcaggtagtcaaaacccccagtggtttcacttgtatcagggataaacatactaagagctaaactaaatagaatttaattttgggcacagtagcaactggtatatatctaccttctgatgaaacatagcaagatatcccagtctcccaagtatttaaagaaagaaaattcctgtttcttataccaattttaccattttttgctattcgtatcccaccgtggttcccttgggtctttccatgccttctagtctgctgtggactaagtgtcagctccccaggccaagtgcccagaaactcatccctttcttcactcctgccctgcaaccacggcccaacagcgtccctaggagctgtaattattcattcttcacacattccttgcctggcgcgctccattgctcactcgctcctgggctcaaaccaaacattctcttcatgagtttcttcagtaactttaatgtggccttgaggacttatgagtgtcacaagtcaaacttgcaaagcttgaacgggggcactaaaaaagtggaaaatcccaaactatcatcacttggatttatgtcactggacatttcatttagttacaagagcagttataatagagttaagctgcctcttaaagcttaagtatttagaaggaaagagacagtacaagaatacactaatcaacacggagcaattgaactaaaaatcaagtcatagcagagaataccagaggtaattattcagtgacattatgtattttgaaaatcaaaaatggcaaagttcactgttttgcctccttccagttagctcccactgtcaacctacaaaatgcaaagtgctttgataagcctagaattttaaaaatctctctctatatagctcactttgcactaacctgttagagtaagtgtaaattagttaacagcacttcactgtgaagcatcaaaactagtgttttgccatacatattcacaaaaccagtcccttacaagccctcttctctaccatctcaacgggctccactatcagtataatggaattctaacatgttttgttttacatttcagggttttgttctgattgttgttgttttcacagtttcctttataatgcaagtagccatacagaaaaaaaaaaaaccgtagaggtgcaacctagaaacattcacgcttttgtgataatacacagaaaatagtttagtaatatgtaagtctgatatgtgagtccctctctggctgactgacggttcctattaatatggcagcatgagcaggttctgatttttctgtttgcacattattgcataatcaaatatagtcttgggcaaaggttgccatatcaggaaattagatgtcaattaacagaggcttgctttcctgtcagcctttgtttaacaaattccatctgctttcctctgaaggatgttggagaagagaattttccttaattattttagaaactcagagatgcgataaaaagagaaaaaatactgagccaaacagactcatgaggtatccaaacttggagacagaaaccagcagataaagccatcactgcttatctcctaaggagaggtaaatgtcattcaagcaggcagctgagaaccagtgcaggacaatctgccccattaattgaccttttcttcttaatctcaacaaaccaaccaatgcccacgatctatacccacccaccaattctcagagttgattctaccccaggtgtgctaatttggttacattgggaacaaagtgcattccccttgtaagcatctgaactttgaaagaagcagccatacttctgaaagagaaaaagaaaaaaagaaaaaaaaacaaccttaagtaacatatgtgacaccaccattgtagacaaattatgtcaaggtggtaaattagcgcaaatgacttatttactctctttacattgtaatttcttccacacaaacactaaatccattaccaacaggattccatctacagcggaaaaacctaagttaaacagttggaaattgtttgtgggggtcactggctacttccaagtttggtacacactccacatttggatctatataatcctaatcctgactgggtagtttcctaaaacttaataatttgcacatccacctttttcctatgacataataaaatcaagcaattttcctggtctctctgcacatctctggtgcaggcagaccaaagtcttcatctctacacctgcagcggtttacttgctcggactttatgtatataaaattttttcattaataagactaggaataaaaaaaaatagaatatagcaaaaaaaaattttttttgagatggagtctcgctctgtagcccaggctggagtgcagtggcgcaatcttggctcacggcaacctccgcctcccgggtgccagttcaagcaattctcctgcctcagccccctgagtagctgggattacaggcacacgccaccatgcccagctaatttttgtatttttagtagagacggggtttcaccatgttggccagactggtcttgaactcctgacctcgtgatccacccgcctcggcctcccaaagtgctgggattacaggcatgagccaccgtgcccagccaaaacattattttttgtagagatgccataattgacatccaagcttaaaattatctgcattaaatgctggctcctcgccccacactggccgagtgcagcactgcagacgatactgaccacacccctgtcctcttccttttgatctggattatgaactcaaagaatgttaagattgttacagaaataccacaaaagattaaaaaatggtgcatgaattaaatgtatgtaaaatgttctaaaaaacctgaatatggacaatttggaacccaacaacaaaaactaaggtacttctctactggatggttcttcttaggtaataagggaaatgttatgctttggatacaagagaaacatttgaatagctcactgaaggttttattcacaaactaataattctaaattcagaccaaaaaaactgatgcaactatgtttgagacctgaaaattactgagcatggattcggatgttaaatcccagctgtttatgtacaaagtagctgaggctcatagcatacagcaaagggaacctgaagaaagagttttcgggttctacacccaccatgctttgacaacacaattgcaagctgccagaggagatgggctccgtgccactgaccaccatgtggacaaccaattaaaccacatgcagtatcaaatgacaagaagctgtggtctgtgtaaagcaaatagaaggtctccttatgtttcaaacagcttacggactctaagaaacatggaaatcagagctgcaaggcaactcagagagcatccattccagcaccctcattagaaagatgatcaaactgagtctgaacgacttgccagagttcacacaaacccttccttgggatctaaacgctcttacacctcagattttctactgcagagggtgagcttgaaagctaaaccctctatgttctctaaaggcaaaataccctgaagtatggaggaaattgcctagataattaacattccaaacagtttatgataatagagtaaaatcttaagcctggagaaccatgttttatttagcatatttagtattgcttcaaactttatctttattttatgattgaaaagtggttctccaggcataaggagaaaaagaaagataaatggataattgattgattgattgatatagatacagatatagatacacatagataagcactgtatttcgaaaataagaatgcttcttttaaaaactggttttctctgcttctaaatgccaacacacacacacgcgcacgcacacacacacacacacaagcaaacaaacaaaaacccaccacaattaattaatatttttgaatctctttgaatttccggatctgctttcatttactcacccatgatcaccagccttttacaatctctgagccaagtacaggccaggtcccagagaggcctctgcagaggtggttaatcaatattgtcctcttatgagagtactgtgctttacagaacagtccagaaaatacatctgcccccgagctactattagtgactattcctgaacaggtatacactcttcatagaattatacaaaattaggccaggcgcggtggctcacgcctataatcttagcactttgggaggccaaggcaggcggatcaccaggtcagaagttcgagaccagcctggccaacatagtgaaaccccgtctctactaaaaatacaaaaaaattagccaggtgtggtgacatgcgcctgtagacccagctacttgggagactgaggcaggagaatcacttgaacccgggagtctgaggttgcagtgagtcaagaccatggcattgcactccagcctgggtgacacagcaagactccatctcaaaaaaaaaaatacaatattagtcataagagaaattttagggatgacttcctccagaggaggccaaatactttcatcactagaatctttcatccaaacagaatttcattttatatgtaaatatatctgatataaaaattatatactatactatatattctcattgtatataatataaattacatgtcaccatacctgtgtatataatagaatatattcaaagatggaatgggactctccctagtgggatgcagtgtctgagcactgcctgtttcctctgctgccacagcccccaggaggaatctccaggtatccaaggctaccaaccacggccacgcccagtagcttcagggagccgtattttgttctccaaattaagctactattgttgacgcctcttgcactttctcctcttcaacacacacctctatccctcttatttatttatttatttatttagagacagggtttctctctgtcgcccaggctggagtgcagtggcgcgatctcagttcactgcagcctctgcctcccgggttcaagattcttgtgactcagcctcccgagcagctgggattacaggagagtgcaatcacgcccggctaatttttgtatttttagcagaaatggggttttgccatgttggccaggctggtatgaacttctgagttcaggtgatccgcccaccttggcctcccaaagtgctgggattacgggcataaaaccccacacccagccctctttatcatttattcttataataggtacaagaacataagaaggcttaatacatacaaacctcccctcaatgtcacagagactgttactgtaaaacaaaaaatatcttattttttaaaatcaattaattataacaagtgctttaatcttcatttctgcaaaatatcactcatctccttgtaaaccagtagattatttgtcaaaattttgccttcaacgatgtgggcactgtcagtcaaagtggctttgctaatacagtactcttctctgctattgtcattaatatggaagaccattctgattcaatcctttagccccatatttcttaaactgtattctaccaaaacctctgtgaagaagtgctaattaagggcccctcaccccttcacaaagaaaaaaaaatttccagtcaaatatatctggaaaacgttgaattcttcaccccctcatgaagatttgcaaaatcattaatgtattaaagaacctgacaattcctgcagcaaagaaacctattttatgtgttggccataatttccaatattatttgagcagaaacacttagattacaggacacacattaacgttctataggacggtgttctctaagcaacattgttttagtccatgccacaaggaatgacatctcacaaggaatgattacaggacacacattaacattctataggacggtgttctccaagcaaccattgttttagtccatgccacaaggaatgacacctcacagggaattttggtgcccagggccaaatcaaaagaaagattcagaaatgaaaactcattcaatggcacagtccaatataccctcataccaatgagttaactgcagaatgcttaagagcctcaacaaagaatatcgcacaatcaatccaggtcctcagacaggtatccccgccccctttctaggatgcatactgccttggaaaggcaaggcattttgcaggctctgccctaattgtggactctgagccttcagtgtgtatcagtggtgagaaattattcttggagggcacctggcagtaactccaacgcctcccaagggttcttggcctatagctttggaaccactggtctgggtcatagggatggcactgttttccaaaactcagatattttttctgggacaagttcacagggatcttcatgtttaaagttacggttaatttttatgggctaaacacccaaaaaagagaatctctgcaataaaacagttcaaagatacacctttactgcaagggccattgactccaagaattcactcgacaaatatttaccaagcatatcctacatggcaagaactgtgctctgtggccattctagtatacttttggcctgatatatggatttatctctcacatagagaattacagtcagcataattggcaaaaattaacaatattacaataaattatccgaattggttttgttctttcacaaccatttttggtctgcatagatacacacacacacacacacacacacacacacaccatggaataatggatgacccagaaaacttgttccttctactcattaaaactaattattgtaaagtcttattcaaaaaaataaaatttaaaagaacagtgatgtgatgttgagctaactgacaaatattttatacatatatggcaaacacagtcagggttatatcattttaagctagcagattttgtaatctttaaagttaatacaaaataaaataaaacaaatggaccgggcatggtggctcacacctgtcattccagcactttgggaggccgaggcgggtggatcacctgaggttaggagttcaagaccagcctggccaacatggtgaaaccccgtctctactaaaaataaatttaaaaattagccagccacggtggcatgagcctgtaatcccagctactggagaggctgaggcaagagaattgcttgaacccgggaggcggcggttgcagtgagctgagatcgcaccattgcactccagcctgggcaacagtgagagactcggtctcaaaaaaaaaaaaaaaaaaaaaaaaaaaaaaatatatatatatatatatatatatatatatatatatatatatatatatatatatatagtgtcatgaatcatggcatgtggattcagcagttacataaaaggaattcttttattgtagaactggggtaaaacatgatgatgatgtaatcaatagaattcatatcctcttttaaaaacaaattaggacacttaaagaactgtgatgttctcagatcttaatcttattcttattcatgtgaaatgttagtaccgcacatgccaaagtttttgatatctgtagtaaatgcttctgtgagatgtttaagttcagtggaaaaatgcaaaaagagatacattagttaacgtttacacatggcttctaattctggatgtggtctcctgactacaaaggaatgaggggcaatctacatttccagctacagagatcaagagactcactctatcttgattgaatggcactgagcaaatcgccaagagacctatcttagtcctcttcttccaaattttgcagctagacaatcctcttaatggctggcataaatggcccagaagtaagttgcaccagaaacttgcaaacaaatgaaaaccacctctgctccacggcactgctgagtgggcaggcggaagggaagacatagcccaaagaatccctgtataaaaagaatgtcaaggccaggcacggtggctcacgcctgtaatcccagcactttgggaggccgaggcaggtggatcacgaggtcagaagatcgagaccatcctggctaacacggtgaaaacccgtctctactaaaaccacaaaaagttagctgggtgtggtggcgggcacctgtagtcccagctacttgggaggctgaggcaggagaatggcgtgaacccgggaggcagagcttgcagtgagccgacatcacgccactgcactccagccggggtgacagagcgagactccgactcaaaaaaaaaaaaaaaagtcaaaacttccctataatatacgaaagctccaccctcatatactttctaaggagacacaaaactttcggtgtacaaaggtaccagtgattggtgcttagaatatcctcaccagcgcttacatatgctaaattttgagagaaactgcaatcctttactcttctttctgctttgaaattagcataaaagttccccagtgaaaggggtaccagctacagaatactttacagactttgtgatctttggttggtggtattataattgggtacaatcacacaaattatggttgaattatgtcctctaaagtaaacactgtatacatcacatttagcctgtaagattcttctttgtcctgagcccaaattccgagacattaaagcatttcattggaaatttacatatcactttcttcatgcacttatatatttattcatttgtttattcttcattcatatattcctttccacaaatattcgtatctattgaatattggatcctatgcaaagaacggctcatagaaacagccctgcctcacggagtgtatgctctaatggagagagatggagaagaaagactaagcaaacaaccacacccaaagaacatttaacactataataagtgttgcaggaaagaataagttttcacagaaatgcagaatgggaaatgtctaatttagatagcagtgaaggtcatggaagaagataaagtcctgtgagcccttaatggagcatcttttgttgtcctgtagcttgatgaggtagaaagatcaaagaagcagaaccagttcccagctttgtcctgcagtaagagtaagaaagtcggtgctatttctgagcctatttcctcatctaaaaaaatggagatgaggttaacacctctattacctacctcaccagctgatgggtcaagtttgataatcaaatgtgacataatacctgaagcattttataaaccgcagaatggtgtaaaactgttagttaccaactccctaggtcacacctcattatgaatgacaaaagatttcaaatgtctgataggcttcatttatttattccaaatgtttggtagtcatcaaaatgcaatgatcagcatgcataagacacagacccctatgagaaagaaaggttcagttactcatagacgaaaaagaagagctgtcacccatattagattctgaaaagtcagttgatgaattcagatggtattacttgtgaaaatcaagaagtctgcagtcccaaacatgagcctttctttccaagagatgtgacaccctaggagaactctacacctgctattgacacttctcaatttcttttgttcctgcatgcatttcattaaaagaacactaccctcctcattaacatctactccattcttcatttaaatgaagaccaaatctacaagatactttcatttggcaagtagtccaagaagcaacagctatcttttggaactcattttatttaccattatccaaggaaatataaacagaatattttatctttggaaaaaccaaatgttggagtcaaagacagacaccagtcctaatttgtcaactgcaactccaactgcaacctaccagatttaacttatttacatgtagttaattcttttaactacatgtaaataagcagatttgccccatcatgtcaaactaaagacaacataccataagatcctagagcccagcacgggctcaagcaagaggccatccacaacaggaccatgcatgtaagatccatttttttaagagatgtaacataagctttacaaccttcctgaggggaaaggcaaaaagcattctcattttgctctctataccgtacgttctaatattaaacacaagcctctcttactaaagagcgtattatataaggtattattgtcttccatctctgaagttcattatatgctttcttatcagtgccccagcattgatgtatgatcataacttatgcatgaaacatactgtcagtgaaaagtaatgtgctcaataaacacccttacctcccaaatggagcaacctagagccaagcacagacacacaccctggaccttacccctgaagtgccttccatgtaagcagttttccaaccccaactgggtcagggaaacgcttcctttctgctgagtcatcccccagcgtgctttgtaataagagcattagcgcatttcctacctttaaactgctaatagcaattcatatgcaaactctgaatatggcccagggctctccagaagcaatcagtaaaggacagcctgctaacatgtgatagtgtgggtgtcctcactgagattttctctgtagagctcagcctcttatgatatcactttggtatcaattgtgtccccacacaatgggcatctggaaacctccgactgaattcctgaggattaagtgacttgcctgaggctagacgttcccagggacttggaaacagaacccatagctcccaatgctgtaaggctttttttaaacacactacatggacccctgggattcagctcctcctgcctgagaacctggccagggactagatgcactgtgttcattcagcactcactgaaggcaaagcagcttctagaccctgaagtagggggaaggaggactaattaacataaatttagtcaaaagatgtctaaaagctgcattttccaaacctctaaccctagctcactctagcctgaatctgcctctcctctttgcccctcttctaaaaagaagaaaaacataaaataatagtgcaaatgtgtgtgtgtgtgatttttgtacatgggtatgactgtatccatttagtagtgatacagctacaaagctgcttcttgaaatgtgctaaaattatgttcatatgcacacttatttcacacctacacattaaaaaaatggattttataagaaaatgcaacaagtgagaagtgcacacaaaacagctagcataatggatgagtatgtctcatgataactaaaaatacacattgtatgttacccaaaaggaactctaatttttaaaaacaaaaaacaataatttattatttatacacatgaaatgagaaaaaaaaagtcctgtagttacactttcattaggattgagttaattttaatggattaattaagtatgaagtaatagcgaagtgcaagttaaatcacaggaattatcattactatcactagagtctgaatctagttttatgtccctaataccagatagttaatgaagtaaaaagtaagtacatgtaacttctccaaattaacagatcaaacaatggctcattttaataaattttttaaaactcatattttaaaatactgtttttaaattaaaaatccctaattgttttgtttttcaatattttatgtttcctatacttgcaaagtttttcccatgtgttgatctcttcatctatctactcaacacatttattgttccctagaaccactggtaagcaccaaaattataacacacacagtaattttcagcagacagtgttattggacatacgcaatctcacttatagaaatatacaaactaaatctcaataattatctagccgtgtataatttttatagattatctaaaattttaaacaggggctaagagaaacaagagggaagttacacaaaacaaaattttctttgacaagtatcaggtcaactaatttttaaaaaaaaagaatgtacgaaaagaaacattaaaagatttagaaaaaaattggaaatgcataactccactatccatgaagcaagctatggcaaaaccaatgctaaatattaaaacattcaaatcccttcctagattgtttccacaaaacaccaaaatgaatgatgagatatgcatttacatgcttaactgatctatatatgtgtttatttgagatcagagacattttttggaggcatcatctacacaggctaccagtagataaggactggagtctacaattgtttaaagcaaaaagcaacaacagcatcattgttgtgtattatctgttactgttctctgcaatcacactaaaaaaactcttgaacaaatgcatacacatctctccccattttgagatacgtgtgtttttcaaagtccttgttttgaactttggtgaatttgtatttatttcactacatacacgttttcaaaaatgcatctatcaaaacctgaggagaaaatttcaagaaagaatcttccaagatcagttatccctcattcattctacctcaccatcgctaatcctctatctaaattaactttttggccaaaatagtcatcttacgccacatctcaaatcatgtcaattacctgctttaaaacctttaccatttataggctccttatttcctgaaattatcatgtgaagcccttggcctcctgcagaacggcctaggtgcacaggggtttgtcttgcttttccaacttcgtctctggaatctccccttctaaatctctgatcctgctcatccacccattcgtaactctgccattttctttcctaacccagaatatcctctttcaagtaagccagtcagaattctattcatacccctcacacaatttaaatataatttatttcatgaaagtttccacatcaaatacctccttcctcccagccagcttctctcgtccctcctcctccctccctctctgttctgtgtgcctctgtcacttgttcctctaatgggacttgccacatcctacctgtgaacaaccgtttgtcatatctgctctaagagttacaacacacttaaagtgagaccatttattattgaatttcataacttaccacacttagttttgtgtgaccagtaaggtgattaataaagctcatgaatagattttactgttctcaaacattgactgagtggcagctctaatcctatgcttatatattttctgttcttcccctctaaaacgtgagtccctaaatatttaaccattgctctatttgaggctcctttaggaacaggtgaaataccatagctattatcatgcacaaatattttaaggaaaatcagatttttctaaaacatgacgtgaccaatctgcttgtgggaggaagacattttaaatggctgacattcacatctgcccaatagccttcagtctccaatcctactgggatcctcaatatttgtttataataggtgtgtgtttacagagccagaaaaattactgtcataagaatgcaaaaaaaatgcgtacaagtatattttggcatgctatgcatacctgttggctatggaatatacacttaaagattgttcaatacaatggcctgtatcttccatttgtctttctcttactgggttcagagaaaattgagacacttcaaatcatagactacaaattaggcaaacactgatgaagtttttaaacgtaccaactatcagcatgatgccagaacaactggaaaactaagtttaaaaaataattcaaacaaatatgtgatggtgtgcaacagcacactctcctcactccccgaattattttactattgtgtagagttcttaaagggccaaatcaatacattttctcttccacctgccatcctctgacataattatttttgacataataatccactaaataatcaattaacttctgtactaaattgtcttctctagagaatgtgaagtccccagttgagaaaatcacagatcacacagtgtggatcttaaatgtattaacttgtttccttataaacataaaacaaacattttgagtaaaattatttttatagtattacataaaaagtaaaatagacatgttaatttttactgtaaggtaatttatgcagtcacattccttctgtgttccttgctaacacttttactgatacaatatttgacttacaaatgtcctaagtgatatactttggaaaaaagtacatttttaaatacatgggattgtaaatttaaaagctttagattaacagtgaaaaattaatgagaacagcttggcgtggtcaaaagtttcttcctataagatccttagtggtaggtattttaaaagtatctcactaacgtctatttttaaaaatagttttactttatttgtatatattcatatatctgtgacttactgcaaagtttctcaaaatattgtccacaaaatacccgcttcaaaatatttgaagaagtagttttaaatgcagggaccccaagactccagcctatcttgatcagaatcccttggagtgaggaactagcaggcacgcatttaaagcaagtttgcccacgtgattccgacgtacacgagagttaagaagcctacagagtggatctaaaaccatgtctcactgtattctcaatgttgtatgtccgaaagaaaagttgccaaacaatttcttccaaaaaacaaatattgtttacaaatgctccttccagagtgtccctccgcagaaaactaaactagttttcaaatcccacggcgtttcagctcaattaacaaatgaaagggccatccttctcctgattccctggcgtcctaaagcactcctggcaaaagcccgcttcgcacctcggggtactgacctccgcttcccacaggtcagaatattgaatccagtctgcattcacagaagacctaagtgacactgtgtcaccagcctccgactctcccggtagagcggctcctctgagagcccgcctaggcgcggcctcccgctctctgaagcagcggaagcctgtcagcacctcggacagagactggcggtgccgggcccgggtctcccagtccaggaggcagccttggaaaaaccgcagagacacccctggaacgcacagaccactgtcttcgttcccctttcctgcagccagaatctctttccaaacgacaacaaaggaaaccttaagtacctcttacctagaatataggagccacccccacatctcgcctctcccggttccccagcgcctgttgctaaggaggcgagacagcgctcgggaaacctcgggaccaggcgacagagcgctggaggagctgggagcccacgggcagcggcagatgggagcactaggccggccaggactcccccgcaggaagggtgcgccctcgcggctccgacgccagccaggcccccgagcgcccggggcgggtgcagggagccgggcaagcgaggggccggcgcctgggagcgcggctccctctgcggaccggggaaactcggccccggccgaagaggcctccggcccagcactgtggacgcctgtgatcccagacagcgggccgggggctcagggaccgccctgggagggcgggcactcaccatgttgacttcggaaaccatgtcgatgctggcgatgtcgatgttcatccccacgcagaccgggggacctgcgggaagcacaggacacggcgatcagcccagctccggcgcggggcgcgggcggctctgaggactgggggctatcccaggaggggcgcgggcgaagggcccccactcccacccgccgctgctccgcggatgcggcccccgcctccctccgcccaggccgccgccgccgtgggtcgcgcttcccgcaacggccgcgcgcagcccacttacccccgaagtcgggtcttaggcgaatgtcgtagcctttcaacagcttgtccaccgtctccttcacaaaggacatgttcccgggatcgttcacactgggggagggacggggagcacaaagagcggggtcaggggcggctcagccgccagcgccccgcgcaccccgcgccctgcccgccgcccgccggcccacccgcgaccctacctctgggcgcagcacaccacagccaccagcaccggggccgagaagatgccgaaaagccttcctcccgcaaggccccacatccctccgccgcgccccggcacgggggagggggcgccccgccgccgtcgcgacccgcagccggggctgctcctgctgctgccgccgccgccgccgccgccgcgctggcccggagcggaggagggcggagggggaggggaggagggggaggagcgggcgctgggagaggaaggaggagcggggagggaggagcgcgcgcgggcgcggggcgggggaggaggccggagagtcggaggcggagccgccgcgccgcgcaccctgccctcccccacgctcgcctcggcccgaggccggggccctgggcgctcccctcccgcctcggcggccgccgcacgggactcggacctctgggaccgcggagtgcgggggcgacctgggccggacgctgcgagcggagccgcggctgcgcggagtcgggaggggcggggggtcgtcccctgagccggctcctctgggctctcggcggccgggcgagtgcggggactgtcggcagcctcggcgccggcataagcggcggcggaaacgctgcccgcctaccccggccgccgaagttggccccgcacgacgaccaccgcccgctgcagcgcagcccgagagcccccgggtgccgcgcctctgcccgccggactgcgggccgccgcctcccgacggtgcctgcagaacgccgggaagcccccgcctcacctgcggggctcagagcctcgggtccccagggtccaggagagccagatgggcagcaggagctccaggagcccggagcacatggcgctgttcctccggcctaacctgctgggatccgctctcccccctactctccgagcagccaaacggcgacgcagggatccccgcccctacccccacccccacccccaggctttcccgcctgacccgtcttccagcccctgccgtggcggccctatttttcatttatacaattggaccttttttttttaacagctgctccttaaactgcacctcttaccctcactcctgaacatttcttgggagcactgagccctttctgctcacatatatacaaatgtaatggatggttaagtgaggactgaatatgtgttttgttatcagcaaactggaatcccagccagacttggagactggattgtcattccaggtaaaatacgtgccttttttggtgccgcccagagctatccgtggtccttaatataaggcaagggtccttgcttccctgcagcaggcctccttcggctgtcattagaaggctactggcgcactggtgcaaggaccctggtgtaccagtgcacaccggatgcaccccaccctctggaccaccaccgcacacctgaggggccactcacctacggccacaggttttatattttagtgagtgatccccaataaagtttatctgtacctcggacttctaatattgaagaagatggttacacaatcctacttgtagccaactaacaaaatctacacatcaagctcgtttttgtgttctgtagacttcttcagattattccaggacttaatgaatggttaataatagataactactttcctgtattgactcattttttttcccatgaagcttaagcttttaacatcgttgagactttatattagtaaatacctaaatctagatcctaaatctcacgttggcatgtttctgtgcattaattttaaatatactgcctttttaaaaaatcagctattttatttttggaacagaaaatgtgaccgcagtacctgaaagattcagagataaatatagcatcctaattattttctggaaaagtctattcaccactgctttgcattcaatgttctgttaatgcacaatggaattatctggaaaattatatctgttgcatcacacacacattcatatttcagtttatttctcctatttgcatgcagttcttttggagaaatgccctgctggggatcgtggctataaaaagtaaacaatgaaaagaagttgttttaataaaaccaacaacatagcaagaattagcccccttactaccagtttatatgttctaagacttgcaaagccacattacaaacattattatccaaccgtgcatcacatcagaccttcttggcttcaccttctctggagcttttggctttatcaccccagctgctgcctcagcacccagttctgcaagaggtctgatcagctttacatgggaacaagcccacatgggatatgatcacctcatatccgcaaggtctgagatgccacgggatttgctcagtactcacatatatgcaatctgaaatttcaggcaagttagaagtctatgaggcagacttttgtctaatggacacatatccatggatcaaagagtctccctttattgcctcctaagaaatgtcctgagatgcagtcgctgttggcctctcaaagatgatcctgtgagatggatccatcttttgtacttcatactcagcagtgggtggtctgcctggtaatgaaccctcctatctgctccctctctttccatgccacaattcccttttcctttgctcctgttttcattggaatcaaacatcctagtaacatatcaccacctaaattttgcctcaggatatgttttctggggaacctaggctgagttgtaaattagtcggcaagtcactagaagtgtcacctaaaaacacagtctctttcaaaaggcaaaatcagagagaaagactgcaaaggtgtgatcaggatgcatgggctataaggtccttacacacccacacactactgcacatcacagtcgctgcccgacttgcacctacatccgcaacaaagggtggacatgcagcctgccgcccttcctcctttctcagctccctccaacataggcagccatctgggaggggtggagaagcactgaacaccagcacccacatccttgcgctctcttgcttagatagtaattatgtattagccaaatcagcagaaaattattaattcagttcttacttgcattcattttagactggaagaaaaaaaggctccaggagtcccacagagggtaatttttcatggcagaaggaaaaggagatgaatggcattttgttcataggaaggtggttttaaatggtctagaagaatatttggagactctcaaggtaaaaagaaggaagggaagcagatagctgggaggcatcaggtgatcacgttaccttatccatgtttgtgcattttcattgacccaaatgccttttacccgaactattttgttcagtcactcttcttttagaaaacttgtttttttaaacagtatcaaaattttctggcactacattttaatgctcttcaaaaaaacaactcatagcacatgaaataaaatgttgcatgtatagatactgagtctcaacaaatgtataaactagtgtacattttcttttttttttttttttttttgagacggagtctcgctctgtcgcccaggctggagtgcagtggcgggatctcggctcactgcaagctccgcctcccgggttcacgccattctcctgcctcagcctcccgagtagctgggactacaggcgcccgccactacgcccggctaattttttgtatttttagtagagacggggtttcaccgttttagccgggatggtctcgatctcctgacctcgtgatccgcccgcctcggcctcccaaagtgctgggattacaggcgtgagccaccgcgcccagcacattttcatcattcccaaagttctcttgtgaccctttgacccatctgcaactgagggttccagacaagctctgacccacatagattgtgtcattacacttgttactttttttttcttgcctgttctaggcattctataaaagtagaatgatgtactatacgttgtttcatgtctggcgtctttcactgggtgtaatgtttctgagatctattcatgttgttgcagatccatagtttgttcctttgtattgccaaatagtattccattcacctgttgatgggtctttctaattttagtgattatgaataaagattcatatacaggtctttatatggacatgaggtttcatttctcttggacaaatacctaggagtaaaatggctaaatcatgtgatgagtgtatgtttagttttataaggaactgccaaaatattccaaagcacttggaggattttgcatctcacccgcaatgcaagagaaatgcagctgctccacatcctctcggttcatcttgttgggtgtatagtggcaacgcattgtggtcttaatttgcatttgcctggtgatatgtaagtaagcctatttcatttacatattggccactcacattttctttgcgaagatacaagatttctgcccattttaattgcattctccatcttttttatggcgatttgagagggttttttttttgtttgtttgtttttttttgagatggagtctcacactgtcaccctgggtggggagcagtggctcgatctcagctccctgcaacttccacctcctgggttcaagtgattctcctgcctcagcctcccaagtagctaggattacaggcacccaccaccaagcctggctaatttttcatatttttagtagagacggggtttcactatgctggccaggctggtcttgaactcctgaacttgtgatccgcctgccttggcctcccaaagtgctgggattacaggcgtgagccaccatgcccagctagagttctttatatattctggatatgaatcctttgtcagatatatgtaatgtaatgttttctcccagtctgcggccttgctgttttatttctttactagtatctttcaaagaaaagaagaatttaatttagatgaaatgcaatttatccatttttttcttttaaggttcacacttttgatattctactttagaaatcattgcctaattaaaagttaagattttctgcatgttatctaaaagttagcattaatatttagacttgttacttgttaatttttgtggatgatgtaaggatcaaggttcttccaaatgaagtgtattagttctcacactgctataaagaaatacctgagactgggtaatttgtaaagaaaaaatggttaattggttcacagttctgcggactgtgtggaaagcatagcggcttctgtttctggggaggcctcaggaaacataatcacggcggaaggcaaaggggaagcagacatgtcacatggccagagcaggaggaagagagagaggaggggaggtgctacacacttttaaacaatcagatctcacgataactcactcactattgtcacaacaccaccaagggggatggtgttaaaccaggagaaacctcctccatgatccaatcacctcccaccaggccccacctccaacactggggattataatttaacatgagatttaggcagggacatagattcaaaccatatcatgaaccacgatttgttggaaatattctttccttcaatctggttacctttatatttttgttgagaatcaattgatcttatatgtgtggctgtttttttttactctatttacccttttccattaatgtatctatatatctttatactaatccatactgttttgattaatgtagctataaagttaatattgaaataatgtagcatattccatccaattttgttctccaaaattattttaactatgtgatgtctttgcattttcataaatattttagaatgatcttttcaatttctataaagaagcctgatgggagttttaatttgtattacataaactgtgtagatgaatctagggaaaattgacatcttaacatatttcatattttatgctattataagtgattttaaaatatctaattgccaattgcatactgctagtacatataaatatgattaacttttctatattatcattacattctacaaccttactcaatgtacttattattttaatagacttttttgtagattccttaggattatatccaagagataattacgtcatctgtgaatatagacagtttatttcttcttctcctatatgtagatattttaaatttctttttcttgccttacagtactggctggggtttccagtacaatgtggaaaggaagtggtaagagtggacacccttgccttgttccaatattaggggaaaatattcagattttgtcgttgctgttgttcgggatttttgttttttgttcgtttgtttaccattaagtatggtgttgacatcttcttatttttcttctgttctccttcccctcccctctcttccttttctttcatctcctggaaaagtttagtcctaagagtagagaagtacatggtgtgcacctggtaaggagtagggagctctcaggccagagtccaggcagtgtgaagacggcaccgaagcttcatagcttgagaaactgagaaaagcaccatttcacatggaaggcttagtttgaaaatcacagccaaagcgaagtagggaaggcctggagagggagagccagccatagttctcagatcatggaatgtgggcaaagtagcctgtatttgaaattacagccaaagcaaagctaagagaacatccccattgaggcctggtctggtttggcagtctgtttcagagggtgaggagagtgtctatgcacgaagcctgccctgcatgagggaataagctcacgcaggaggaggagggcaagcactgggtgggcgagcctggcatacaaagttcgagctcacacagtgctaggagggttcccccacaggaaggcatacacaaggtgaagatgaggggggcattcacttgataaggtgacctgttgtggaaaaacagcccaagcaaggtcaggaaggcatccatgtactgggatggcccaaaatggggagtcagaacctgaacaggaagaggagaatgccagcagggaatggaagcagtggcagcaatgggagacatagtgggaacttaatccaataaatacatataccaagagtaatggaacccgagtttctctctgttggagatgggaattacgagtacaaaaaaaaaggagaaataatccctgtggtatgattgcaattgaatgtattagtgtgaactactgattttcaaagtatatctataaatacaactatatacatatataaacatgtatatatgtacttactgtatacctacatatacacacgtgtgtgtgtttgtgtgtgtatatatattctctgcttctacccaccaagaggcctgggaacagtgacagcacaatagcaatgaacaccctctgcacccagatcttggcttctccatactattttctactgaaaggaaccagagctacttgggaaaatggatacttccagagacagacagggaaagtgtaagataggattggaacacttgtggcagagcaaggaggtgttcaaagaatgatgagaacatgtcaaaaagacacaaaatccagcttgaatgtttttatactgcctaattctgggatgatttgagtaaaaatttaaaaaaaatgaattacaaccctaaaataatgaattacaacccaaaggaaaaaattggaaaattagagttcatacacattgtgtttgatcatgaatgatatattttgatcattaacggtaatatattacatagcatttaagtatgtgtttcacaaaattataaaattaactataaaattaattataatttaaaaatagtatatttataattcagctgggccaatactaccttaatcaacagatctatatgaacaaatttaaaaaatgaggtatctcaaaattatgcatctcatgatataatgcagtgagaagattatatcagtttgtcattttcacaaaaatatacaagctaaatccaatcacaagaaaacatcagacaaacccaaattaagagagttcctacaacataataaccctataataatccaaaagtgcaaattccattgtgtccagaattggtgggtttttggtctcactaacttcaagaatgaagccacagaccctcgtggtgagtgttacagttcttaacggcaacgtgtccagagtttgttccttctgatgatgagatgtattcagagtttcttccttctcgtgggttcgtggtctcactggcttcaggagtgaagctgcagaccttcacactgagtgttacagctcataaagccaggatgaacccaaagagtgaggagcagcaagatttattgcaaacagcaaaagaacaaaacctccacactacagaaaaggatgcaagcgggttgctactgccagctagggcagcctgcttttattctcttacctggccccacccacgtcctgctgattggtccactttacagagagccaattggtctgttttacagagagctgattggtccattttgacagggtgctgattggtgcatttacaatccctgagctagacacaaaagttctccacctccccactacattagctagatacagtgtccacacaaagcttctccaagtccccaccagagtagctagatacagagtgtcaattggtgcattcacaaaccctgagctagacacagggtgctgactggtgtgtttacaaaccttgagctagatacagagtgccaattggtgtatttacaattccttagccagacataaaggttctccaagtccccaccagactcagaagcccagctggcttcacccagtggatcccgcacgggggtgcaggtggagctgcctgccagtcccatgcaatgcacccgcactcctcagcccctgggtgctgaatgggactggacaccatggagcagcgggcagcgctcatctgctaggctccggctgtgcaggagcccaaggcaaaggtggggaggctcaggcatggcaggctgcaggtcctgagccctgccccacggggaagcagctaaggcccggcgagaagtcgagcacagcatctgctggcccaggtgctaaacccctcactgcctggagcccgcggggccggttggccactccgagtgtggggctcgctgagcccacgcccacccaggactcacgctggccagcaagcctcgcaggcagccccggttccgcccgcgcctctccctccacacctcccgacaagctcagggagccagctccagccttggccagcccagaaaggggctcccacagtgcagctgcgggctgaagggctcctcaagcgtggccagagtgggcgccaaggccaaagaggtcccgagagcgagcgagggctgtgagtgctgccagcacgctgtcacctctcaccagaaaagactgataaactactccaaacgaaagtaaaccagagacaggaattcttaatgcatgcatagttctggactccatcattttgctgtaaaatattttaatgaggcaattgattgatcttaaatggggtgtaaagattgaatggcaataatttaacagtatctatttcctgatattttgatggttggattgtaataacactgaaaggctctttgtatgtatgaaaccacactaagatatgtgagaaaagttttctgcaatgttatgacttcaaactaaaaaaaaaaaagtgtaaggaagttctgcagatcctctttatcagattaaggaaattgcctactattcctagtttaatggagagtctttatcaagaaaggtatgcaatttcatcagatgcttttttttgtatctatgagataatcattaattttctcctttactcttttaacatgataaatgacattgatttttcaaatgttaagcaatatttgtattcctaggataaacactgcttggtcattttgcttatactttttacctgttactgcatttgattgcccaatattattattaaaaatgtgtgtgcctaaggtcatgagtgttttggtgtatgtttgccttttctcgcctagtttttgtattagtgcgatgctgacctcagaaagcaaggttccatgtgtgttcctttctcctgtaatttttgaaagatttttctgtaggattgtcattacatctttcttaaatatttcctagaatttgccaatgaagccaatgaagtttgaacattttaatttctaaataataaatacattatcttcagcagacataggctatttagatttctaacttatttctgaacttattaataaaaaatatttataacattcccttataatttttaaagtttgtagtgcatgtagttatgctcccactttcttttctgatattagtaggttgtgtcctcttttttatattgataagtctagctaaaagttgcttactttcattcatcttttcaaatgatctgtttttggttgcaccactttgctctattgtctgttttgtatcattgatttctgcttttgtttttactatttcctttcttctactttctttgggcttactttgctttttccttttctagtttcttaggattgaagcttaatgatttttaggacttttctaatacgggcatttaaagctatgtatttctaagctgcagtagtattccaaaacatttagtatgctatattttaattttaatttacttcactattttctcatttattttgatttttattagccataggtatttagaagtatgttctctaatttcaaaccattaaaagatgctagattctattgttatgtttaattttgttataatcagagaacatatttcctatagattcagctcttctaaatttgctgtgataaaatttctgacctgtgcatggtttaggttggtgattataccatgcacacttgagcagatagtgcattctgttctttggagtattgtataaatgtcaattaggttaagttggctgacagtgatgtttgggttttatatatccttactgattttctgtgtacttgtttagtcaattactgagaggggaatgttgatgtctttaaatattattattatttgtctattacttctttcaattctttgagtttctgctacttgcctacttgtcttttcaaactgttatttggtgcataggcatgcaggagttgtacgatttttttttttttttaagatggattcttgctctgttgcccaggccaagtgcagtggcatgatcttggctcactgcaacctctgcgtccagggttcaagcgattctcctgcctcagactcctgagtagctgggactacaggtgcgcactaccacacacctggctagttttttgtatttttagtagagatggggtttcaccatcttggccaggctggtctcgaactcctgagcttgtgatccacccaatgaattgtctcttttattatctgaaatgttcctctttgttgctggtagtattctttgcctggagccagctttgtcttatcttagtaagtactccaactcttttacaatttttccttttatttcaacctatttgcttagagttaaaatcttttttgcgggcttcatttagtcaggccaagcttctttaatcatgtctgataattccttccttttagctggactgtccagttcagatctatttaatagaaatgtaatgtaagccacacactgaaattttcaaaaacattctgtagccatattaaaaagaggaaataagtggcattaattttagtaacattttatttaacccaatatatccaaaatatatttcaacctttaatcgatgtaatgaaaaaaagtgtcatagtaagtattcaaaatctggtgtgtttttgacacttgcagtgcatcttaatttggggtaggtccatttcaggtgctcaatagtcacaagtggctattagctaccattttgcacaatgcaaacctaaactacctgtatttaatgtcattattgaagtggtaaagtttaagccaagcatcattactttcttttgttttgttttctgtttgtctcatgtgttcattgccctttcccaccttttcttgccttttaaaaaattcagttcggcttggtgcagtggctcacacctttaatcccagcactttcggaggctgaggcaggcggatcacgaggtcaagaggtcaagaccatcctggccaacttggtgaaccccgtctctactaaaaatacaaaaattagctgggcgtggtggcacatgcctgtagtcccagctacacgtgaggctgaggcaggagaatcacttcaacctggcaggcagaggttgcagtgagccgagatcacgccactgcacttccagcctgatgacagagtgggactccatctcaaacaaagaaacaaacccctcaaatcgtttttttttttagcattcagttccatatttactgtggggttataaactatgccttttttctggtgtttaaggtttacaacgtttaaatacaggctagtgtcaaatactataattctatttaaaagtttaatgcaagaaccttaccacagtgcaattgtattacccccaaattgtgtgctattttcttatattctatatatgttaaaataccataacacattgataatgctatatacctttcaagaaatattttaaaaaataattttctacatatttgctgtttatagcactctttattactttgtagttatacaagttttcatctgacatcattttgtccaaagaacttactgtaacatttattctacagcacatctgctagtgacaattctagcttttcttgactgaaaatcttgtttgcctacattttcatgagattattttgctagatgtaaaagtcaaagttgacaagctctcttttagcactttaaaaatagtagtcccttatttcataaaaattaataacaacttgtgtatttcaataaattaataaaaatacattatctctgtcctcatgtacatttttttttcagagacagggtcatgctctgtcgcccaggatggagtacagtggtgcaatcatagctcaccgcagtctcaaactcctgggctcaaacgatcctcctggctcagcttccctagtagctgggacttagaggtgcacgccactgagaccagctaagttattttttacttttaaattttttttttttttttttggagagacagggtatcagtttgttgctcaagctgctttcaacctcctggcttcaagtgatcctcccaaagtgctgggattatagacatgagccactgcacctagcccttaacatcttaatatacaccacctgagttggctttaagtttttccgtctatcaatacttatcaccaattttatcttgatgttcctagatgtgcttttttgttgatccttcttggaattcatcgagcttctcaggtctgtgtgtttatagctttcatctcatttggataatttccagctaacattttcaaaaacatttttcctcccttcttgggaaactccaattacacatatgtgtgacacttcgatatagtctcacaggcctctgaatactttatttttttcagtgtgtttttccactgtgctttagttcagatagccatattattatgttttcaagttgtctttttaaaacctttatatttttatgtttacacagtaggtatatgtatttatgtggtacatattttggtacacgcatacaacgcatactgattacatcaaggtaaatggggtattcatctcctcaagcatttatcatttgtgtcacaaacattccagttatattttgttatttttaaatgtacaataaattattgattgtagtcatcctattgtgctatcaaatacatcttatgcattgtaactatattttgttagaattatgcagttatgtaattgtataattttctaacatgtgtaattatatgagagagaaaaaccacaatttgcaccaacctaatatatattctttgtgaaatcgctaggtttttccaaatataatattgcatcatctgcaaacaaggacaatttgacttcttcctttccaatttggatgccctttctttctcttgtctgactgctctagctaggatttcaagtactatgttgagtaacagtggggacagtgggaatcccaacttctcttgtcttatgcattatgcaatttgctttgaatcttgtccggtgacacaatcttttcagaaattgtatttgagctctaaaaatttcatttggttcttcttatatattccattattgccttcattgtgttcattttttatttaaaccattaagctcatcaacagtagttttatcattttcttgtctggttattcaatcatttcttgcgctgttattataatgagtgttttttttttcggcttatggttacattttcctgaattttggtatgctaataattcttttcagactctgcacattgtgaattttatgttgttctgtgctgtattttgccatcttcttttaaagggtgtttgtctttattccagcagttgttatgtaatggatcagtttgatcttttcgagagtagttttaaagttcttcaaagggaaggtctaaggtggcctttaacctaaagctattttagtcctactactaaagcattacccttctgggatacctacttaatatgcccatttaatggtcctatttaatggtctttatatgtttaataaagatcctccattcttgctgattagaattagaaagtcatctagtcttgtgtaaactccgaaaatcatataggttgtaggtcccggcttattgtctattcagctctgtggagactcactctatgcatgtacagcttaatactcatcaacaaatgcaagagaacccagatgtcttgagctctctttctgcaaagcatcctcctcattctataattcggaaaatttaagttgctgcattttctcagaacgctgatctctgtcctctcaatctagtgatctgccatgtcctgcttaagattcttttcaccacactgtagtccataaaggtctctatgcaaaaagccaagtcaattgtagggttcttgtttcctttctctaagggatcacagtaccgaactacctattgtttaatgactacgtacagttgtttcataggttttcttcagcttttctagtgacttatgatacaaaagcaagtctagtcacatttacttcattatagctggaaggagaactcaagctgattttgattacagagaaatgactattgatgttactaagagcaattactgagagtaattgtcattgttctcataacactgaactaaaagcagcaaaggttcttatctcagtatctcattaaattcataactttactagcgaagtatgtttatatatcctgttaagtatatttacacctatggcaaaatcctaatcagaaaaactaattaaaacccttgtctctggaatagttgctgaaatgccaatagggagaggggaaagacgtgacctgcgtggctaatttttaactaatcaaagaaatagaagacaagaattgccctgaagaacatgattactggtgataacgtaaaatatttttcaataataaatcatatagtttgttgtcgtcttccgcctctggaacattttaccatccaaggtttccaaaaatactctacttacaccacaaccaccacaagagcttaatccaatgatgatacagtgtgcatttccgacatattacccagattttaacatattcagtaacaatggacttagaagtctatcagtcaatcagtgatttccaaaacattaatttcttttaagattcatgccatggttccctttttcttcttctcctgagtcattctttgtgtgggtctccttcctaacttgactaaatatcaatgatgatcacaaatagtgaaaagatggcctaatactcacaagtataagctgggtgcaacgagagacacagaaaaaataaagaactgttttgtgttttaagatcatacaaataggaaactgacacaagcttgaaagcctaactccaccatagggctgcatcttaatgaaaagtgtaaatcaaaacacaagtaaaaagacgaaaaaatcttgcaccatttcaatacatcggaatttttgagtagtctctttagcttgagaagaaacaccctagccctttcttttacgaaatacacactgaattatcagaggtaaaaagacatgatgtatgcaagctatatcgaaatatattggcaaaaataatttgtgtgtgtttatatttgtagagtcagatgaaaaaacaatgtggaacaatattttaaactgctacatctgagtaacgtgcatggttgttctgtatgatttttgcaactttccagtaagtttgaaataatttcataataagtttttagaaaatacactgtagcatttaacatgttaatgtgttaaattatatttcattatacgttacatttaagtatataatatagtctaaatcataaaccatggattttaacattctatattatacagcaataaattgtgaaacttaaaataatgtactctacagtccacgtcttcaacacatgtactgtaacatattaatatttaagcttcacaattactccattatataatagtatatagcatgttgaaatacgtgatacataatttaagcaaataaggttgttatctaaaacgtttagaagccagtctgaaaatgctttcaggtttctgtctctttatagttaagcatccatttaaattacaccgtttttgaaatctaccttatcctagccatttggctaacaaatttatcgaacaaaaatataaatgcaacacacttcttgccttttagcagcttgtgatagtggaatttaaaagcctatgtaagaactcaaagagattatccatttctttccatgagatttaagaaggaagacaacagcacactgtaaagcttcactaagaaaaaaatgggagccgctgcagccaagcattaacataagaaccctaccaaggtaaacaaaaagaggacttaaccagacggaacaaatagaacttcaagacgcccctacctactattggatccagaacttacactgagcagcaggttattggtctcacgaacttcaaaaacgaagccgcaaattctcgcagggagtgttacagctcttaaggatgcagtacctggagttccttcctccagctgttaagacgggtccagagtttttttttttttcttctggtgggttggtactctgagttcattatctatgtgaagctgcagacctttgcagcgagcgttacagctcttaaaggtagcgtatcccgagtttttcgttcctcccggtgggttcgtgggctggttactctagccgacttcagaagtaaacccacagacctctgcagcgagtatcacagctcataaatagagagccgtcccaaaaagtgagcagcagcaagatctactgtaaatagccaaataacaaacattccacagacccaagcacattgccacagatgctccgcggggccagcatttattcccttagttggccccgcccacatcctgctgattggtccattttacagagtgctgattggtccattttactgagcactgattggtccattttgcagagtgccgattggtctgtttttacagcgtgctgattggtgcttttacacacctttagctagacacagagcactgattggtgtgtttacaatcctttagctagacagaaaagtttttcaggtccccacccaacccagaagcgcagtcagcttcacctctcattactaaagtcagttgcttacctgctaagaaaagtcatggagtggtgacagaagaagaagatacaaactttattccaccagatcagctgactttagcctgcagagtgctagaatagcaagcatttcagccatccatactacaattgtgttctttgactatcatttggagacgttcatagagccacaaaagtacacttgttaaatagtagcttcagttatcagctgaagacaagtgcaatgtactagttaaatgataacaccacgaagagggagggaagtggaggagggaagactctactctcctcgtgcaaagaacttctactgaggtaataataatgtgtatggatggcccccagatacccaaatgcttgtgcagatcattagacttcctactcttgtgtaactagcttttattccttaagattatgatttttagatttctccctattaataaatgtggctccagtaaatttgcacacacatataaatatgtcttatcaaagaatatatacatctttgtatttactaaatattgacaaaaattcttttccaaatggactgtatcaatttacagttataatagcagagcttgaaacttctctttggtctatatattcaataattctctgtaataccaagaattacatttttgtcaatttgttctataatgaaatagtagtgcggtgataatttgcagttccctgtttatttgtaactttagaaatcttttcagattttctgaccgtttatatttgcttgtaccttcagacaaagacaaactttatttttcttactgaatcataggttatggattgtcacatgctaatttttggtacaagtgcttcacatgctgagaatgtcaacctcccctttttcctgtgttattctgcttttattctcctttgaattttgtttattcacagggttttgcaaccaacaccacgatctctgtttataacattttcatccatctaaaagaagccctgtaaacattagcaatcaaacccagcctcactacccgctgctcccacaccaaccttcctcagcccaaagcttctcattgtatttttaagctatttttatcttattttatttatttattatttttgaaagagggtctcgctctgttgcccaggctggagtgcagtgacaccgtcatggctcactgaaacctctgcatcccaggctcaggtaatcttcccacctcagcctccctcacctcacctcaactggaacaacaggcacacgccaccatgcctggctgattttttttttttttttttttttttttgtagagacaggtttcacctgttgcccaggctggtctcgaactcctgggctcaagtgatccacccacctgggcctcccgaagttgtgggattacaggcgtgagccaccgctcccagctcctcatcgtattttttaatgactattagaaacataccgagaccatcctggctaacacagtgaaatcccgtctctactaaaaatacaaaaaaattaaccgggagttgtagcgggcgcctgtagtcccagctacatgaggctgaggcaggagaatggcgtgaacccgggaggcggcgcttgcagtgagccgagatagcgccactgcacaccagcctgggcgacagagcgagacttcgtctcaaaaaaaaaaaaaaaaaaaaaaagcatgcaggaaaattattaactttatgctaattctgaggtgcaagacttactgaatatttttcttttggttctaaatactttaaaactttattttcctggtattttaggtgaatatttataacatctgaaataagacaaatgtgtgttctcttgtcaattgctaatatcacattaatttagccattattgcattgcctctgatgtacaaaacaatgttaaacattgattattgtagatattcttgtcatctcactttaatagttccttgatgattacttgttcacaataaaatttgacacgtaaaatatattattcttcatattaagattagatatcataagtaaaaatgggtatttttttaacatacgaaggagtattagtctactcatcactatgaattttctttctttttaagtctctgataacgaatcttgaattatattttttagattgtatacatattatatatcttcactgatttatgaatttacagatttctgcctaaaaaccacattggcagtgtttctatatgcaatttcatgtatttttgccttttcttttcttaaaattagaatatttgtcattgccttttactctttttcccaaaaagagatattggattcatacatcatttctattctttatttgctttctaaattactgatatatattttcattaatttcttctgtatttgttattacatttcatctcccttcctgacttaaatgttaaaatcatgaaattttttatttcttgcgttgtttgtttgtttgtttaaggctataaattttcttctgaatcagctttggctacattagtggatttcagtatacaatgatactccatgattgccaattttatttcatctttgacccaaaatacttttaaaaatttccaagtaataaggtttttactttattttttgttttaatttttaaaaatatgatgtgatgatttccagatttttgcagtgtaatcagaacattgatcaatatttttctgttatttttagtttattggtgtgttgcaatatataaacaattgttataagtgcttcataagcatttagagaggagtttgtagtgcttctctattatcgaagttggtaagtttaggcaaaaagccattgattatatgattcagatatatgttttagaaatctttatttttgccaccttgttttacaaagataggagaaacatttgttaaacgtttttattgctatcacattatcattaatttttttccaagctgtagaatttttatcacatcacttcctgagcaccaaacaagaagtatggtttttaactaacagctactttgcactcagcaacatgatatctctctgatactcccttttttcttttttaaataatacttttaaaaatgtatttatttatttaagagatgtgggtcttgctgtgctgtccagcctggacttgaacttttgggctcaaaccatcctcccatctcagcctcctgataaactggaactattcagatgggtaccactgtgcctggcatgttttttattcctgacactctttcaaaacatctgtgtatgattctagcattctgtctattgtaacaggaatatcacttaagaattttaccacacatcgtttcatttaaaaatatacagctcttggaaacatgcgtctatttccccttatgcaaacagcaacagaaaagcattctttcaacagatgagcatgttgaatctagctcctggccaaagtcttgtgtgtgatttttcaggccaactacagacaattacagatgctttacctggcagtctcatggggtaagctgccctccccacaccagacctggtgcacagtcagtgcactgcagtctctgatgggagcggctgcaactaccaggccctggccagccatgctgttaggcatctctctattcctatctcccaggcctgttgactggggacccttcttatcaggcatagatgactttgaaggcacgttctccactgtgactcagggtttagtacttttccactcctagcccttgccctgacccatcctcgtagcccccaggttcataaatgtaagcagcctttctttggagaagagctatgatccccacctctgagctgatccacctgccccacaccttacactgttctgtggggaaaatgggctggtgagtggcggttaggactgacactttgtcctgagtagcctcttgcttatactctcacagttggtgacccaaggcttggccattaccttcattttggcttgtcttaatcaatgacttccaacaactggcagctcagctttccagctcagctcttgacatacattttataaaaacagaatacgaagaacaaagtggccttctcctaggaaactgttagctgtatctagacattatacaagacacattctatttaatatgcaatattataagtcagtgtcttggggccaaaacctttgcttccattttgacacttgccttctagaacatttcaagaaatgaatgatttagtcaaatggtgtggaccttataaaaaggctattgtaatattttcaattatgttttccaaagtttataagttgaagtcacgtgaggagtatgacactcattaattcagaatacccacctagatgttagtttcatcttctaatctgtgagcatttgatgatgagtgaaaaatagcaactcaagggtttttttagtacagcacttttattattaaggtaaaatgttttaaatgagacatttttactttttcttaaattgtgtaatcatgcatttctctaaggggatacacacagatacacacacacaattgattttaaagcagttttagatttacagagaagttgcagaataggtacagaaagttaacgtataaaccacactcagtttcccctgttattaacacctgacataacaggcatatttgttacaattaattaaccaatattgatacattacataaataaagtttatcctttatctaggttttcttccttttatctaatgtcctttttctgttccaggatactactcaggatcccctgttttttttagtagtcgtgtcttcttaggctactcttaatagtgagaattgttatgccttcttggaaagttgacccctttatcatcatgcagtctccttttctttttttggagtttcgctcttgtcacccaggctggagtgcagtggcacgatctcggctcatggcaaccaccgccttctagtttcaagcgattctcctgcctcagcctcccaagtagctgggattacaggcacccaccaccctgcccagctaatttttgtatttttagtagagatggggtttcaccatgttgatctggtcttgaactcctgacctcatgatccgcctgccttggcctcccaaagtgctgggatcacaggtgggagtcaccatgcccagccacagtttccctctttaccctgataatcttctttcttgtaaagtctactgtgtctgaaacgactgtggcgatgctagctttgctttcgtagtgtcaacacagggctttccggggctgtggtcataaacctgggttgctaaaatcaacagaagtgggtgctttcatggttttggggccagaagtctgaaatcaacacgcaggcagggccatgctccctctgaaggctctcgggaagaatccttccttgcctctccctggcttctggtggtggctggaatccgtggcacttcttgactgtcagctgtgtgacttcagcctctgccttcatcgtcacatgctgttcttcctgtgtgtctctgtgtcctgtgcatccacgttctttctcataaggatgccagtctttcgatttagagccattcgaatccatcttgactaattccatctgcaaagaccccatttcaaagcaaggtcatgttctgaggttctggttctgaggttccgtgcggacatgatttagggaggacactgaacactattccacccagcacagcattgctacgttttttcccacctttttttattttaagagatggggtctcactgtgttgcccaggctgcagtgcagtgacctaatctaagcttactggggcctcgaattcctgggctcaagcaatcctcccgcatcagcctcttgagtagctggaatttcaggtgtatgccaccacacttggtctcatattcttatttttttaacctatgatttttttttttttttgagacggagtctcactctgtcgcccaggctggagtgcagtggcacaatgttggctcactgcaagctccgcctcccgggttcactccattctcctgcctcagcctcccaagtagctgggactacaggtgccagccaacactcccggctagtttttttgtatttttagtagagacggggtttcaccgtgttagccaggatggtctcgatctcctgacctcgtgatctgcccgtctcggcctcccaaagtgctgggatcacaggcttgagccaccgcgcccagccaatctacgatttttatctttatcgtgggtttcttttagaaaacatttatttgggtatgggttttcgatctagtcttgttctctgtgttttaattgttgcacttacaccatttccatttccatttaaagtaattattaatatacagtagttaaattaatctccatcatcttggtaactgttttctgttcattgtatttgttctttgtttttttcttctctcttttgtgctttaattgagcattttatgtggtttgatttgttgcctttattaacacattattttttattattataaatgtaataagttatttattttttaatgttcttaagggtttccctagagtttactatatattttaataaatccaaattcaccttaaaacaacaatatacttcattacacataacgcagggaccttaaaactatttccagttcccttatgacactgctgtcattcatttcaatgatctatgtgctataatcactcaatacatggtgacgacacctactttaaagaaatagttacattttagattagtttaatctacattctaacttctctgatctcttcctgtcactccaaatctgacctatacaatttttctcctcagtgaagaaagtcttttcatatttcttgcaagtcaggtctactgattttgaattccctgtttttgtttgtcttaaaagaattgatctctgcttcacattggaaggacaatttcagtggatatagaatcgtgggttggtttttgtttgtttgttcaatatggtaaatattttatttcactccttttgcttgcatggtttctgaacagcagtacactctaactcttatccttgcttctctagaggtgaagctctccccagctccacactgccagcttctttctagtttctctttgttttttgtctgctgaagtttaaataagatatgcctaggtgtagtctgttagttatgttgttgttggtttttagttttggtattcattcttcttggtgttctctgaacttcttgcatctattgtttggtgtttgtcattaatttcgggaaattctcagacattctcagttcaaatatttctcttgcctctgctttctctttcttctgtttctggtatgccagttatgaaaatgtacaccttttaaaattgtcccagtggccaggcacggtggctcatgactaactgcagcactttgggagtctgaggcaggaggatcatttgaggccaggagttggaggccagcctgagcaacacagtgagacaggatcttgacaaaattttttttaaaattagctgggcatgatggtgtgagtctgtagtcccagctagcctggaggctaaggcagcagaatcacctgagcccaggagtcagaggctgcagtgaggtgtgactgtgccactgcactccagcctgggcaacagagtgagaccttgcctcttaacaaataataaagaaataatacaattgcgccatagttcctgaacgttctgctgattttcgttctctttgcatttcagcttgagaagcttctgtgccctccatctgctgactcttccctgcccgtgcccagggtcctgagaagcccatcgaaagcattctcgattttgttgaattttcaattctgttcttgagttttgagttctagcatttccttttgcatttttcttagagtttccatctctctgcttacatgatccatctgtccaggcatgtttctacctttcccatgagggctctaatggaaacacattaatcacagttatttaaagtccctctctggtaatgccaacatctgtgtcctatctgcagctagttttgttgtttacttcagactattctgttattcttgccttttggcattatttgtagttattgttgaaagtcaaactcgtatcatgtaatgggggctgtggtaaagaggcctttagtgtgagtgtttgtgtgaacctggacgggagttggcctttactgaatgtgtgcagtggctttagttgccaggggtttccaattcctccagtgttcttgtttttgtctcccctcttgattttgggctcccaaattactctttcgtagacagactctgtgcttttcatatttttccactgcaattccttgttattctacagaagctctgctggtgtagtggccaggtatgggaaaggagaatagtttataatgttttgattaaggctgggcatagaggctcatgcctgtaatcttagtgctttggaatgccgaggcaggaggatagctggagcccaggagttcaagacaagcctggcaaaatagtgggaccccatctctacaaaaacaaaaaattagctatgcatggtagcgtgtgcctgtagtcccagctactcaggaggctgagataggaggatccattgagcccaggaagttgaggctgcagtgagtccagatcacacaagtgtactgggtgacaaagaccctgcctcaaacaaataaaattgtgccatggttcctgaacattctgctacacacacacacacacacacacacacacacacacattttatttcctttcctttatatatatatttcctatatatatatttcctatatatatatatttcctatatatatatgtatatatgtgtgtgtgtgaatatatatacatatataaagtatatataaaatacttaaatctcagcattttgccatcctgtgtaaaggctatgaccttcacgattacattttttttctccaaagtagtaatgccctttaaaaataaaaaataaaaaaagcccttaccacgaggcaggtagtctagaggtgtctggtgtgggaagaatatctttcaccagctgggataggactcagggcaattcttttccctggagtgtaggcttttgtggcagagaaaataataattaattccccccttctcctgccagaacactagggactgtttctcagatcttccccatgagaacctggtggcatttttgcaggtaaaatccacacgagtgtggaccacgtcccaagactgcagcccccaggattttcacaccctgcctcgtcagtgctcagcctccatcaggtcatcagaatgaccctgtacgtgttcccacacatggatgttgattttaagaatcttaaaattcattcctagaagtagaggataaatttgtttttatacccttgcataaaaattgaagtacattttaggctgtccatgaggaatctttctggggtgaactccagcagcccccgctgcacccccggctctctgctctgcccctctgaattgccctgtgtctccagatttctgggaggcgatttgcctcgcgactccagtgctctgatagtcccacaaaagctgctcattttcaatttgctgggacttttcttgttgtaaggacagcagtgactactccaagttcctttatgtggtaaggatgaaatccgaagccttaaatatattgtttaattaaaagcaattgacaaattggcttatactcatatacaatagccttcttacatttttctgagtataatatccaggtgagctcatgaaattaattttttaatataaggcattaactgataacaagtattatgtgatggggtatgataaaaataatgagtgttcaaaatattctccatcagtatgactgtttagtgttactgtaggcttcttcatgtagttcatgccagtaccctaagcatgatcaaatattaaaatgtatatcactttatttataattcaaagacaagaaatgaaatgcaaaatattatccattaaaactaattattaacaatgcatatagttcccctatcattttacacaaacttgcccttatttagtctttttaaaattatacaaataataagtatcattttggaaaataaaaaagaatataagattgctcttgttcccaacacaaaataatatcattattattttagtgtatattcttgactttttcaatgtacactttcgatatacaaattattcttttttatttttattttttttctggagatgaggtcttgctctgtcgcccaggccagagtgcactggcacaatcacagctcactgcaacctcaaactcctgggctcagggaatcctctcacctcagcctcctgagtagctgggattacaggcacatgccaccatacacaccaagctcatttttaaaagtatttgtagagatgtacagacaggatctcactatgttacccaggctgatcttgaactcctgggctcaagccatcctcccactttggcctcccaaagtgctgggattgcaggcatgaggcaccatgcccagccacttttattacttttaaatttggataattttatgccttatttccaagatcactaatggtctttctaaaacataagcaatatatggacatcttggaaatgagtaatctgcaacatactcttgtaatgcaggttctatttcctcttttatttctctaatgatgttaatatatgtatataaagtaaatgataaagataaatagtaatgtaaggagaaattgacaaacccacaaaattagtgagagatattaatacaactctttcagaataaataagaatataagagatttttataacaagtttaactagcttggagaaaaaaataacctaatacgataatgtacgtatatttaaccaacagaaattttgcaaacacatacagaccagtcacaggaaagacattatgcaaaagcaaatgtctacaaattttttaaagcagaaatcaatgtgctctaaccaatgtgataaaattccatattaacaactaaaggatagccaaaatatctcttcacctaaaaattaaatcactaggagaaaggaaaactgaaacaactatatatttagaaacaagagaatgtcataaattttaaccttcccccaaaaaacacatgtgaaaattgttgccttgaatcaattcattgtacagttagaaggaatgaaatttgggaactaaataaatattcaagtcaatgctttctttaaaagaacaataaaattaatctaaatgaggaagaaggaaggaaggaaagtagccacattaaaaagccaacatgaaaaataaaagatttcctatacaccattagaaaatgtattcgcaaacagtcttacattaacaataactataaaagatacaagatttcttggaatgaacctaattacaaagcttaagcttacataaaggaaaagctaaaggaaaggaaataaaatgatccatcttatttctgcactggaagagtcaacaagataaaggtgttaattttctatcactgcttccttagtttatccatttccttacattaaaaaggttaggatttaaattttttttttattttcactattacctactgctgaaataactatcctagtacataaatcttagtggatgaaaatttctttagaaatagaatcatctattacttgtatctttaaatttactagtattgacaaattggtttccaaaattgttgtacccatttatacatcataacctgttatacattataatgtgttatcaataggcttacctattgtcatcagttccacataagggtttttcattttcctacatcattaacactcttggcatgataaaacattaatttttacaaatataatgaatatgaactagtaatagattactattcaatttgcacttactttatcattaattaaatgtaataacttttatgtgcttattagttattgggattttttttaaatttgtgaactaatcattcatatttgctgcccattttgtgtataatatatatatgtacatacacacacatatatatattctggatattatttatggcttactgaaggttgcagacatttgaattttgggcttgtattttcacatttttcctacagaagttgtaatttttggcaaagtcgatttatcagcctcctcttttgcaatgtgtgcttttgtgtgtgtgtgtgtgtgtgtgtgtgtgtgtgtgcgtacttcaagaaaggcatctattccaccactatcatcgagatactctctcgtgttttgttctattcaagttttacaatttatttcctcatttttttgtcttttgtccctctggtgccaattctgtgtaagggatgaggtattccgtataagggatgaggtacggacctggctttatccatctggtgccaattccgtgtaagggacgagatacggacctggctttattgcttttgcatgcatggcccgttatcctagtgtcatgaatgagtaaatccacattttcctctctgatttatgacaccacctttatcacactccatattcttgtgctcctgttgctttatttttgggatttctggtctagtccattacctagtgaccttcctggaaccacattttatttaccatagctttgctgtaacacccaaaatgtggttgaattggtccctagctacttctcctcttcttcagttgtcttatctgctcttgaattttagtatcaccaggtcaggttttagaaagagccctgctgaataattagaattatgttgaatttactatcactttgagaagaaatgccacgtttacgataataccatccatgaacataacatatttctgcatttatttaggtcttctctatgcctttcaataaaattttaatcttctccacaaggtcttcacatatgcttaggaatgatatacaactcagctataaaaagttggagttcttgattactataaagtcaattttctaattagttgttgctggggaactcaagtattctagagctagaccctccgagtttgagcagttttgctattatatatatgactttatatgcagccagtaactatgtaagaagttctaattctttatcttatttccctctatctttaattttgttctattatcttgttttgctggtcaggacctccagtattctaataaatacaaatgctgatagcagatgttaaagattgaaaggggttgtgcttaatgcttccttattaactgtgatgttaatagagccttatgccccatcatagcctttaggatgctgtctcctattgctagattgctaaatgtttctttgctttttaatgagctagtattaagttttaccaattttttaatgtgtctgttgagatgagaatatttgatttctttaaagtcaactattatggaggtataatttacatacagtgaaatgccacatattgtgaatgttacatttttgagtctgggctttgctgtatgcctacgaagtttcctgtgactgttctggataagtttgatgttttcaagactggcttttaagcttttttcatgatgaattcaggtgcatatcatattcctgaaggtctagtttcgcctcattactaggacatctttctggggcctacagaaaacctcatgtattcaagtgttctccactctggatttggggaattcaaatgattcttggccctgtgtgatctctgatgattttttttcttttttacttttaatttcccagtagttagtctttcctgcacatttttctttgcctggccacgtggaggtttgccctactcacgtgcagatggatgttcagtctcaggtgcacccaagcctgtgtctgcagctccttctctgtgtatctgcctccactctgagagtcttgcaccatgtaatgatgacctcagcctctgaggaccctctcctgctcctcagctcaaccaggctgccggactgggattcccctttcctcagccaagttctggaaattacgtccaggcagaaatctcagtgaccagaagccttatctcgtttgctgctcctctcacagggatgacagccctgagcccattaaagtccctgggtggaacgtgcagacagctgccactcggcaccgccctgactgcctctgtgtgggaaaggcttctgcagctgtcccaccgcacattcctgagacagcaggggccagacaataaaaggaggctgactgtaggcccacgaaaaccctgatggttttgtgactagtttcctaatgctctcaaatatataaactcaacagaactctttctttcttctttctttctttgtttctttctttctttttctttcctttctttctttttctctttctttctttctctcctcccttcccttccttccttccttccttctttctttctttctttctttctttcctttctttttttttctttcctttctttttttttctttctttcttttttttgacagggtcttgctctgtcatccaggctggagggcagtggcacaatcatagctcatagcatcctgggctcaggtgatcctcctgcctcagctttcccagcagctatcaccacaggtgtgtactaccacagctggctaatttttttaaaaaaatgtttgtacagttgagggtctcactaggttgcccagggtggcctcaaattactggcctcaattgatcctcctgcgtggaccctaaagtgctggagttacaggcatgagccactgcaccctgccagaactcttattttcaaacttattggtgccaaatttataggtggacagaaagtggaaaaaagccagatacaaaaatgatgataatcactttttttttgcctaatattcacaacatatttgcatacaagctttcaaggaaagggaaagcagacactcctaggacaaaatatactctcctaaggtttagaccagattttctctcggatcttgtcgtgatgggtcagacacatacgactgtgaatggagcagaggccactttctcttggctacagtcccctggttggaaaataattgcaggtgttctcactccaggagcttggtgatgtcaacttgtctggagtatggtgttaatagataagtaccaggaataaagatacgtaagtcggaagccacctgatactctccatttgatgagaaggagggtcaggtggcagcatgcatcactgtgcctcccacctgcatgaagattgacaaggagccttgtactatctcctcctactggggatcctgcactaggtactgacggtgatcaaaaggaacacaaatattggcggcaccttcacagtactagtcacacttttactattgctgccaaatatagatgatgtgaaaaacgctggacaggagaagcataaatgcaaagttcccctgcaaatctatgctaacatttacaactaccatccattgcttttttttttcccaattcagcattaactgcaagagccaatatcagattttgactcgttcaatttaaacaatggaacataaaagtcatgctacacttaatttctgctgtaagtaaaatgagattgaattgcaccccaatagatagaaaatccaccctgatgttcagtgttggaaaacagatacaaatatatctgcacagtggagtgtatcttgcattgaatgtaaggttttgaaggcaaagaaactaactcagtgcaagctcaggatctctttggtttttctcactggaaacgacactaattctctacatattccacttcaattcgaagctgctcattaaccattctgcttacagggcttagttaagctcctctgaaattggattctgtcctgggggaagctagttcagtgattgcatcctgtggaacttggcacacactggtctctcagcctgttgtcacttctaccccaaggactgaccttgggttgcttttacaatggcatttttccagttgcagtgcctttgggtttcctggtacctggctttcttcttgtctacgttaatgatttccccaagaggtcattaaaatggtccgctggaggtagaaaatgagagctctttttttttttttggacattaaaaaaatctcatttgcattaatgcgttttacaaaaagcataatgtatacatgggtagaattgaattatattttactgttagtatgtatgaccaaaaatgcttggtggaagctgttccttcaaattcctccttccttagtccacattccctgaacttgctatgaaggcggctgcttgcctgttgcccggtggcctctgacagtccacagaaactctccacttctgcacccctgatgcacatcctactgcttggcatggtctgtgctgatagaattgtgcacagagcatggggcaggaggtggggggcagcccgtctggggaacaaggaagtacctaagtgggagttccagggatgccgagagacgatgtacattgacagttgtcaatcagtggtaaaacacagccaagatgtggcagatgcttcagagagcacgagaactgacaccaacgtcagtacccaaaagggaaactgagctctcaacaagttagaggccaggatttctcagcaacagggcctgactgtggcctggaagcaagcccaggaacattacaattctgcaagcatgaacactacagatcagggaggactcctcccccgcttagcaatttccattttgttctcaaagtgattccatccatgaactgtgtggaaggatgatactggaagactttactctgtttctttaatttttcatagataatcacatatgaaaaaataacaaacacagtaggagagacgtttaattggaagggacgtacatcagtaggtcactgagatgaggaagtcggtctccagtgggtccgcgtttgttgagaattgcttgatggcctttaaaatactctcatttcactggtacaaattggataacagttatccaaattccaaatcaataaaaagatattttggtgttcaggcccataaatcattcattaacatacttttagtgtccaaaatataacaacctagctttccacttgtcagctatgactgactaactttctggaagactaatcttcccacttagaacaagaagaaaataaatggataaaaatagaaaaaaaaaaaaacaaactatgtatgtatgagggcgtttgagagctcttaaagtagccaggactgaagagactgaaatgttggaaggaaaacaaattcattgaggtgaacccgaccttctgtgtcacgtttgctgtgctgcagctggcagcctttgggtatgctccagtagacctccaatgtctgtgtgtgcatctcagtgcgtgacaatttggggtttggggaagtttagaaggctcttctaagtggtggcaggctggatatgaggtgggggtagggtgggggatacagacaccacctccctcccaacgcagcccttgggagtcggtacaaaaccccctagatccctcaaaaatgaagtatgacaaatgtgagacaggtgttttgagccattttccagagtttccttgaagggctcagctccagttgcttcccgtggtaactggcttaatgaaataaatttattagctgccctcccctctctatcacttccccatgccatgaccagtgtcccttgaagcctccaaataagtgacttttactgtaacatttatctcagcgtctgcactaaggcagcccagttgatgattcgttcgctgtgtggggcagaggctgtgaagctgaacagaaagcagctgcggagggcgcgaggctgaggagagctttcgttaggctggcaggcctgatgagatgaaaatggaggatcagggctgccacacagccagggcctgggaggccaagatccgggaaaaaagaagtgcagaaaagtgatttcaagagtttgacctgttactctcctaagccctttgccagttcctgagcagcacaggccaagaggcagagaagctgagcagctggcaggtcgtgacaggctggaaggctgaggagaaccaccagggttcccatcattctaggaaacaaaaactgggattcggaactgggcaaggtggagaggcccaggttctcatgctgggctttcgtgcatgaccctggggaacgacaaactaagaggcagggtaaccagagagagcaaagaaacttcatctagaactgtgctgaccaatgtcagccccaagccacatgtggctatttacatttaaatttactaaaagtaaataaaattaaaaattacttcctcagtcacactaatcataattcaaccgttcaaacgctccatgtggctaatagttaccatatcagacagcatacacatagaacatttccatctccatagaaagttctattgcacagtattgatctaggatttttatattttaaagcacatctctggcattaaatcaaatttaaaaaacataccaggacctagaacctaaaaaactagcaataaaattgtaaccgtggtgatccagatattagagttatcagatgcagactttaacaaaactttgattaatatacttgacatagatgacaagatagaaaaagacttccaagaatgaaaatctgtatgagctaattaaatggaaaataaaaaatacaatggcaaattaagaacacaaactatgggccaaatggcagatcagatacaatgaagagagaaatggttacgtggaagataggtcagtaagaaataaccagacagaagtatggaaaaaaaaaaaaatgaagtatggagacacagaaaagagaataaaatacctaagactatgatgaaataggtgtaacatggttctaattaaagttccaggaggggagaacagatctaatggtgtggaagcaatatttgaagagataatggctaagaaggcatttctaaaattggtaaaacgagattaagccacaaattcacaggaactatgaaaccaaagcatctaaaaaaaaaaaaaaagaaaatgacactgtagtaaaagttttggaaatcagaataaaagaaaaattgtacacacatccccaaaatgcacaaattaacttcaaagagcagcagtaagactgacggtaattgacttcttaacagaaaaagaacaacaaagaaggcactggaatctgatctttaaagtgatgaaagaaagtacatgctaacaaataattctattctcagtgaaaacatgcttcacttttgaaggaaaaataaagacatatcagacaaaaaacttagagaaattgctgtcagtacacttgcactaagagatactgaaaggagtccttcccatagataatatacttgctaagagaaacatggtagtgtataaaaaaattaagaactgcacgagtagtaaatatgtcagtaaatctaaatgaatattgaatgtgtaaaacatacttctaagctaattataacaacttgtagggtttaaaatgtatgtagaattaaaattaatgataattatgaagtaggacaattataattcatatgagactctactaaaagaatgcctactataatatctatggtaaacaataaaaggataatataacttaaaactatttgatcattggcataaaaatgaaatacttagggataaatctaacatgtagaagatctatgtgaggaaaactacaaaactacaacctcaatgaaataaatcaaagatctaaatagagagatatttcaggtgcatgaacaggaaaactcaacactgccaagatgtcagttctttctaagttgatctatagattaaacataataccaatcaaaattccagcaaattgttttctaaatgttgactaactaattctaaagtttatatggaaaggcaagagggccaaaatagccaacaaaagactgaaggagaaaaacaaagtcagaggactgacactacccaacttcaagacttcttataaagcattcccctggaaaaccagcccaagacaaggaagccctctctcaccactcctattcaacatagcattggaagtcctggccatggccatcaggcaagagaaagaaataaggggcggcatctaaacaagatgagaggaagtgaaactatccctgtttgcagatgatatgatcctatatctaggaaaccccatagtctcattccaaaagctcctaggcaatatcattcttggcacaggaaccagcagatttcatgataaagacaccaaaagcaatcacaacaaaagtaaaacttaacaaatggaatctaattaagctcaagagcttctgcacagcaaaagtaactattaacagagtaaacagacaacctagaaaatgggaaaatttttttgcaaattatgcatctgataaaggtctaatgttcagaatctgaaggaacttaaaacaaattgacaagaaaaaaacaaccccattaaaaagtaggcaaagcacatgaatagacacttttcagaagaagacatacatgcagtgaacaagcatatgataaaaagctcaatgtcagtgatcactagagaaatgcaaataaaaactacagtgagatactgtctcacactagtcagaatggctctgagtcaaaaaataatggtggtgagtttgcagagaaaagcggttacttatacactgttggtgggagtataaactagttcaaccattgtggaaagcagtatggtgatttctcaatgagctaaaaacagaactactatttgacccggtaatcccattgcattatagatcattctattataaagtcacatgaacttgtgtattcactgtagcactattcacaatacaaagaacatggaatcaacctaagtacccctcaatggtagtttggatttaaaaaatgtggtacgtataccccatggaatactatgcagccataagaccatgtcctttgcaggaacatggatggaggtcattacccttagcaaactaatgcaggaacagaaaatcaagtaccacatgttctcacttgtaagtgggagctaaatgatgagaacacgtggacacatagaggggaacaacagacaccggggacctacctgaaggtggagggtgggaggggagaagaccaagaaaaacaattactgggtactaggcttagtacctgggtgatgaaataatctgtacaacaaactccatgatatgagtttccctttataacaaacctgcacatgtatccctgaacctaaaataaaagttaaaaataaaagacttcccataaagctacaattatcaaaagggtgtggtattggtgaaagaattcataaatgtatatagggaacagaacaatgacctgagaaacagactcacacaagtggagtcaacagatctttgatgaaatagcaaaggccattcaatgcacgaaggatagaatttttaacaaatggtgctgaaacaattgcacatccacatgcaaagatatgtgtatatatatatatgcctcatatatatatgtgcttcatatatatatgcgcctcatatatacatatgcctcatagatatagatatagatatggagagagagggggagagatctcataccttcataaaaattcataaaagttaactaaaaatggatcatacacctaaatgtaaaatgcaaaaacatttagaagataatgtaggagaaaacctaggcaacctcaggtttggtgttgactttttagatacaacacaaaaagcactattaatgacaaaaaattggtaagtcaaacttcattaaaattaaaaacttctgccccatgaaagacgttgttcagaggatgaaaagacaagccacagactggcagaaaatctttgcaaaacacatgtgttaaagtactgatttccaaactattaaacaaacaaaaaaacccttaaactcaacaacagaaaaacaaatgtcccaattaaaaattggacaaaaccaaagtaatttatagattcaatgctattcccattaaactaccattgacattcttcacagaattagacattcacaagcaaaaagaccgaagctggaggcatcatgctacccaacttcaaactatactacaaggttacagtaagcaaaacagcatggcacttgtacaaaaacagacacatagaccactggaacagaatagagagctcagaaataagactgcacacctacaaccatctgatctttgacaagcttgacaaaacaagcaatggagaaagggtcttctatttaataaatggtattgggagaactggctagccatatgcagagaattgaaactggaccccttacttacaccttgtacaaaaattaactgaaggtggattaaatacttaaatgtaaaacccaaaactataaaagccctaggaggaaatctaggcaataccattcaagacataggcatgggcaaagatttcataatgaaaatgtcaaaagcaattgcaaaaaaaataagcaaaaattgacaaatgggatttaattaaactaaagagcttctgcacagcaaaagaaactatcatcagagtgaacagacaacctacagaatgggagaaaacttttgcaatctatccatctgacacaggtctaatatccagaatctacaaggagcttaaacaaatttacaggaaaaaaacaaatgacaccattaaaaagtgggcaaaggacatgaacagacacttctcaaaagaagacatttatgtggccaacaaacatatgaaaaaaagctcaacatcactgagcattagagaaatgtaaattaaaaccacaatgagataccatctcatgccaggcagaatggcaattattaaaaagtcaaagtcaagaaacaacagatgttggtgaggctgtggagagataggaacacttttacactgttaataggaatgtaaattagttaaaccgttgtggaagacagtgtggcaattcgtcaaagacctagaacaagaaataccatttgacccaagaatcccattactgtgtatatacccaaaggaatataaattattctattataaagatacactcacatgtatgttcactgcagcactattcacaatagcaaagacagaagatcaacccaaatgcccatcaattatagactggataaagaaaatgtgatacatatacactgtggaatactatgcagccataaaaagaatgagatcacatcctttgcagggacatagatcagctagaagccactgtcctcagcaaactaatgcaggaaaagaaaagcaaacaccgcatgttctcacttgtaagtgggagctgaacaatgtgaacacatagacacagaggggaacaacacatactggggcctatctgggggagggggtaggagggacagcaagctaatggatgctaagcttaatacctagttgatgggttgataggtgcagcaaaccaccatggctaacatttacctttgtaacaaatgtggacatcttacacatgtatcccagaatttaaaataaaacaaaaataaaaataaacaaaattgggcaaaagacctgaatagacacctcaccaaagaagaaacatggatggcaaataagcatatgaaaagatgctcaacatcacatgtcctcagggaattacaaataaaacataaatgctatgcccctacacacctattagattggctacattgaaaacactgacaataccaaatgctgactgagccatagagcaacagaaactctcattcattgctggctgggaggcaaagtagtccagccactttgaaagacagtttggcagtttcttataaaactaaagatactcttaccatttgatatggttttgctgtgtccccacccaaatctcatcttgaattgtaataatccccatgtaccatgggttgtgccaagtggagataattgaatcatgggggtggtttcccccatactattcttgtggtgagtaagtctcatgagatctgatgattttataaatgggagtttccctgcacaagctgtcttgcctgttgccatgtaagacatgactttgctccttattcgccttttgccttgattatgagccctacctagccatgtggaactgagtcaatgaaatctctttcctttataaatgacctggtctcaggcatgtctttattagcagcatgaaaacagactaataaaccatttaatccacaatcatgcttcttggtatttattaatttgagttgaaaatgtatgtccacacaaaaatctgcacacgaaagtttatagtagctttatccataattgtcaaaacttgaaagcagccaagatatccttcaataattgagggtctaaacaaactgtggcacattcatattattaaagattactcagagataaaaagggataagctataaagtcacagaaattcatggaatgttcttaaatgcatactgctcagcacaagaacccagtcttggcagggtacgtgctgtagggtttcaactatatgacattctggaaaggcaaaatgatggagacaggaagaagagattaatggttcttaaagcttcagggggagggaaggagggttgaatagattaagaacaggaggtgtttagggcagtgaaactactctgtatgatactataatacacacagaatatgttactattatactatacttgttctcaagtacagatatgtcattgcacatttttcaaatgctgtagaatttacaacacaaagtgtgaaccctaatgttaatagtgaataataaaaaacatcaatattttgggtatacttgtcctggttctcagaaaagggacactcccacaagtgggcacgttaataacctcaataacaatgaagctattgttgcttggtcactttgggtttctcatgccagtaaacttgatggctaaaactggagttgccatatggtcaggggagttgacccacgtcattatgaggaggaaggttacagacaggaatatatttgattttcagatatccattggagcatttcttgatgctcacatgtggatgagtaaataaaattatatatatgcaaaaatgataaactagaattatgtttaataataaattatgaattctaccaataatatttaacaactactatagtttatattacagtactgagactgggtatatgaaaggaaggaaggaaggaaagaaaataggaaggaaggagcggttatatttttacatagaaaagctttgaacattaaaaaataatgggcccagagaagaatgaactttggctggaatgttagctgatttggtttggaggttgggagtggttggtatctagagaagtcttaactgtgaaattgtagtgtagctgaatctttaaagattaaaggaaagtattacatgattagttttctttaaatatatgacttctaaacagttactgcaagattttgttgtcagtttgtttctttctaagagaatatcagttggagaatatgattttatatgcacaaaataattacatgggcatttttttttttttttgccagtcattgtggagcaatgtgagagcatggtgataaaggtaaggaacatgttttctttttttaactcctcttctgagtagctgtgtgatcttggacaagcctaaacttcgtgggctacctttcgaaacatggcagatgaggacgtctgaagctccttcccatgctaaatcacttgatttcaaacttgcatacacttagtcctagaatcagatgccctgatagaattcaacaaaactttcatttaaaattatagcaaaattacacaagttaaggtgatactatttcatcattatattcttttagtctctctctatgtattccttaacataatttagacaagcatttcaacaacaaaatacataaaataagttatagacttatattacaatcactactaatactcatagcattagtaagaagtgaaaacctttcattgataaaatgcaggcatcatggacgtacctggtttcataaatggcataaaatgttctgtgttctttgactgcgttcctgaaaaaaaaaaaaacacaaagaaggataaaaggtaatcttcatgattattgctaaggtctaaaagtcctttaataagcatgttcccaaactctgtctatttaagatatcttgactagcattttgtgaaaatcaagaaataatatttaaagaaatgtacacacatttttaaaaagtaatacacatcgtattagataagcttaggccctggtttctgctccaatagtagctaacgtggttactgaaccactgtttaaattttagtgaaggagacagaaaacaaacaataaagataatttccaattgtggtatatccagtaacaaaattaaaataaaatattataatagaaaatcatgtgagagaagccatattaaataggatgcaaaaaaataagtttcattggctaggttcggaggctcatgcctgtaatcccagcatttagaaaggcctaggtgggaaaattgcttgagtccaggagtctgagaccagcctgggcaacatagtgagacactgtctctaaaaaacaatacaaaaattagctgggttttgtagtgcaggtctggttccacctacttgggagactaaggtgggaggatcacttgagtccaggaggccgaggctgcagtgagcaaagatagcaccactgcattccagcctaggcaacagagtaagaccctgtctcaaaaaagaataaagtaaaataaacaaaatgaacagggcatagtggcatatgcctgtagtccagctactcagtaggctggggtgagaggattgcttgagcccagaaggtcaaggcagcagtgagccaagattgtgccactgcatgttagccttggcaacactgtaagaccctgtattaaaaaaaaaaaaagaaaagaaaaatttccatagagaacaaatttttagttggaacccgaggcatggaagaagttaaccatgagatttgtgggaaaacagaggcaatacaaagttcaaagttcctaaggtataaatgcatcaagtatgttttgagaaaaaaatcatcaacatcttcacccttcaccatcatcatacaatggtgaatgatgattcacccttaacatttttagaattactataaatccacagtaaaccaacctagacagtatagtattggtgaaagggcgagacatataggtcaattgaataaaacagtgactccagaaatacagtaaatcattcttgacaaagaacaagcttttcagcaaaaggtgttggaacaattggatattcatatgcagaattaaaccttattgttaatggtaacaatagaaatcataattatgtattgattactatgtacaaggcactgtatttcttatgctgaaagagtcgtttaaaataagaaaactaaggcaagtaaacaagggaaagacaaatccataactgaaggcagaaaaactataactgatagtaaaaaaaaaaaaaaaaaaaaagtgccattgttgtggaaggacacatcaatgtgtcctgaggcctggcctttaaccttcctccgacacctgtcaccaggcaggtcagctgctgcctcacacagaattactggacatctaaaaagtacttctagaattaaaaaggaaaaaccagataacatttttgacatgaagtgaaattactgacaaagatggagcaataaagtaaaagaggcaaaataaatatatcaaagacacaagagaatattagtagcatgggatgaaatgacataaaaaagaatatgacaaagtatcagttataaaatatgaaactgttttaagaaagaacatgtggagaggaataaatagaatgtaaatgactgaagaacaagtgagtggcctggaagatcatactggagtctcaaaagcagcaccgaagaatcaggagttaggaatagcaaagagagagaaaatatgtaagtgacaacatctggaaaataggaaataacagaagtgcaaaaaaagaaaactccccaggaaataagttctgtgataaaattagaacaaatttcccagaattcaacaagaactattttagattaaatgagtctgtacaacacagaaaatatatgggctaatataccaaaaaaaaaaaaaaaaaaaaagtttaaagggacctataaaggtttctatactgcacttaagcaggtacaatttttattctaaatagacttttaaagattcagtatatatattgtaatccctagagcaaccacaaaaataactatacaaagagttgtatttaaaattaaaacatcacttaaaatgaaaacttgagccaatctgaacactacacctgggatagagacattaaatgatctggtaacatatgcattatttaggccacaaaggaaaatcttccaccaattccaacgaaccagtgtcatacagactgttttttaaatgtaatacaatatattcctgctaaaattttacatattttggaaaaatgattcttagatttaaaataattttgaggattataaatacttagaaatggatggcaatgaatacactacaggccaaaatttcatttaactaagaactgcaagcagaattcacattagaaaatctgtcagtggaacataccatgttggaatgcaggaaaaaaaatacgcttatctgaacagattcaaagaaagattctgaaaagttcaaaaattttttatgatattaaaaacttactcaactattgcaaaagctaaagacaccgcaaaacaactattagaacagataaactaattcagtaaagttgcaggatacaaaatccacaggcaaaaatcagtagctttcctaatgccaacagtaaaaaatctgaaaagaaatttaaaaagtaatctcatttacaatagccacaaataaaattaaatacctaggaattaacttaaccaaagaagtgaaaaaaaaaactacaatgaaaaccataaaataccaaggaaataaattaaagaagacaacagaaaatggaaaatatttcatgctcatggattgaaagaatcaatattttttaaatggccatactacccaaagcaattgcaaagattcagtgcaattcttattaaaatatcaatgacattcttcacagaaatagaaaaacaaacctaaaattaaatgaaatcacaaaacacccagaatagccaagctatcctaagcaaaaagaacaaaactagaggaatcacattacctgactccaaattatattacagagtcatagtaaccaaaatagcatggtactggcataaaaacagacaaacagaccaatggaataggatagagaacccggaaataaatccacacacctatagtgaactcatttgcaccaaaggcgcctagagcatacactggggaaaagacagtctcttcaataattggtgctgggaaaactggatatccctatgcagaagaataaaactggaaaactatctttcaccacatacaaaaatcaaatcaaaatggagtgaagacttcagtctaagacctcaaactgtgaaactactacaaaaaaattgggggaaaatctccaggacattggtctgggcaaaagtttcttgagcaataccccacaagcacaggtaacccaagcaaaaatggacaaatggatcacattaagttaaaaagcctctgcacagcaaagaacacagacagcaaagtgaagagacaacccacagaatgggagaaaatatttgcaaactacccatctgacaagagattaataaccggaacatacaggaaggtcaaacaactccataggaaaaaaaaaaaaagaacaacaactaataatccaatcaaaaaatgggcaaaagatttgaatagacatttcccaaaagaagacatacaaatgggaaacaggtatatgaaaaggtgctccccatcactagtcattagagaaatgcaaatcaaaactacaatgagatatcatctcaccccagttaaaatggcttatacccaaaagacagtcaataacaaatgctggcaaggatgtggagaaaagggaacccttgtgcattgttgaagggaatataaattagttaaaccactatggagaacagttttgagcttcctcaaaaaactaaaaatagagctgccatatgatccagcaatcccactgctgggtatattcccaaaagaaaagaaatgagtatacggaagagatatctgcactcccgtgtttgttacagctctgttcacaatagctatggtttggaagtaacctaagtgtctatcaacagatcaatgaataaagaaaatgtggcatatatacacaatggaatactgtacagcctgctgtatataaagaaatgtggcatgaaataagccaggcacagaaagacaaacatcacatgttctcaattacttgtgggatctaaacatcaaaacagttgaactcgtggacatagagtagatggttaccaaaagctgggaaggggagtggggagttgggggggaggtaaaaatggttagtgggtacacaaaatagaaagaatgaacaagacctgctatttgatagcacaaccaggtgactatagtcaataataacttaattgtacatcttaacataactaaaataatgtaattggattgtttgtaacacaaaggataaatgcttgaggggatggataccccattccccatgatgtggttatttcacattgcatgtctgtatcaaaacatctcatgcacttactatgtacccacaaaaattaaacataaaagaagatttaaaaagtaacgcagcgaattagaaatagaaggaaacttcttaatcttggaagatgttacattccaaaaatatatatagcatataaaatctgtagcatacacatgcttaacagagaacctttacatgccctctctttaagatcaggataaggtgaaaatgcccactagagccatgttaatttaatgtcattttggagattctagataataatctaggaaaagaatagaattgtcaggtgtcaggattagaaaggaacagataaatctattgttatgttagatcacatgataatttgaatagaaaaaaataagataataaacaaatacattattaaaacaacaagagtttggcaaaatgtcagattttggtcaatttccaaaaccaaatatttctctgcaaaagtaaaactactaaaaaatataatactttacaaaatataagaccataataaaagtaaaatataattaaatattgttgctgttgctctgcagaaagaagatggaccctcatccaaaatctggtttggctgttgccacactcaaactgagagggcgtgaaatgtttatcactcgcatagcagagatcttgggggacagcgtggcaggctccccaaactggacttaaagtgatttgagagagtggggaaagggaggagactggctaggttgtttttgttgatgttgttgttgttttgctttgttttaataccgacagggtctcactatgttgcccaggctaggttggaactcctgggctcatgcagtcctcctgcctcagctgctgagtagttggaacaacaggtacacaccactcactgcacctggcttggctagggttttgtattgcatatagggagtgaggccgcctgggtgaggaattccgtacatcagtaggtggttgcctggcttgaaaccccaactggtgccaaaggagagagcaccaggtttttttctaagcttgcccagaaatgaggctcaaggctaagaagaaggaacgaggcttaaaaagctgtctcaggccgggcgcgggggctcacgcctgtaatcccagcactttgggaggccgaggcgggagaatcacgaggtcaggagatcgagaccatcctggctaacacggtgaaaccccgtctctactaaaaaatacaaaaaattagccgggcgtggtggcgggcgcctgtagtcccagctactcgggaggctgaggcaggagaatggcgtgaacccgggaggcggagcttgcagtgagccgagatcgcgccactgcactccagcctgggcgacagagcaacactccgtctcaaaaaaaaaaaaaaagctgtctccggagtcagacattaaacaattagggttggattctttattacaaacagcgaaaaaataaacataaacacacaatcaacgttaaaagtaactttttaaagtgactgacagttttctaaaacaaaagatatttcttgcacatggttacgatgagctaaaaatagaaacatgttagttattcctaaattaatctatagattcaagtcatttccatcgaaattcccactggagtttttgagaaactcaatacattgattcaaaaatttatgagatacagaatgttttgaataattaactctttaaaaaaaagcaaagaagaatgattaagcatatcagatactgtgatataccataaagttataaaaataagttataaagttataaaaataagaccagtaaggtgccggctcaacaagaatctgcaaggctaatgtgacacaatagagatctcgatgacatatttaaacttaggctcataaaatctggaaaagttagtactaaaaaccaatggccaaagggacattttagcttaaggttttggaaaaactgagtcactacataaagaaaaatataaaaatacaatttcatgattgccttgaagttagtctgatatatatatatcagactatatatatgatatatgttatatatactatgatatatataatgtatatatataatatataatatattatattacatattatatattacatattatatattatatattatatattatatattatatattatatattatatattatatattatatatatactatgatatatatatagttaattaaaacgttagaaaattaccttccataggccctaggtgtgggcaatgttatgggtagtttatttgccattattctagggcaatatgtgtttgtttcaaataacgcagtaagttggaaaactaatcaattcactttttcaagacattatacataataacacagtgtagtctgaaagaaacgaagtaatacatagattttgcttttaataaacatatctgaagcatttggttccaggtatcttaaaaactaaatgtgaaaggaaaaaaattgaatagatggcaatgtaggaaaatacatttgtaacctaaaagcagggatggtcttcataacctaaatgccgaaagcacaaatcacaaggtataatattgctatatttgatatgtgattatatcaaaagaaaaaattatgttccatatggaatatgacacagtttactgacagatcacagattgtggggaactatttgccaagtctaataccaaaaagcatccatacccagattacacaaggactcctcaagtaaacaagaagaaatgtaggcacatcagttgaaatactaagcaaaggatatgaacagataaagtgattcagaaaagaagccagaaagcaaaagagcatttggagagttgttcaaacattatagtaattaaaggaatgcaaattaaaacaataatcggatatcatttcactcataagagattggcaaaaacagctgggtaatgcagtgttagtaaaattctgtggatagaggaaacctaatctgcagccaataagaatacagacaggtgcagccattctgcagagaacctgggggccctggtccagttaaatatgcccagatgtggtgaccatcagtcccgctgctgtgaccatatagagaacagttctcacacagtttgatgatgggatgtgtacaattatgttcatcagaacattgtctttgggagtggtggttagaggcaatcaagttgtccataacttggggaaatttaagacataatggattcatacggaaaatattacgcaaaaataataggtcacaaaatagttgtaagcactgaaatagaagataaattttaaaaatacaaaaaattagccgggcatggtggcaggtgcctgtaatcccaggtactcaggaggctgaggcagaagaattgcttgaacccaggaggcagaggttgcagcgagctgagatcgcaccattgcactccagcctgggtgacaagagtgaaattctgtctcaaaaacaaaacaaaacaaaatagaaacatagattggagtggaaaacgagaaatagattaaagtctatatcaaaagctatttatttaatgtaaaagtgtatgtttggaaagtaatattacaaactgggtaagaacgaatacaaatgaaagaatatgtatcagtgatatttgaatggctgcctatggcaggggaatggaattagggtatgaaagagagagaaagtaaaatgccatctatatttagaaataaagaaagaggggctttgcaatcgcagtctttactgcgattcaaggcacgattaccttgaagttagcctgaagtttacatatgtggtgaaaactaccttctacaagctctaggtgtggaaaacttcatgggaaatcttttcgcaatgattctaggacactatatattgtgtttcaaagcatgcagtaaattagaaggttaatcaactcattatattaagacaggttacacacaataacccagtatagttccaaagaaaaagcaatcaatttttttgattctctggacaaaaatcccgaaaagaattaagtcaatctcaacaataattttaaaagaaaattttcaataaccaaatagtacttactgcaatgaaggattttctttcccatttttaaaatcttacaatatatcacattgcttcaaaataacaaatgaactaggctatgccatcccatcaatagctgcagaagtgatatttaataaaaaccaacacttcttttcttttatttttaaaacaaaattttaataaactaagaataagagttattattattttaacataataaataatttacatgttcttcaatgaactatatgtacatcctcatggtacttcctgcatagtgcaagtactattatgattaatgaatgatatgtaaatatcttaaactgataatatcttcaaaataatttatagtaaaattaaacagtgaatagctgggtagtaattacaaatgtgggaatctgcttgtagaaaataacatgtgctgatttctgattattaaaaaagctcatggccaaaaagctgattataaaaaagttgatatttatctcaatacattttactactaaactattagaaacagcatatgtgtccaacaatacagaaattgttcaataaaatatggtaacagacttttaaaggaatattaatcaggcatatcatctatttcaataatctttaatgatataagaaaatgctcacaacacaatattaaatgacatcctaatactaaaccttgcctgtgtatgcttagtaaatagatgaaatttaaataatgcataactctgagtattgaaataacgagttaatttttgtagtgtccaaattcttataccatttcataatcataaagtgactataaattatagatgaatttaaaaaatagaattgagattataggaaaatatctttcaaaaaaattttaaatctcttgtaattttaaacataatgtatattttacaaaaattaaaacacttaggatatatgttacataacgattatatcaaaaaaatgaatgtagctcaaaacaagtatatgagcagttatgctggtatttctttttcccagaacctgccaagccttgagcagtgtcagacaatcaacagtcattagaagacgaaaaagcctcgatgacttttacagaattgctcttcaataatgtagtttctgactgtttgaccagcctctttttacattttctcctgaggctctgaaactttcttaatcttcttagtgatgagaaatcttttgctttttttcttgctcagaaaaatatctttggagtaaatggctggcaaattgaatttctctgccttgcaaagcctttttaatgcaatcaattgcaatgtaagtggaagctgccattgcaagtctagtaacaccagtaatattcacaggaaaagctacaaaatcaatcttggtatggaaatatttgttgtaaaatcaaactagtgcttattgccaaggcgattactatgactgatcaaatgggtatcaagccttcccacaacacatttaatagaagcatggcttctattaattattctattaatgccatttaatagaataatggcttaccatcttcatctgcaaaaagccaacacctctctccagttccatgactagctgtgctttctgcttacctcttgctactttttttttttttttttttttttgagacagccttgctctgtcgctcaggctggagtgcagtggcacgatctcggctcactgcaacctccacctcctgggttcaaaagattctcctgcctcagcctcccgaatagctgggattacagacacatgccaccacgcccagctaatttttgtatttttagtagaggcaaggtttcaccatgttggccaggctggtcttgaactcctgacctcaggtgatctgcccacctcagcctcccaaagtgctgggattacaggcgtgagccacctcgcccagctacctcttgctacttttaaaacatggcctttttctgattataaaattaatgcaggcttattacagaagtagtgtgaattttacagtcacagactctggtgtgcaaacataaccatttacttcaaataattgtacttaccaagcccccacctgccaagtgcagacaatttatgtacctatgtaatttcctcaggcattttgtaacttccacttggttctgagtctgctgcttcccttctctgccctgtctcctggggtgacctaagatttagggatgttgttgtcctggcattgtgggaaggtgagactctgggcccaagtttgcagtcttttctcatgggttggtgaaatgctactgtggaaagtgttgacttccccacttactttcttgatgacagaagatagctatttcggggcgtgcaaagtcccattaagttcaaaggatgttggccttttacttaataatgatgtctccctgcctgtgggatgtgaaagtttatgacccagtctttgccaacgcaatcccaggggacggtctttaggaatcttctgcaaaacatttggttcctactgattatgaccccttatttactctgcacaatatctttgccattatcaaaccctgaggtataatgtctaatccataacatcttgcctcacccaggtagctccctcctgccccagctcacactggctatttttcttgcttgctgcacagcagctgtgatctgagtgtcagaggctttcgaaccagagcgactccattttgagtgacggccggggaaataaggctgggacttgctggccttcattctcagaaagttaggtatcctgagcctctagatatttaagatgaaggggacaaattaataatgtttactaaacagacccagacttgggagtgtctagatatcacgacatctggagaacaaaggcattcctaatattgcattaaagctaataatattgattcttgcaaaatatagtaaggattaaaaaattaatcctttatcacaaatccttgtagcagagcacatctccccatatatacaagcattgtacctagggtggatgcgttcctcctcttattttcaggaatgtcccacgtcccactctgtctatggagtagctgttctttctccactttactctcttaataaacttgcttttactttgcactaagggctctccctgaattctttcttgcaggagatccaagaaccctctcttggggtctcgatcagggcccctttcctgtaacaccaggacttccaatagttgcattcatttgttggatacagtttcctgaatctcaggtgtttttttttttttttaatgttgatttcctcaccaactgtacagaagcacatgctggagtaaattcctcaacatggtacacagaaggtacatcccataggatggctcagattaccagtagcaaaatttgttgaaggaaaaaaatgggaatttaataattatttacctgaagagtctgtaagtggggtaggtgggagacacatttggatccagactctgagctgtcccactgttacaggaaaggggtcccgatccagacccccagagagggttcttccatctcgcacaagaaagaattcagggcgagtccacagtgcaaagcaaaagcaagtttattaagaaagtaaagtgttgaaagtgcagctactccatagacagtcgggcatttctgaaagtaagaggaggaaacgtgtccaccctaggtacaatgctcgtgtgtgtatgtatataggataaaaaaagatcatgaggagatgtgctctggtacaaaggtttgtgataaagaattaattttcttaattactatattttgaaataatattattatcttgaaagaaaaattaggaatgcgtttgttctccagatatcaggatatctgggcattcccaagtctgggtctgtttagtaaacattatcagtctgttcccttaaccataaacatctagaggctaggaatacctaactttctgggaatgcagcccagtaagtcccgcctcattttcccagcccttgctcaaatggattcgctctggttccaacgtctctaacgtctctgggatcctctctactccatccttctttcttcaagcattctgatatttcagttaggctgactgtccacataagagaaaactgaatgaatgaagcccttcaggccgaacatacacgtcgggccatcctgaaaaggactgacagtttcttctcagcattctaagggtcctcacacctgagacaatcaatgcagccttttccttcaacatgactacaacatttatttgtaatagagttagattcattggtcacagtttgcttcgaccttggcttctatcaatatcctcgttgattttaaaaattggaataaaatatgcacttaactctttgtggtgtatagttccatgggttttcgcagatgcctagggttatacatccatcagcaaagtaccatacagaatagacaattcatcacacacacacacacacacacacaaacacacaattatccctgcatggccttttttggctgtcatcaatccttcatcttcagctgcgagcaaccaccgatcagttctctgatatagtactacctgttccaaaacactgtaacagttgaatcaaacaacatacagtcatttgggtttggtttctttcactaagcaaaattcactccagatccatccatgttgcatgaatgaataaatgtttctttcttacgactaaatagtgctccacgttatggatgcactagagactgtttatccattcatttgctgaaggctgtctgggttgtttcagtctttgcaaagcatgaaaaaaggtgctacatatttcatgttcagcagtggtccccaaccaccagccatgcaccaggccatggttacaaactgggccaaacagccgatgagtgttccccaagccagggagtgaagctttatctgtatttacagccgtcccctatcactcacattaccaccagcgctctgcctcctgtagatcagtgggggcattaaattcttgtggtggcatgaaccctgttgtcagctgcatacacaagggatctactttgtatgctccttatgagactctaatgcctgatgatctgtcactgtctcccatcgcccccagataggactgtctagttgcagtgtgtccggaattggtgagttcttggtctcactgacttaaagaatgaagccgaggactcttgcagtgactggtacagctcttaaggtggcgcgtctggagtttgttccttctgatgtctggatgtgttcggagtttgttccttctggtgggtttctggtctcgctggctcaggagtgaagctgcacaccttggcggtgagtgttacagctcttaaggcggtgcttctggagttgttcgttcctcccggtgggcttgtggtctcgctggcttcgggagtgaagctgcaggccttcgcggtgaatgttacagctcataaaagcagtgtggacccaaagagtgagcagtagcaagatttattgcaaagagcgatagaacaaagcttccacactgtgcaaggagaccacagcaggttgccaccgctggctcccgcagcctgcttttattctcttatctggccccacccacatcctgctgattggtagagccgactggtctgttttgacagggcgctgattggtgcgtttacaatccctgagctagacataaaggttctccaagtccccactagattaactagatacagagtgtggacacaaaggttctccaaggccccaccagagtagctagatacagagtgtcgattggtgcattcacaaaccctgaactagacacagggtgctgattggtgtgtttacaaaccctgagctagacacagagtgccgattggcgtatttacaatccctgagctagacacaaaggttctccaaggacccaccagagaagccagatacagagtgtcaattggtgcattcacaagccctgaactagacacagggtactgattggtgtgtttacaaaccttgagctagatacagagtgccgattggtgtatttacaatccctgagctagacataaaggttctccacgtccccaccagactcaggagcccagctggcttcacccagtggatcccgcaccagggctgcagatggagcggcctgccagtcccgctccgtgcacctgcactccccagcccttgggtggtcgatgggactgcgcgccgtggagcagggggcggcgctcatccgggaggctccggcggcacaggagcccctagacggggtgggaggctcgggcatggcgggctgcaggtcccgagccctgccccgcgggaaggcagctaaggcccggtgagaaatcgagcgcagcgccggtgggctggcactgctgggggacccagtacaccctccgcagcggctggcctgggtgctaagcccctcattgcccggggccggcagggccggctggctgctccgagggtggggcccgccaagtccacgcccacccggaactccagctggcccgcaagcgccgcgcgcagccccggttcccgcttgcccctctctctccacacctccctgcaagctgagggagccggctctggccttggccagcccggaaaggggctcccacagtgcagcagtgggctgaagggctcctcaagtgccgccaaagtgggagcccaggcagaggaggcgccgagagcgagcgacggctatgaggactgccaacccgctgtcacctctcagcaggaaaacaagcttggggctcccattgattctacgttatggtgagctgtataattattccattactacaaggtaataataatataaataaagtgcacaataactgtaatgtgcttgaatcctcctgaaaccatcctccccaccgcatcctgccctaatcggtggaaaaattgtcttcaatgaaaccagtccctggtgccaaaaaggttgtgtgaatgtaaattttcattccatttgtataaatacttggaagtggctttcctgggttaggtggtaaatgtgtgtttaattttaaaagactctgccaaatggactttcaaagttgcattagattagactctaatgcagctgctgatctgacaggaggcggagctcaggtagtaatgtgagcaaagcgaggcagataagtacaaagttctcttgctgaccgctcacctcctgctgtgtggcccggtttggatgcgaacagtaatgtgtgagagatccagtttctctgcatcctcaccaggacttgatggtttcagttcttgtttttgttctgtttgttttgttttgttttgtttttaagttttagccagtccagtagatgcgtaattgtatcgcattgtaggttactatgcatttctccaataactagtgatgttgaacatcttttatatgcttacctgccattcatgtatcctcttaggtaaaatgtctgttcagatcatttgcccatttaaaaaagtgtgttgttttcttatttttcagttttgagagcttcttgtatattctgggtagaatctgtatctgataaattcggttatcagatatgtggcttaaaaatattttcttccagcttgtggcgtgtcttttcgttttaacagtgtatttcaaagggcaaaaattgctgaaggccaatttatcattttttccttttatgaatcgtgcttttaacatcatatctacaattaacttcttccaaaaccagactttcactgatgtttattattccttctgctagaagttttaccaccttttattttatatttagatccatgatcacttttaattacatcaatttatgtaaggtgtttttttaaaatatgaatattctattgttccagcaccgtttgtagaaaattccattatttctcaattgaattgtttttgcacttttctcgtaagtcagttgacctgacttgtgttggtgtatttctagactgtctactctgtttcatcgatctatgtctctaaattttcatcaattccactctctcttgattatcgtgattttgttatgaatcttgaaatcaggtagtgcgaatcctccaaatttgttacttttaatgtttgtattagctattctgttttctttggcattccttatatttaagcatcagcttaatatcactagaatatcactagaaatatcactagaaaccttgctcagatttcaactgaaattacattgcatctattgatcaaattggggaaacctgacattttaacatattgaatcttctaagccacaaacatgatatatctccctttatttaggtattctttgatttcttccattacctctttatacgcgtacagactttgcatgtattttgttaaatatatacctaagaatttaaaaatataaattatatttttaaaatgaaaaaatccatttgtcaatagctaacctgtagacattatatggacttttgtatattgaccgtgtttcataagatctgattgaactcactttttcttgaagtttttctgtagatccttttgaattttctagacaattatgtcacatgagtacagacaggatttaccttttcatttacaatatgtaggtctattcttgacttactgcactgggtacagcttccaggaaaatgtcaattagcagtataaggaaggggcctcctaaggtggtctgctaagggtggaaacattcattctttcaccatttagattgatgatacctgtagatttttttgtagatgccctggaacgggttaaggaggtccctttctagtagtttactaagagttttgtatttgtttcttttattcatataaaattcccataacagaaaattcatcattttaactattttaaagtttatgactcagtgatttttagtattttcacaatgttgtacaaccacagctactaattccagaatatttccacactccagaagaaacccgtatttccaaattcccctctctcccactccctagcaaccactaatctacttcctgtcactatagatttgcgtattttgaacatttcatataaatgaaatcataaagtagtgtttgtgtgtgtgtgtgtttgtcttcttttacttagtgcaatgttttcgagatccatccttactctactatgtagcagtacttcattactttttgtggctgaaacaaattatatggatggactacattttgtttatcctttcctcagttgtggagcatttgggttgttttcaccttttgcctgttatgaataatcctgctatgaaaagtcctatatgttcatatatgtttgtatgaacataaggttgcaattattttatgtaaatccctaagagtggagttgccgtatcacatgataaattctatttttttttttttttccgacacggagtcttgctctgtcgcccaggctggagtgcagtggcgcgatctcggctcactgcaagctccgcctcccaggttcaagcgattctcctgcctcagcctcccgagtagctaggattacaggcacatgccaccacgtccagctaattttttgtatttttagtagagatggggtttcaccgtgttagccaggatggtctcgatctcctgacctcatggtctgccctccttggcctcacaaagtgttcggattacaggcgtgagccatggtgcctggccacttgtcactttcttgatagtgtccattgatacacaaaagcttttgattttgatgaaactcaatttagcttttttttcctttgattacttgtgcttttggtgtcatatttaagaaactgttgcctaatccaaagtcacaaatatttacacctacatttctttgaaggaattttatagttttatcacctatatttatacatgctatattttgaattaaatgttgcatatggtgtgacatggatatccatccttttgcatgtggatatctgtttttctagtgccatttgttgaaaagattattctttcctcacagaatgctcttggcacccttgccaaaaatcaattgaccagagatacatggattgatttctggactctcaatctggttccattgatctatatgcctatctttatgccaatatcacacaattctgattattgtagctctgtagtaagttttgaaaccaggacatttgagtcctcaatctttgttcctcttcttcaaggttattttgactacttgaggtcccttgcatttccatatgaattttaggatggatgcataaatgtctgcaaaatgaggcagttggaatttttatagggattgcactgaatctgtagtgaatatggggagaaatccatcttaatggtattaaaatttccaatccatgaacatggaatatcttctcatttatttaggtcctctttaatttctttcaactatgttctgtagttttcagtatgttaagacttacactttcttgacttaatatactgctaagtattttatcccattcaatgctattgtgaatgaaattgtttttaaaatatccttttcagattgttcattgctaatgtatagagatacatgtgatttttcatattgatttgtatcctgaaactttgctaaactagtttattagttgtaataggtttttcagtatgtatttgtggattctttagaattttctatatataagatatgccatctgtgaatagagacagttttatttccttttcaatctaggtgctttttatttcttttttcttgtttaattgccttggctagaaattccagtacattgtcaaatagaagcagtgaaaagggatacgcttatcttcttcccgatcttagcagatgttagctgtgggtttttcacacatgcccttgatcaagttgaggaagttcccttccactattagcttgttgagtgttttatttttagtcatgtaaaagtgttaaatatttccaaacgcttttctgcatctattgaaataatcatatggtttattttctatttattaatatggttttttacatccattaatttttgctaagagtttttatcatgaatcgcttttgaattttgcctgtttctttcgcacctattgagataattatttgacttccttcttagtctgttgtacagtaaactacattgattgatatttaaatatcgaactaggcttccatcattgagataagaacatgattgtgatgtaagttttttatatgtttctgaatttgatttgctattattttgtcaaggattatttgtattagtggttttttgggatattgaactgtagttttcttttgatataattatctgatattgttattagggcaattctggctgaaaatgtgactgtgaagtgttctcttttctatttactggagaaagtataataaagttagtattatttcttccttaaacgtttataggatctgtcaatgaaaacatttgggcttggaatttttttattgaaggttttgagctatcaattcaacttatctaattgacatagaactattcatttacatacttccctttgagcaagttttgatagcctgtatcattcaaatcatttttaggtttcatctaattttgtgaattgatgggcatagagttgttgctatcatttctttgttatctttttaatgtctgcagagaagttgtaatatccacatgcttgctattgttgactatagtgttctatatacactgattcagtcaagttgttggatagtattgttgaggttagctagatccttaccagttttcagcctactgttctattatttctgaaacaccagaggttccatctaggtcctgctgcccaccgcacagaaagccaatcactgagacaacaaggattgccaaggaagaaggctttaattgggtgctgcagccgaggagatgtaagctcagtctcaaatccatctccctgaccaaataaaactaggggtttgtatagcagtgaagaaatgtaaccatgtgtaagaaaaaacctagggagtggcaaagacgcaatcatggtaaatgagggtcctggcatctgatgtggtgatctggtgtgtttctgttcttttatacttttttgagaagactgatatggtgagtttcagttctttgatactttttttaagaggccagaaggtcctttcctggggaaggaacgcagataaagcaaatataactttcaagctttaagaccaaaaggatacatttctatgtgtattcaaaatggacagtctgtgggactattgggttggtttcactgtcagttactgaaagaggaatgttgaagtctcaagtataattatgtatgtgtacatttcctctttaatcccatcagtttttgctccatgtattttgtagctctactgctaggtacataaacattttggattgtgtgtcttcctggagacatattccccctttatgtatgtccctcttactagtatttttttctatctcttccaactcatttttgtttttccctcttgttttaccttttcttgggttacttgagcattttgttactcatttaatcttctctattgacttttttatcttttccatttttatagcttaccacagagttttccatatacattttaattattcatatgttctcttcatatatcataccactttataaacagtgaaaaaatgtacagtattttcccaatttatttctcatatcctttgtgttattgtaaattttactttttcataggctataatcatacaatatgcatttttccttcttttgatttaggcagtcagtaatcttttagaacaatttgaataggaaaagaatgtaataaataattttatttttaccttcactgattacattttagtgttctttattcctttgtgtatattaacttctatctggtatcatctttctcttcctgaagaccttccttaaattttcttcaggagaactgctggtaataaattcttacaattttttttgtccaacaaagtctttatacccacttcatttttaatgatactttcactgaatcacaatagggggttttgcttcctttccttcttctagcactttaacagtgtcactctgttgtctcttagctgcatggattctgaagtcagccgtaatgcttatctttgttcctttgaatatatcatattatactagtataaaagtcattgcggtttttgccatttgaaaataatgcaaaaactgcaatgacttttgcaccaacctaatagtgtatatttttttcctccagctgccttgaagattttctcttagtcttacacatgtatcactttggctctaatatgcctagttgtttgtttgtttctgttttttcttgcttgatgttctctgaacttagatctgtactttggtgtctttcatttattttgtaaataacttgtccattatttcctttgttccattctttccacttctccttctgatattccagttatgaccatgttcatttgtccattttcctgagaatggtcctgccaagttttgccactgtgcacaggtctggttgtgggttatacacattacctctatgcgcaagtctggctatggagtctcttgcgtggcttcctcatagacataactaacctcctggtttctgtcccggttagcaatcttgcctggtgtttctcccgctctgggatgcacctggcagtccccctctgggatgcacccggcagtcagcttctccaaggtttccctctctaggcagccaggtgtttgctgcttctactgtttcatcactcaaacgtcttcatctattttgcattatctagatttttaaatgtgtgatatatgttctctgatgcccacgtctcgtcgttcagctcttttgctggtacttaaggagttcttgggtcactctgcaggaacactggagcccggcggccccactctctttattggcagctctggcgtccttccatcacccactgcggcgtcttggccacgatcggacagttctcctcatggccacaagagggcgaagaggagctcgccctgcccttccgaggaggccaggtcacccctccagcctccttcagaaaactgcgactctaccttcgtggaaacggcgcagaggggtgagatggagcgggagagcacggaggacggagtggagacaggggctagattatgtagggcctgtggggctctcaggtgtcactgtcattttattctaagtgtgaggaggacccattgagctggggctgatgggatttcttttgtttgttttgtttttgtaaagatcacgcttggattctccaaggaagagagatggggcttggagaggtgtaggaggctgtagaagggcgagttagggctcagcggaacccagcgggcggagactaggactgagccctagctcagaccctttgaatgtcagttaattacaatcaaaagaaggtgaaaatttgcaactttcattcattctccaaaaggacagtttttccgtatgtgttcatttctccttcaccttcctttttattttttatgttttgttataataaatgtcgaatatcaaagcaatgtataaaaacagacacatatgtgaaagctccaatgttaatgcttcaaagtaagcctgtgcaatgcacaaaaaattaaaagcaggtctttccccctgttaagtaacgtgctgtttgatatatgctatccttcattgcagtgtgcatacattagagatgaaagcagaccgagctataacggtactaataattctataatttagtgcttgctcccacatttggacacggtaacgtaaaacctatggaaactgacgtatgttcaatgggtttctccagccagatattttcactcttaaccttttattcaactcttttttacatctttcaatgactttttgtgattctattcattaaaaccttagtgtacttacatttactctaaggtgttttgtcaactgtgtttaatgtgaaagagattatctttgtatttttacatgcttcttgatgatttgtaaggcttcacttagaacacatgtggattaagtagccagccacctttgtaaactgttaaaaacaatttctagtatttattgcagtgtttgggctttctctgtatataatgacagcacttgaagatgaaaacacacatgccctttctttcctttcttgcccttttgctttggagacagcattctaaatagtactaaaagacaaggagggtaacttcaacagaaatacataaaaatggtgatttcatatatggttcaaaattaaattgaaaaattgtcaataaatatgaataaaatatataatccatttaaaacaattctcagattggctggatatttttcaaacagcaaaatccagccacatggtttacaagagacacatctaccacaggatacattgcttgtgactcatgtttacttacaaaaatgtctatttcaactatgatccgactcaatagaaagattaaaaatagagaatgcagagatatatactagaaataattaccctaaaggaaactgatgtggctgcagactttaaggcaatcaaagtagacttctactttaagtagactttaaggcaaaataattactggaaatcaaatggatattttagaataaaaaaattatccaatttactgaaaagataaactgtttgaaatttgttttcatataccaatgtattcttttaaacttttaaagaaaacatttatggaatatgagggaaagcagattaatctacaataacaatgtaagaatttcagtacacatatctattaataatagacaaaatattcgtgaagctatagaaaacttgagcgctatgattcacaaaattgaccttatgaacacatattgaacactctatccaataaatgtgaaatacatgctctctgcaaggtcgggtggaatatttacaaatgttattccattgtacagcctgtctcaataaatttcaaaaggagaaagtagtgtactactttccttaaacataatgcaattaatttcaaaaccaatggaaaaagataaacacaaaattgccatttgctaggtaatcaacccatagatcaaagaagaaataaggatttttaaaaatccaaaatgaactatatttttaaaactactttgaacttgtggaatacaactaaaaattatttggaaaaagtttatagccatagatgcttattttggaagagaaaagatgtccaaagactcctggaaggcaggcaaagaaaaccaaattctcaaaaaatagaagacaagaataatgaataaataaaacagcagagattaaagaaaaagaaaacacacctataacaaagataatagagccaaaattcagttctttgaaaagacaaaaaataatgacatccctggtgaaattccaacaagaatgaaaaaaaaaaaacacacttaatcaatattaggaataaaacatgagcaccactacacaaatcacaaaaataataagaggatattgtgaaaatctttgttctaatattctttgacaatgtagataaaatgatcactttcggacaaaaataaatcttaccaagacagacccaaaaaagaacagagaaagtctagcagcaaaaatatggttgcaacataggtttattgattattgtttgtttgttccttttatgtctgagggtacagtggtgaaagcaaagcaagcaagtagggtagccgaggtgaccgttggggctgacagcatcttcagcagaaccaggtgagaaagagtccccgtgaggcccatggtagaggaaggcacaggcaagcactggagagctgcgagtctccgtgggaccagcagctactctgcagtggcagggaagatggaagcatcgcctggccctaggagtcctggaaggaaaacgaaatactcactcgcccaccaccgcctcaataagaaaactgtaggctgcgcaaaaatctaaaggaatgaatcctagaaaaaccagaacagccccaaaggcttccctcagttagaagtaagtttaacggataggtgaacattaaacgggaaacccacatcacttggcatgccaggaagagcaaacaaacactttctctccaaaggacaaggatccacctgaaagaaaaacgaatggcaacaaaacctaaagtgggcatcctgggatcctaggaaaaagaaggccccgagatcggggcaggggcaggggctgcaggcggccctacagagccggtaaaggtgaaggcggtgctctgcggtgggaacgggaagcttccccaatcagactgcatcctgagggacaggagcggacacacgagggtatttttaatagtttgagacagttgtccttttaaaagggtgtccttgagccatgagttgaaagggaccctggacagtcgctgctgtcacagagttgtcctgataaaaaacaaaaaaggattacaaaacacgtacttggaaaaatgtttaaattccaacaaatattgaaacctaccggggaaaaaaatgtgatgaaaagaaacctaaagatgaaaactgcagctggtgctgtgagcccccctctctcatgttcagggcatgccagcccactcctggcgtctgctcggcattgccggggcattttctgtggctgcgtccctagagacactgggtccgccttagaagtaaaccctcctggagcgcccctcccccagtggtgggggctgctgagcacctagctggagtacccttcccccggtggtgggggctgctgagtacccagctggagcacccttcccccggtggtgggggttgctgagtacccagctggagcactcttcccccggtggtgggggctgctgagtacccagctggagcacccttcccccggtggtgggggctgctgagtacccagctggagcacccttcccccggtggtgggggctgctgagcacccagctggagcacccttcccccggtggtgggggctgctgagcacctagctggagcacccttcccccggtggtgggggttgctgagtacccagctggagcgcccctcccccggtcgtgggggctgctgagcacttagctgaagcacccttcccccggtggtgggggttgctgagtacccagctggagcgcccctcccccggtcgtgggggctgctgagcacttagctgaagcacccttcccccggtggtgggggttgctgagtacctagctggagcaccctttgggtggcttgttcaggagagcacctttacctcagctttctgagttccccaggggaagatgctgcgattctacagaaaggaaacttccttgacaatgcagccttaattggttatcgtcctttccaaaaaacacttcactgtcatccacttcccatggtctgcttctgggaaaacccaaattaaagacaaaacctctaatctaatatttcagaatggttgaaaattaaaaaaactataagattgataaatatcgtaaaaaacacacgaagaaaaataaaaaacaaaaagaagagtgaaaatgttcaacaataaataaaaaaaatataaaaaaggcaagagagaaattaatacatgtaagacaggcaagggagatctaacatgtgtaatactgaaattcccaaaccagtacactacagcgatgaaacagaacaaatatttaaaattagaattctagaaaactttaacaaaataaaaacattttatcgaaatattgaagacacattgcataaatgaaagaagccaggctccaaagggcatatactgcatgattgcacctctatgacattctggaaaaggtaaagcaggggagacaggaaaatgagcagtgggtatcaggggttgggggaaaggcaggatgaacaggtggaacacaggagattttttagggcagtgagacttccatatgatactgtaatggaggctgcatgacattatacatttgttaaaactcataaaatatacaaagagtgaactctagtataagctgtagagtttagttaattataaactatcagtattggttcatcaactgaaacaaatgtaccccaactatgcaagatgtaaataacaggggaaactgtttggagggagaagaggtgtgtgggggcactgtggactctgcactctggtcaatttttgtatcaactgagaacttcttttaaaaattctctattaactttaaaagtggaggaatggtgatttttatattaggaaaggtatataatgtaataaaaagtattaaatgagaaaaaagatgggtatttttataaaaggctaccttcccatgtgaatatatagaaggtataaatatctacaccccaaataaaaaataaacaacttttggacacagaatatgaaagagatcctaggagaaatagaaactcctaacaagaggcattaacatgcctctctcagacaaggccagatcaaagagtcaaagcattcgttagaatatagaagatctaaaattattcaacgaagcaactccaatagaaatatattaacctcaaaactctgccataagggaatataccttcttttcaagtgcaaataaaaatttataaaaattgatacagtattaggccacaaagaagaaaacaactctataaatcacaatgaaagaaataatgtgccatacaataaaactaggaaagaaataaacaaatagcaacaacactgtatttctctacctattccctaataatgtctccatttaaaaagtcttggtttaaagggaaaatgcaaattcttcgtaaagttacactgtgaaaaaacatgacaaggccaggtgcagtggcttacgcctgtaatctcagcactttaggaggctgaggcaggcagatcacttgagatcaggagtttgagaccagcctggccagcatggtgaaactccatctctactaaaaatacaaaaattacgcagttgtggtggtgtgcccctgtaatcccagctacttgggaggctgaagcaggacagtcacttgaacctggaggcaagattgcaccactgtactccagcctgggtgacagagtgagattctatctcaaaagcaaacaaaaacccatcacataggagaaacacaaaaatgtgatataaagtatatgcctgacaaaaaaataatgtttaatttgttattaaattaatattaaaagtattacttaaattaggcattaaaataatttaatattataatgctttacatattaatagtatatatttaaaatataaaattataaattgataattaagattattcattattaaattttaattaattttgcattagcaaaaaatgataataaatggattaaacatccaattccaaagagtcagaggttgaccattgtttccaaaccatgtgtgtaggtgaagccagccttggggatagaaaaaaataaaggccaactccccttatgatttggggacatgaagaaagaccctgctatctaaatatacttctttcccctaacttagatatgacaaacacattaaattctacccttagaaagtatttcctttagttttcctttcatattgcaaaataccaggcataattaaagcatattaaagttcattggttaagaatgaactggataaatattcccttagcaagaatgacctgggtgaaaacgaacagggagaaacataatggaaaataatcaaagcagaagggtgaaaagccaaaattgaaacccaaagtaatcaataaatgcaagctactgcttaatagtattcacatcacacattccagcttttctactgggaagtgctgaattccattgaaaaataacctattccagctcccggaagtgcagaacgttgtctgaggtcagtacagatgtgcacatgaaatgttgcatagcactgcaagtcccaatgtccaacccaagacaatcacacactcgccccctgcagagctccatccctagtgggaatgagtttgccgtcgctttttgggtggggtggattcacaccgagcacatacagaactcagccctcccgctttctaagcacgagagcatgctttcagatcagttacttctgagccttagtttccttgtgcatcaaaaggaataattagggaacccccctcaggaggggtttgtgatgactaataatgaaagtagtaggcctgctgcagtgtctcatgcctgtaatcctagcactttgggaggccgaggcgggcggataaccagacaccaggagttcaagagcagcctggccaacatggtgaaaccccgtttccaccaaaaatacaaaaattagtctggtgtggtggcacgtgcctgtcatcccagctactcgggaggctgaagcaggaaaatcgcctgaacccgggaggcagaggttgcagtgagccaagatcgcgccactgcactccagcgaaactctatctcaaaagacaaaacaaacaaaacagaaacaacaaaccaacaaaacaatggttgtgcagtgctcccaagcagcgggtactgggacaaatgctgtcagtctttagctcgcagactccccactacaccctaagcatcgggaattggtgttacctccaatgtagagaaaagggaaagctgagacacccgtttgaaacggggaagctgaggcacacagtggacacacctgtctgactccgaggcccgcacctaacggccatgctggcccaggagacagtcaatacacgttacttcggctaataggattatgatcacagtcacttggcatttctgttgggtttgcagcaaaaaataaccgaatatggtctgtgaaatgctctttgaaaaagggattttggtgctgagttacttcgggaatcattgcatttttctctcttttagacggtcataaaactgattagcatatgaaaagctctgagaagcctcaaaatcatgcatctctttaaaccagaatttgatgaacttagttgaaccaaaaccccgctgattttgcttttcatatagttgctgctgtcctaaatatcctaaataatactttcactcacatgttgggggacagcgtggcacactgacctaattgcgttataatagctctcacttgcatcgcatttacagatttccaaacaacttgctgtgcatttctttcatctcgccagaacagatgttttccttatactggaagaagctgaggcagagaaagctttggaaactttgcaagttcactcaggtccagaactcctacaggaacccacttcttgtcactttctgttgagttctttagctcatcacagacatgggaggacacttgatgggatgacgggtgggctgaagaaacatttgagtgcatccacgttaactttgtcttgtattctggaaataaggaatggccctacagcgaggaggagccacctcttcaaggtccaacagagatatacaaatggcatagtaaagaaatgaagagaatcatagtgataatccagtttaatgtgtttttttttaatatttacataaatgaggagaccgaggcccagtgaacttcagtgatctgtcaactttgaaggagcgcataggctggtctgagtccaggaggcatcagtgcgcccagccacctctgcaccctacctggcttctgctcctcccctgagttggctgatcacggtagtctcccttgtgaatcttcttttcctcctttatttttttttttaaattgttggaaggcccattgttcagccacggaacatctcatttctttctatgcatgctccctacgtgattcacagtgtctgctcttctcattttgcctctcgatactccctgtccacccttcactgccgtctctgtgtcttggatgttcaatctgtgggctataacaggtgggcttccttgctgtctcatttggctcagtcaatggcaagcatcagcagttcatcagtgagcaggtagagggggatgctgggagtgcccgtgcttcagctcctatactgccaggacgtggtctgtccatggcattgtcctgttaccggtgacacagccctttctggtggtcctgctcccatggctacagaccgctctcccagagtctacaccagcttcctaccatttttatgctctgagttctaatggtgaccattgttggtgcccttcatgaaacttttttcagttgccccttagtctatgccatctttttcttaacagcatttctatgtctatagacaaaattgtttgagtagaaggaccctatatgtgcatcttcatctcagacatttcccaagaactcaagattcatgtttaataagcatttcaaacttaaaatgcataagactaaggtgatatttctttctccctttcaaatttgatcttctcgcagtcttccatgttttaagtaactggcaatctttccagttgttcagaacttaatttctctgtttcccatacaacctcacgtctgaatggcagcatagtctgtggctctgtcttcaacagtctcttaacacctctgctgctactactttggccaaaactatcatcatctcttacctcaattattgcaactggactccacccttctgccctggctcccaggcatctccttctgttaaattaaattaaatgtggcctgaaactgccttcgtgtttcaagttcctgcatagaggactgtaacccacattagtatacaaaaaacaactgcaacctaacttaagggtattattcttgtaacaaatatcttagtgtcagccagtcacagccactgagcttcagccaatcacaggctgccaactcatcagaccatgcctgtataaggcaaatgcctcatcaccacgcaatgccccagtaaggcaaatgcccagccatgactaatcaagctgtttctgtatggcacttccctttttaatgtataaatactgcctgcccatgttgctgggtggagctctctgaaactctgcctgttcagggtgctgcccaattcatgactcaaatcattctttgctcaattaaattctgtttaatttaatttgtctaaagtttttcttttaacacttcccaacacagatcttgctaaaagaacatcagaccaagtcattgctctgcccaaatcttctggtggtttcacttctcagagtaaatagctaaaagtcttgctgttacctatagggtcatatggctggccctaagacttctctgccctgactgcctcaagcttcagtcacctaaccctcccactacactggcctcagctccaaactttgagtatacctggtgccctcctgctgacatctcctgaacttccagtacttttctccttgttgttcttgtcctggatttctgaaggactcactgcttcactttcttcaagtcatatgtgatttttctctggacaccataggtaaaatctcaaactgttcctcctccaacacttcctgtctactttcattttatttttctccttatcttttatcactagctgacataccatacctgccttcttttgtgtttgacatctctccactggaacataagctccataaagtaaacattgttgtccattttacaaagagcaaggctgggactcagggagttgaaatgacttgaacaacagggcagggctagcaagtgaatacacctgggtccaagtgatgatctttctaggatttccactaattggagatgccttagagatgtgatgaagaactggataaaacttctgtggatgtggacacatgggacatgggagaatgttttaaggggacattaaaaatgatactttataacaataattcatacttttcggggaagaagagtgttgtttgttttcattttatgcccgaactttaccttctgtgttaaagtgtagcccccttacttggatgaacacggagtgtcaagcgagcaaaagagtggtctgagagctgatagttactgggcacttgggctaggtgggcacaccaccttcacatacattatctcaatttctcctcatctccctcctaggaggcaaaggtcatcatcctatttagagatggaagaccaaagggcccaaatcccttgcacgaaggtcacccaaatagtaatttgggtccaatgtcagtacttggacccagatccgtcggaccccaaaatctgtattcagaactgtttctcctgactgccaatactgtttttggtagaacagagtcccaggaatctcagtttccagtcactcagcagcagcttcatctgttgagtgtgtattggaaggcttctttgcttacgttaggagaaatcattatgtttcttttaaaactatgtggctcgttgatgttaatttcttctaagcacttaagaagtattttaatttatgctggcatttgaattagtatggcattatttcaaaagatgacagtaattcaaaattctgaaggctggaaaacatccaatcaaaacaaaaccaaaagctaacaaagctaacaacatcatagtaggcagcacctttccttgaggaaggcaaactgttctgcaggcatatgccaatctggagatgtctctgctattttgtcaaagtggggattttaaccacatttagcaagtactgctatagcctgtgaatgtgaacgatttaactcaaatggaagtttagtgtgagactgcgtttcccgggtgcttgccacctcttttgtatcacattctcaattcagatcagtgtactgtggtctatttttacctctcccaactcaacatactgttggttctgtacaaatatgtattgggtcttccattgatcagtaaaatagttttattgttcttaaaaatatatgacaaattggtcttaggtatcattcagcatcttgtttcaatgaagaacttctgtatcttattcgtcagctttctttctcacagaaatagataccattccaaatcttctggtattctttttattttattttattttattttatttgagacagagtctcactctgttgctcaggctggagtgccgtggttcggtcatggctcactacaacctccacctcccaggttcaaacgattctcctgcctcagcctcccaggtaactggaattacaggtgcctgccaacatgctcatctaatttttaaatttttttaatttttttttttttttttttttttttttagttgagacgaggtttcgccatgttggccaggctggtcgtcttgaactcctgacctcaggtgatccacccaccttggcctcccaaagtgctgagattacaggcatgagccaccgcacccagcctcttcttttgatttttttaacctgtcatggcttgctgaatcaatgcagctgaacttgatacaagttccatgccatttcacttaggaattaacttgttttcctgggcttaaaatatcaagcaacacccgacctcatccaaactctgcagatatattttttatccaaaaagttgtgaatgtcagcaggacacctggtctcctgaatgataactttgttgggaaggtgaatgcaggcaacttcattttgtagtggagatccttgatcatgtttggtcaatgacaatatagagtgcaaaaatagctgatttctttctttttcctaccattcatcaacccagggctgcttgtttttctttccaaggaagctgagtttcacattgatgtgattgaggttcctctgcaggactcttctggggtccttcataaaatgtggatgtcccttctaagtgatgttgacattttatgagaggtcaactgtctggttgttgagaatgatgatcattctcactatagatgctgcaagaatggaccacgtgctgatattcccacactctcctctgttacttgttcagagccttaccgatggtgtgtggtgaaggtatgctaaacttttacattggacctgttgtctctgcctttcccagcacttttaccctcttacctattttatttatctacaataaactattcctagtgtgtgtgtgtgtgtgtgtgtgtgtttaagctaccagacatggatatttcccctccttcttggcaagtatgtggtcaactctagatgtatttgaagtcctatttttaaatacaggctgaaatgggtatcataaggtccaacatttgtgtctaggggaagcaaacagggtgtgaaacactatatcctgaaagaaaataatcttccaattccttgtagagaagcaaaacacatttatatgctgacttgatgtgcaagtttccaaggctttctgtacatgcacccaaattaggctataaacacctaaacctttaaaaatagcttcatagtataagcattgttatgcaatttgctttttttaaatttaagaatatgtgtattgaaaacaaaatgaattatttatggataaaaagatatgatatcttaagtttgcttaaaagtaattctgagggtatgagcgagtgagggtagagatgtcacaggactggccgtgagctgatagcagttgtggccgggccatgtgtgcaagacagcacgtgtttgaccctagtaccaaattaccatggttatcctcatagaaatagcagtaggcatatgcatgattatttctttttttatttttgaaactatttgtattgcaaaacaaaatcacatacaaagtgcacacaacaaaatatttaggacaacaatttatcatcaagcgaacatctgttgagaaatggcactttgtgctcttgctctcctgcttctctatgagcttagtgatttacattaatcttttcttcagaaagaacttttggcttaatttttctgttttttcttccatttcatgtatttcctgccttatatttagtattgtcttgttacttgtttggcagatactgctctttttttaaaaaaaaattatcttcttaaggttaaatcttgggcaactgaatttagattctgtttcttatctaatagaaccatttaaagttataagttttcccctatacactgctttatcttcaccgcataaattttcatatattgcattttcattattacatttaaaatattttctaatttttcttgtttttttatgatctgtaggttatatagaaatgtgttattaatttccaaatacttaggggacattttcagaaagcttttaattattaatttctaacttaattacatgtggtcagagaacatactccatatgattctttaaaattattgagacttgcttattgctgcagcatatgctctattttggtgaaggtatcatgcatacttgaagaatacaaaaaagaatattctgcaattgctgagtgcggccttatgtaataccagccaaggccaggagggctgttactgttcgtcacttgcatgttgccaatatgtgtaagtgaaaattggttttatacctgaaccttgtattcagcaatcaactaaacacatgtattaatattaataatttatctcttgatggttggtttttctgtggacataacaatataatccagttataatgaaagttttatttctcattttcttttcttttcttttacttttttttttttttttttgagatggagtctctgttgcccaggctggagtgcagtagtgagatcttggctcactgcaacctctgcctcctgggctgaagtgattctcatgtctctgcctcccgggtagctcggattacaggtgcccgccaccatgcccggctaatatttttagtagagatggggtttcaccatgttggccaggctggtcttgaactcctgatctcaggttatctgcccatctcggcctcccaaagtgctgggattactggtgtgagccattgcgcccagccttctgatgctctttcttaagtttctgtttattttaactgatgtgttgataatagatctttcatcagattaaatatattcctttagatacttcatgttgtttttaattatgaaagataatttaattttttctatatttactaaatgggaataaagttttttggttgttgttacttgtgagctgtaagaattgtgcaaatgttaaactaacttcagattccagaaatgagtccaagttggtcatgatatttagcattcttataaattgctggatattatctgatatatatttatttatacctctttttatcaaagagattgtccagaacattttcttttttgcaatttccatttagattttggtattgcagtttggctttagaaaaatgttggaaaatatttctttattctttgaagaatatgtaaagtatttgttttatgtctttctaaaatgttttatggaatccaggcctagagttttctccattaattttaattatggatccaattttgttagtagtaatggtattcatatttgtatttttaatgcatcagttgtgagaagtgtgtttttctaggaacttcttcatttcacccaaactgtcaaattttggcattaattttttataatttttaaaagtatattttaatatttataggatctgtagtgattacccttttaaaattcataatagcaattatgtataccttccctaccttccctcctttgttcctgatcaatctggtcaggagtgaatcatttttatttatcttttcataccaacttttggccttttctattggatgttgctataatttgaatatttgaccttccaaacctctgttgaaatctgatccccagttttcaaggtggagcctaaagggcagtgtttgggttatgggggcatatttctcgtgaaaagattaatgcccaccctaggagggagggagagaggcagttctccctctgtttgttcccaggaaagctttttaaaaagagcctggcgcctccctctcttctctcttgctttctttctcaccatgtgatctcatcacacacgggctccccctcccctcccaccttgagtggaagcagcctgaaccctccccaaatgcagatgctggcactctgcttcttgtacagcctccagaaccgtgagccaaataaacctcttctctttataaattatccaacttcaagtattcctttatagcaacacgaatagagacagctgttattttaaatttatttctgctcttatttttatttttaagagccaagttctcactcttgtctcctaggctggagtgcagtagtatgatcatagctcagtacaaccttgagctcctgggctcaagaaatcctcctgcctcagtctcctgagtagcaaggactacaggtgcataatactgtgcccagacaatttttctattttttttactgacagggtctcactatgttgtccatgctcgtcttgaactcctggcctcaagtgatcctcccacctcagcctcccaaagtgctgggattacagctgtgagccactgtgcctggcctcttagttttgtatgtatttctttttactttctttgtatttaatatgttttcctttttgtaaatttttttataattaggctttttccgtgtgtatgtaattttcagttcccatcagatcataactttggctgtctcctgaagtattgatgtggcatattttttatcattcagtttaaaatattttaaaatttcttttgtgcattcttctttgactcaagagttatttagaagtatgctttctaactttcaaatattttgagattttacaggtttcttttttcttattctgtgaggtttttgcttgtatgttttttgtttttgattttcagcttaattcactatactctgagatcatactctttatttctttgttacccaatcgacatatattctgccttgtaggggacagtgttttcagtgtgtggccgtgtaactttaaacagtgttaaaaacaggggattctttaagtcttctgtatatgtacccgttcttttcagttgctttttaaaaatcactgctgagagaagtgagtaaagcccttccatgatgattggagatttttctgtttctctcttaagttctgataattctgacaatttttatacacttgagtctaattatttaaaagatactacaactttggaattattcagaaatttggaattattaattatttgaaatatgaaattactatatcttcttagtaaattatgagatacatctctttatctctagcaaacctttttgctttaaagtctggtttatctgatattaatatgactatattggctttattttggttagtggccaaatggtctatcttttctcatcctctactttcaaactttctaaatccttgcttttaatgtgtatttccttcaacagcacatatggaagtcatctttagcacctttgcatggttactttagaatttcatgtatcctgacatatcaaagtctaagataaataattacttttacaaatttccagacaaatgttgataaacttgtgacttcagtctcacatgagtctcacttttcccaaaacaattagttgtgatctgagcggtaactctagtccacaattcttatgatttgtaggaattacctgcttgatgtaatgggccgtaagacttgcttttggagggtgatcatgaccctgcttctactgagctttctatggagctgggtaagctccccattgtgttttttcatagctaaaacataaatgctcaccagctttacacagaattggccagctggagctcataaaacacagaggatgtggtgcacactcctcatttattatcagaatatggatgcatctattaaaggtcaattcattttctttcttgatctcacaatcacataaagaaaaaattaaaacatttctaaatgtaacctgcattagaataggtataaaactagaatagaaacttctatttctggaaatataatgggattctctaaatggctacctacacaatgaaagtaaatcaaggataaattatgacagacctataccatgtagtgatgtgcttcatagaaagtaagtgaaattcccaagggtgaatgttgaaggaaacaacgagctggatctgctgagtagttacctcggagacatggaagactatgcattggacccaaggaaagtgggggcccaactggatatttctacattcaattaggacacgtaaattcttacaatcgcagtgaaggggagggccagctaaaaagctgctttccagaaaagagagttttttaggaaacttgtttctgctgtggcttctgaagaaaagaagaaaaaggaaaggagaaggaggagaagaggaacaggaggaggaggagagtctattatgaatatgtgaggctgtagaactgccttggagtttggaaatcaactctacaccaacctcttggtcagagaaaaatcaaaaacgatgacaaaaaattagattaaagtaaatccaggtcggtaaacccaacacaagcagaaaaaatagaaatcctcatggaagaaaagtattcccaattgcaacttgcagaatttacatacataagtacacaattacccaacaccaagtaaacgaggcatcatcacagaggcagtcaatgggagaaacaaattagacccacaaaaacttcaggtaccggaatattcagacatctagataaaatagccatgctgacattactatgtattttaaatacaaaattatatatatgatttatgtctatatgcacataattattgtatttagaatatatataaatgttagaggccagtgtggtggctcatgtctgtaatcccagcactttgggagactgggtgggcagatcacttaaggtcaggagttcgagaccagcctgggcaatatggtgaaaccttgtctctactaaaaatataaaaaatcctatcagggtgaggtggttcatgcctataatcccagctactcaggaggctgaagcatgagaatcccttgaacctgggaggcagaggttgcagtgagctgagagcatgccaccgcactccagcctgggtgacagagtgagacaccatctctaaataaataaataaataagaaaagtcagcaaggaacaggaaactgtcaaaatgagaaggcacatctgacaaaccaaatacaacttttggaaaataaatgttgttattaagactagattcttatccatagcttaaataaatgagacagcatgaaggaaaattcacaaactggcaagtaaaaataaatgtagcaaggaaaagcaagttggaaatatgtgaaattaagaaatgtggatgacagagtgagaagtcctaatgatagctcattaatatgctggaatgagaaaataagtagaacaagggagcagtccagatttttaaaactgtattagaaaccacaaaatcatagaatagaaaagcatacaatacattccacatagaaaagcatctaaaaatgtacactgagacacactgagtatactcaaaaaacactaaaagagagacaaagaaagagagaaggggagggtcttaccaagatattttcagattgaaaaaaatcccaaacacacacacacacacacacacacacacacacacacacacacaagcatgtaatccagcagacatatactaaggaaatctaaacaatgaacttcagcagagaagaggaagaaaaaagactccaggaaaaagattttcgatagtaaaaatagtgaaagaaaaggtaaaactttaaaaaatactgtgtagaaatcacagtaataatagtgtctaatccatggtgttataaaaatgagggatttaaaatagtgactggaaatgacagtgtgtccagtcaaggatgataggtgctcagattttaaaagcacttaagttaatcagacagagggtggactcttgatgaatttttgactcttaaaatttatttttttatttttattttttgaaatggagccttgctctgtcacccaggctggagcacagtggcatgatctcggctcggctcactgcaacctccgcctcctgggttcaagggattcttgtacctcagcctccagagtagctggaactacaggcacctgccaccacacccagatatatatatatatttgtatttttagtagagagggggtttcatcttgttggccaggctgatctcgaactcctgaccccaggtgatccgcctgcctcagcctcccaaagtgctgagattacaggcgtgagccaccgcacccagccagactctgaaaatttaaatggaaaaacacttagtagagaaaaaattcttcaatttgttagaggaaaaataaatggaatcgggaaaaagataagaagggaagaataaaaacgacagagcaaataaaaacatgaaataagatgggagaaagtataaaaatgaatgcaaatgtatacttgatcattatcactgcaaatagtgtaaaccaggggtcagaatttttttttctgtaaagaaccagggaataagtattttgggttttgcagaccagttgatttctgtcacaattatgcacctttgtcattgcagcaagaaagcatccatggacaatgtacaaatgaacagctgtcttccaataaaaccttgtttataaaactaagcaatggctggatttcaccaacgggccatggtttactgactcctgttcttaacttattttaaaaatgcggaagttaaaattgggaacaaggcaaggatgtcctcttttaccacttccatttaatttcctactgaaagtcctagcaagtgcaaaatggcaaaacagggaaataaaaggtatgcagattgtgaagaagaaataaaatagtctttgtacatagattccacattgcaactgatatttgagaaactgccggtttcttaaatcttaaatgttttaaacacacacacatgcacacaccctgtaactatgtgaggtgatggacaggttagattgattgtggtaattatttcacaatacatatttatatcacattgggctgggggcagtggcatgttcctgtagtcccagctactccagagactgaggtgggaggatcgctgcagaccaggagttcaaggttgcagtgagctatgatggtgccactgcactccagcctgggaggcagaatgaggctgtgtctctcaaaaaaaataaaaaaaaaaaaatgaggctgaggtgggtggatcacgaggtcaggtgttcgagaccatcctgaccaatatggtgaaaccccgtctctactaaaaatacaaaacttagacagacatggtggcgcacgcctgcaatcccagctactcaggaagctcaggcaggagaatcacttgaacccaggaggcagaagttgctgtgagcagagatcatgccactgcactccagcctgggtgacagagcgagactccatctcaaaaaaaaaaaaaaaaaaaaaaaaaaagagagagagagagaatcaagtggaaggtccttgttgaatgcctgggacattcaatggagtcaccacaggagacacatattagagtgggctaaactggttctagaataaagctattataaacctgctgtaacaaagcttgaaaacaagcttctaaaagatccacctgaacttcaagtaatttaaattcctgccagcatgaggtacaactttcttgaaaggaagacaaccaaacctagacactcaacaacaggatatgaacaatgtgtaacctccaatacgaaaaattagcagaagtgacaagaagcagaaaaatgtggttcataatcagaagaaaaatcagtcaagcagtcaacataaatagaaccaaaagatgacaaagttagcaggcaatggctttaaaatagctgtgataaatatgctcttagatttaaatatgaaaataacaaggagagacatgaaatatattaaggaaaaaaacaaaacttccacagatgaaaaatgcaatgcctgaagtgaaaagcacattgaataggctcaatagcagtccagacactgcaaaagaaaagatcaatgaacttgaagaaagagaaataaaaagtatctaaagtgaagtacagaggaaaaaaaaactgaccaaacctcagtgacctatggggacaatagaaagcagaaatggaagaggcagaaagaaagatgtaaaaaaaaaaaaaaagtataaaaattttccaaatttgatgaaaactataggctaacatatccaaggctcaaagaattccaaaacagaatagaaaaaagaaagaataaaggaaagaaaaatacaccaagtcacaaattctaattgaaatactaaaaaaaaaaatgatgaacatcttgaaatcagacacaagaaaaagacatattgcgtatagagaaataaagaggagaatgacagcaggcttcatgttagaaaaaatgcaagcccgaagacagtggaacagggctttagcgtacagtcatgggtcacttaataatagaaatacgttctgagaaatatatcattagttgattggtgtcattgtgtgactatcacagagtgtatttacacaaacctagatagtatagcctactacacacctgggctgtatggcatagcctattggcattaaagataaaaaatgaaacacctgtttaaggcacttgccgtgagtggagcttgcaggactggaaattgctctgggtgattcagtgagtgagtggtgagtgaatgtgaagacccaggacattactgtagactttttaaacactgactatacacttaggctacactaaatttaaaaaaaactaagtagttgtgctatgacattacaatggctatgatgtcactagctaataggaatttttcagctccattataatgttataggatcaccattgtatattcattctatcgttgactgaaatgtcattttacattgtatgactgtatttgtttcttgaccaatgggctcacatcctgataaatccattgcaagctgaaactatcataagtcgaaaatgcatttaatatacctaacctacgaaacatcatagcttagcctagcccaccataaacgtgttcagaacatttacgttagcttataattgggcaaaataatctaaagcaacacctattttataataaagtgttgaatatctcatgcaatttattgactacttactgaaagtcaaagacagaatggttgatgggtacttaaggtatagtttctcccgaaacatcactttttgctccatcgtaaagtaaaaaatcataagttgagccattgtaagttggtgaacatctgtacatataaaaatatctgtatatacagatacatacagatacattcaaaaattttcagaattttggaattctatactgagaaaaagtatctttaaaaagtgaaaaatgaaagaaaaacgttttcagagaaataagtttgtagaactcatcatagaacacctgtgctgcaggaagtaacgaagggttttctatgagcagaattaaagtcatatccaataaaatttttttctcatttgaaaacctattttaaaaataattgattgttctacaaggaactcaatcaaaacagcaagaaaaacaaattatcccattcatatgagggcaaatgacatcaagagacatgttttaaaagaagatgtacaaatggacaatgaacatatgaaaaaatgcttgacatgattaatcatcaaggaaatgaaaattaaaggcgcaataagataccactttactcctgcaggaatagcccttattaaaaagtcagcaaacaacagatgttggcaagaatgtgatgaaaagggagtccttatacactgttggtaggaatgtgaattagtacaagctctacagaaaacaggacaaaggtttctccaagaactaaaagtagatctaccattcgatccagcaactccatactgtgtatctatctaaaggaaaagaagtcactaaatcaaaaagacctgtatatatatgtttatcacagcacaattcacaattgcaaacatatggaatcaacttaagtgcccatcaactgagtggataaagaaaatttggtgcatatatataccatggaatactgcttatccataaaaaaggataaaataacatcacttgcagcagcttggatggaactggggggccattatcctaagtaagtaactcagaaacagataaccaaatactgcatgttctcactgataagtgggagcgaagctgtgggtatgcagggacatccagagtaatgaatgctggagacttagaagggagaaggatgggagggaggtgaaagattacctactggatgaaaagttacctactgggcacaatgtacactatttgggtgatagatgcactagaagcctcgacttcaccactgtccaattcatctatgtaaccaaaaacaacttgtgtccttaaatctactgaatgtttttttaaaaagaaaggacatgtcaacaagagttggcaccttcatattctacattcacaaactaaaaaccaaaaaaaaaagaaattgattgttaaagtaaaatataagtcactgaatgcagaagtcatatgtgtgataacaggagtgaataggacaggaagaaaaaaagaagtatattattgtaagttgcatgcactacactgtacatgaaatggtattatgttaattaaagttagactgtaggccgggcatggtggctcgcgcctgtaatcccaacactttgggaggccgaggtgggaggatcccttgaacccaggagttcaagacaagcctgggcaacatagtgagacttggtctctactaaaaattcaaaaattagctgggtgtgatggtgcatgcccatagttccaactagttgagaggttaagatgggaggatcacttgagaacaggagttcgaggttgcagtgagctgagattttaccactacattccaatctgggcaagagagcaagactctgtcgcaaaaaaaaaaaaaaaaaaaaagaaaagaaaagagaaaaaagataggttatgatgagttaaagatgcctgctgtaaaccctagagccatcacaaaataaaatgaaatatggcaaaatagagatatgataaataaaacactaaagaagataaaatagatacaatgaaattagaaaaaaatttagtatcattttaaaagccccatatgcctctattttcctagttacataaaggaggcaaagtgtgaaaaagaatagaccatgttcttctaaggacccatgtcaggtgtcagtagaatggaggtgatgcaggagggtgggaacggatgccccatgtttttaaagctgtggggtgtcttctctttttatttttttaaatccagaaatgtagatctgttcattcatccattcattgatgtaaaatctggtttctgaggtgttcagcttgatgactgatacatgtatacttcaccaccacaatcacatgcactcacatttccatcacctcgcagagctgccctcttttgtgtgtgtgatgagaacccataagatctaccctcttagcaagtgtgaagtatatatcgcagtgttgttagctgtagtcacaatgttgtatagtagatccccagaacttattcatcttgcataactgaaattttgtaccctttgacccacatctccccgtctctccttctcccagcccgtggcaaccactatatacccagtaaccccctttctggggatatagtcaaaggaaataaaatcagtatctgaaagagagatctgaactgtcatgttcattttggcattttttacaatagccaaataatggaacaacctaagcatctgccaatggataaatgaataaagaaactgtgagatacgtacacacacacacgcacacacacacacacacacacgtatatgtataacatacatatacgacagtatattatttagccctaacaaagaaggaaatcctgccatttttgaccacatggatgaacctggagaacatgcttggtgaaataagccaagcacagaaagacaaatagcacatgatctcacttataccatggcactgtgttcatgtctcagccacatttaccacacccaaccacgcaaacacagccactgtctcagttcctgcccctgaccggggtacagggtgggtgctctgtgaacacgtgttctactcatggcccagcttccccaccttcagctattttaggctctgacactggaaatgaaattcttatgaagcccgggccaaggctgaggttgtgtggaactagggtgccctctactgtcttccacaacgatcacgacattgcttaatttcattcaatgaagagaaaatgctaatgaaacaaatgggaattcaacggatagcctattatttctcagcacaaatacagaattctatagtaaaacaaaaatcattgaaatggtagtaagcactcttctagcaatgtgagtttctgtaaggttctgatgggccttacgatttcactgtcccctcagggcagtccatctaaagtgaggctatgttatgttacataaacactaggaggagagagagtggcataccgtttcattacagggaagagaaaagaatttaagcaacatgctgaaatacaatgttaaagaatgactctaacttaaaatgatttttatatattcaataatatgtgttgtgtggacataaagctgatagaaagtgtaccaaaaaaagtggaagttttaaacataatccatcaaaagaacatatttccttacagctgacatttcttttattattaagaattaatgtctataaccctcgctaatacaaaaatcatcccttgtttatatacatttatttttgcaaactcacaccgaatgactttgtgtgacaagctgtgaagtttaaaatttaccaattcttccaactctttgatttgcattatgctgtttaatcctgagagaagagcagctgtcgctggtattaggtgttagaattccaacacctaataggtgaaaattatattaggctgatcataaaaccatgttgttaactttttaaaatttaatgtctcccaaggaatttcaccctagtggtacatcttttgggaaattagaaaatgaagaaatgcatacgttcagtgatccattttagaattagaaaattcaaattagcatcttatttcattcatatttcctgaagaaccactggaaacagttatttaatagtgtggctaaatgtatattcagagaaacacttcctgtatatttgcacatttatgtatatttatgtcctattcctggaatagatttacaagttttgtttttcagaaaatttcagaatttctggaatgtgcagaagtattaacaggtaacttagatttggaatacactgtattagagataactggaaaaatgagaggcttcctacactggaaggtcaaagatctttcctggaggggagttaggaatttgcctttacttaccattattctgttaaaagagattatgaataatgcagtttcacaaaaggaatgggacaatggtgtaagtaaacctccccatcacgttttcagtggctttcctttgagtcttgaacgttttccactgggtgttatagtcgagagtcccccacctcctgaggaagcaagacctggcaaacccaagacgatgcgctcttacttgtgttgtttgaaggggccctgctgccgcgcagttgtcattaatgccaccctcacctcccaggaactgcaccactaggacggacgacacaccgacgtaatgaccatagtaagaccccatgtacgtggctaatgaggcagtgacccgacgtggctcggaagccctgctggggagatcccgccccgtcaccccagaggcgctctccgacctgcagcccccagggctcctggccctttcccgtttgccactgcggcttgttgtcaagaaatggaacttcagaaaacccccagatatacactgcgttaggtaaggatttcattctaatcgagtccaatgtgaccctggctttccctcccgtagttatgcattcctgtctatgagtgagatgaaaagaatgtccacaggccagcttctttcagaagcgcctaagagatgcgcatgtaaggggtgccatggagcacccgggaaggacccaggcctgggcagggaggcgttggggccggctctagggagcaaagctgtcggagtccaggcctctatcacccgactgctgacactgccctcccatccctgctctacaagcgggcggtggtgactacacgaggcgccgaagatgctgttgagggccctggagaaacttcagcagaacagggcctctccccttgcaggccgagccgggggccctgcgccctccccctccgcccagctcggccaagggcgcatttgctgagcgtctggcggcctctaccggagcacctctgcagagggccgatcctccagcccagagacgacatgtggcgctcgggcgaggtgagagcgggcgcgagtgcgccgggggcgctggggggctctgcggcgggcggcgcgcggcccggggcgcggcgcggagcggagctgcagggcggcggcgggagcgcggggcgcaagagccgctccgccgggagtgccggggaagttcgcgctggcagcatggggcggtgacgccgcaccggccttccgcgcctgccagccgggcgagagcaggcggaggagaaggaggatgcatcctcaccgacggctcgcctcccggggccggcgcgcagggtgagccctgggcgcgctgggccggggcagtggggtaagaggacgcgagcggggaagaggaccggccgccccggctcggtccgcacccttctcctcggggcgcctgagcggcaggctgcgtggccggggaggagaggtgcagagcaggcggggcgcgcagccaggccagagcgcaaactttaccctggcgactgcggggctgaagccgggcgcgggagagagcggggtccgggcggctcatccctgccggacggggcaccagggcgcggtgaccggttgggggtgggggacacccgttgccaccatcacgggagccggaggggtgagatcgcccacctggaaagccagcgtcagccccggggctctgaggcgcgcggcgtcccggcgctgctcgcggggtggactcggaccccgcgggggtgtcgcgcgcgtgtcgcgcgggctgctcgaggccaggggacttggagtcgctgctgcaccgcgcgctcccagcccaggaggaaggcgctgcctggcggagcgcttggctcgtacccggggcaggagcaggggaagtctgcgaaagccgggagcgagccggggagggccggggagctggagaccctcggcgtgccgctgcggaccgcgcgggtggcgaccgcgggtgccagggcgacccaggctgcggctccgcagtgcagcccccgcgcccacctgccctggcgcgccggccctggtgagcctctgtgggggtccggagggtcgtgggagcgcagcctctcctgggggtccctggctcggggctgaggggcggcgggaggcgccgcccgggtttcccgcatgcagcgccgcgtgctcgccgcctggctctggcccgggccccgcgacgagccccccggacgcgcccaggcgaccaccgcatggcaccctgcccttcttggcaggagtcgcagaaggccttcgcttccgaggtggaagtacctgttgtgtctcccaattccggagtttgcgggggatgggggttgggggggcttcttgggaaaatgcttcttttcgaagcatactgttcggatgcctgtgagcacctatttgcgttatgcgcatactgagaaatgcgtgttttcaggaaggttagtcgttgagcccagggacaatgtctgcctggatctcaaatacattaattagggtccagcattgagtggagagacttccacagatgcagtgcttaagttatgtagtcacggggaccgaatgccgggaaagtagccacactcttttataggcagttgtcacagtattgtgatcctgcagaaaacctgtttcttaaatgtgcttttccccacttctttccacgtactttctcagtgccttgcagagagaggagtagcttgctggctttgaacgcgtggcgtggcagatatttcagaaaggtaaaattactacacttgtggatttgacggatacaaaatacagtcgctcagataactacagcgtttattttaataattggactaatggtttatttgataacatgctaaaaaacaaaacagagtatttgagtggaaaacaacgaattagggtgattctgcaccctgagtagaagtaaaaataagcctcttgttacttatttttatgctccaacttactgcccagtgagggtgatggaaaatacctggtgtgcagctgtcctggggaaggacagcgggctcctttctttgcaaattgttgtgatagcagtgtgatttgattccaggaactgtgacacaacagcattgatgttcacgtgcttccccgctttgtgtgcttttcagcttcaagaacaagctggagaagggaagagttattcctccatattcacctgcttcaactactattcttattgggaatggacaatggaatgttctctggttttatcatgatcaaaaacctccttctcttttgtatttccatgaacttatccagtcactttgggtaagttaccatctgtgcttttattttatgatgttagggacactggtgcctttcagacatgttacgggagcagcacatccattgagcaagtcctcgcctgccaccattgcagtcccaagcccttcacttgttgtaaataaatgaagtcattgccctgacccacgctttcttcctgagcaaggctgctcctcacgtggggtctctgaagtgagtcagagaaaaaaaggcagattatgttttcagaaatggaagctgaagatgatatccgagtcagctgtgattcttcctactcaggttaaaacaagattcaggagttcacatgcatgaaggacagtcactgcttgttagacaaggcagtgccaacatttcagttgccctccacggttccattatgcaatcaaagttgccttgaaagccaggcctatgctacttggcattgaaaaggactcacaatggtcctggcctgagccaaggccctagaactgtgaccatctgaatgcaggtgcagacaccataaaccacaggtgcctgaagatctgaaagacacccctgaggttctggcactatcatttccagtaacccctctttcattttagcctttagtatccgcataccaactctaaccttttttttcatgaaactagtgataacccacatcgtggatgaatgttcttatgaggctgctgttcctgttctgacccgtgccctagaattgttctggttaatcaaaaggattgtaacttgaagttgatggcatataattaagaaattaaatgtcaggacaaaagttgccaagcgttagtgctgcaaaaatggggtccagaggtttcacagcctatccacatttatgtaaataatcacaggatggggaatatccagtggcttggcaacagcctgtagacagccttcccatctggggggaaagaagacatccccagggccatgatgttttctgtctgtcctctgtacattttctgctcttctgactcttctgtgcagaggaaggggtgggtgtgggggccttgctcaggtgcagtggctggtagaagacagcattgggactttagtccacatccaccccggggcaagcctgagccatcagctgagactttgtccagcagagctgagctaaggaagatgcctgtccctcaccaacagaagccaggcagtgtgtgcactctaaccacactgacgggaacaggtgtgtggcatgtctcagccctttgagccattctaagtattcccttgggaaagagcattggccgtggctcttgccttgcttatcttgagtggatgcctcccttcccatgccttcagatttttttttatctattaaatgaatgttttcctttacaagttctctgcagctgccaaagcctgtaaactagcatgttcacaatgttcttctgaatgaaatgtctgtacataagtgaaatcgcacagaatattcaaatttgtcatctaatgcattaggtagttggtttgtttgatataccgcatatatttggtagcattttggtggtgaagaatatatcaggattggaaacttatattttctttaaaatatcttggctaggccaggcgtgatggctcatgcttgtaatcccagcactttgggaggccaagcggggggcggatcgcctgaggtcaggagttcgagatcagcctggctgacatggtgaaaccccatctctattaaaaatacaaagattagccaggcctggtggcacatgcctgtaatcccagccacttgggaggctgaggcaggagaatcgcttgaacccgggaggtggaggttgctgtgagctgagatcatgccactgcactccagcttgggcgacagagcaagactttgtctcaaaaacaaaacaaaacaaaacaaaacaaacaaagaaacaaaatcttagccaaatgtattatgaatttgcattgaataagcatgaaatggtttcactccctggtagatgcaggtctgaaataggaagtaatgtgtgtaagtagtttagccccaagaagcaggtatgctttcttatttagttctgtagcttgctgaggtcatcttcaaaatagaggggtatcttagtctctgaaagctaacactgagtaagtggtaaaatacccctcaaactttccagaaaattaactgttggagcagtttttaatcttttaggtatatggccagtaatccatcataaaacagcaccgactaattgcagcaaatatgtgcgatacagaagtcgataatgaaaggaatctctttaattccaccacccagagacaaccatgcttcccatttggtgcactgacttccccttgcttctgtgcatgttttttatacagttgggatcaggctgtgcagtttggtactgtgcttttttcctacccaatacatgatcacaatttctttaaaatgtattattttaaatggctgcatatttgacagggcaagagcgccttgtgttagcttcttccctaattggggatgtttacgtagtgaatgattttgctgttataaattttcctgtagtgaacgtatttggcttacaagttttcttaggtatttgagattatttatattagaagatatttttgtaagaggaattttacatcaggttctttgagcacttttcactcttgaccctgcgcgcccaattgcttttgaagaagtggggtttctagcaaagcgggaagccaggttcacacattctggccagcagggcatgtttttcaacagccacaaaagacatcataaaatacatcaagcccctatttatttcccttcctataggagactcctctcacttgtatattatctaaatggacttaagaataattgtgtcaaatcccgattgaaatttcctaatatttagttaactttaaatcttgaaaaaatagctaccacaacgtggagcacctgtctttatgtttcgtgttttggttttggatgaatcctaggagccactgtatgagctgagcaccgttagcccatcttctagctgggaaggagggaggatgaatgcctaacctcagaagtcaggagtccttactcggagcttcctgtgtgactccgccccctgtcacttcttgggctccctgacttgaatgcacacattttgcagggtagccctggatcaaaccagtctagacaagagggaacgtaattctaaaaggtagtacctgcttcagagtggagagagttttcagtacttggggattagcgggaaaaaagagtctgggtcaactcagtttattttccctccaaagaaagagtttatgtgattgggttcaaaagaaaggggaaaggagaagcatcaaagggtttaatttgaacctgattctaggacaagagaagtgctgactcctgagaggccagagaactggcagtgggtgaggaggactatagagaatcaggcagggaagaagaaggaaaaagaaaaagagcagggctatgtgcgtggaccaagtcgaaatgcagtgtttgtgaaacgtgtgtggcactggcagttggaaaatttatagatgtgataagtgcaatgtacttggtgattatataggataactgatatgaaattgctttgaaaatacatgagtgttcttctccttctcttgatcatattctaaatttgattggagtcaccagcagctcatttgcaatagtcttcctaattcttctgttagttttaaattatggaacagagaccaagtcaagtatacaatacaataaggccctttttggacactcagccccgtgctaaggtacgtttgacgacctgggattacttgaagtactatatttattttagtaagaccagtaaacaaaagtacatagtatagaaaaaccagtacagaaacaatattggcaccaatataatgtcaaaatacataatattagatttaaactggaattaatttatcatcattaagaaaatcatactttatcagacctgatagaccagtgacaattgtgagataaaattgaggattatcagcttaataataaggtaaaggctgagtccattgattttattgtcttaaatatattttggaggtttactgattgataaaaaaatctgttgaacaattttaatatgtgggagctgcaactcaaatagactttggaaaataagattttataagcagcaattaaaagtaggttattggagaagtggcttttgaacatgaacagacagagtcttctttatctgtctacacaagtgtgccagtgtggacgtttgtttttgtgaagagaaccattccataccctcactcaaggacagttcccttcttttaaatagagcagaaagtacattctctgaatcacgcaggtactcatgatatctttttaaatggaaagttctcccttgtgaatccccagatgacaaattcttcctgcaccatagctgcgggttcatgaggcccgggacagttatgataacaattctgaaagcactcagaaagcccactgaagcagggagcaggaacacaagtggtggtgcacctaaaggcttcagcgaccctgggagagccaaaaggcagttcttgcacgtggcaaaaaatgtaggtggttaaaagaggactataggggaatgtccaacatgtttttaaaggtacccaaagtaaataattctcagttatctgctttataaaggaaactttcagcatgttcagcaggcactgagcaggcaggagagtcggccagcgcagctctccgccaagactgtctggcagtcagctcgggagtgagtcaccgactcccttcaaggggagaaggagcatgtgggctttcgggtttttacaaaggttcaaattgcataagatgctcattttaattaatgagaaatttcagaggaaagtactagaagcaaaaataaaaagaaatctcatcagagaagtctgctggtacttcagcatgtatatgagtgtatcatatacactcatttatcagcatgtatatgagtgtatccccttaatattcacaatgcattttttttttaaatgcactgtttaatttacacaaaattcttgatttgcaggtgaaaagagctcaggtgttagagcttagagaagtgtgtccaagttttaccatctgaaagtgataaaagcaagggatccctgagaatgcaggctgggctagcgtgctccactgcagggcctgctccagaatgtcctaatttttattatagtgccctgaaaagggaaggaatggggggaggactatatatgggaaaccaaagaatatcctaatctagaactcacatgttaccactatgaaaacattgtctactgcagcccaaataaactccaacacggaatatagattgtgaactggaatactgtggagaaagatcatttgctagtgagagtaagacctgcagtgaaacaggcttcagcagttcattgaaaactctattttatttgtatttatttaacaacttattttaaaataaaaaaaagtcaacctaaaagtgaatgaagcacagaaccagttaatttttagttttaacaagaacaattgggccatcactgtactgtcagttcggttcctgtttcaggaccgctggtgaatatttaggatggcattaagtgtcattttgacagagggcagtgtagctgcccggcttcgatctctgtccacatgctctctgtgtgacgtcagaagagttacttcacctgcctgcaactcagtttctaatctcaatgtgggattaatcatgggtctcaatgtgggattaatcatgggtccaggatcacaaggctggtatgaaggatcaattgccaacctatgccaaatgctcaagcaagcccaggtctgtgtcaggggagggtatgctaagtgcaccaagccattctgggttctgtgtccaggagactcctggggtttactggacccagagtgtgagatggtgcctggcctcagcctgagcacagtaaggtcattgccttgcccacatctgcaatgtctccctcgcaggggcatcctgggggacattgccctgcagctacaccaatgtggaccatgctctcaccatgcaccaggcactgttccaggtactgagatgcacagagcagagcaggggcagagtggggcttgcctcccaggagggtacactctggtgtgcatggaataagtgtcagtaggttatgatgattgctatgaagagtaattcagagtaagagacagtgcgtgtgctggaaagagatgcttgagcagagatctgagggaggtgaggatgtgagcaaagctgttggcagagaaacctgaactggcaggaggaatggcgggtgaatcccaggctgtgtggcaggtgcatgcttgatgtgttaggaacagcggaggggcaggcgtgaggaagtgggagacggggagggagcgtcgtcagggaggaagggctggggttgggatcacattccgaaagtgctataggccatgcaggggagtatcaggaaggacagttgacttttatctggaagggcagagagggccactgagtggttttgagtaggtttgaaacatgatccaatttagatgtgataatgatgtgacttaaacgttgaagctcactctgggtgcagagtgaaagaatagaatggaatctggagtgaggtgagagggggttaacccgagatgcagtggggacagtgaagaggtgattgcagtggcccaggggagtggctgttttggccagcagcattagctgataggttattgtgggcatgaaggaaagagagaagtcagggatgacccctaggtattttgctagagaacccaacaggtattttgctccatcacctgcctatgatcgagctggagagggcagtagggaagaggtttgggtacagaaggtcacaggtgcagtggtggtgtgggaagcccctggagacaccactaggtctcccagtgaatgtagaggtctggaggacagagagggattgggctggaggtgtggacctgaggtgtttccatactttgggaggcatttaagccactggtttggatgagacagtcggaggttaagtgcacacaaaaaggaaagggtgtctggatcgtgccctggggcatgcttgtgttctgaggtcaggaaggtaagagaggcagcaggactgaggggaagaggcaagtaaagggaaagacagacagagccgtgccctgaggcccagtggaaaggattgtaggaatgttgcccacaggtcaactaagctgaggaccaagacttgatcttcagatttggccatgtggagttcattactggcctccagaagagaagcttccttgggatgcaggtagtgaaggcctggcagagtggttacaagagaagggaggggaggcagcgggggttgctcatatggacaaatctcccagtgagttttcatggaagacgggcaaagaatggagcagtgactggaagggaatatggggtgaatgaaaggctcttttaaagagcggtggtattagagcggatgtgcttgctgatgggcatggcaagagaatggggagaatgtgtgtaaggactgggatggaacatcactgtgtcatcacctatgcaggacccccagtgtggctgggaggaggaacagggctgagtctaggaaggagggcagggtgggagaggtggctctggcctgtggggccatagggcttgggttttaccttgtgggcagcaggattctgagttgggcagcagtgccaagggcaagaatggagaacctccatgaagattgaggaatacacttcagtaggatttcaggagctgcagggagaactgggggattttaggatttggcaggaatatcggagagttctagcatgatgttccatggcacagactcagagcctcataaaacaatgtggtgcctgtccatgttttccaccttaagaggggaaagctgttatttggaaccctgggattgaccctcactgtccagccagtgtccatcttggttttgtttttctgttacattgttgttgtttttctaatatggtgcttaagtgatcggtaatgggcatttgaggaaaacatcacacaatggtgccatttagaggtactcatttaatgacctgaaagtaacagacaaataaacagaagagacatttttcagaagtcattaaatactggggaagaacaaagtttaagaagacagataagctgcagcttaaaacaagcccagttcaaggtccaaagtaatttccagtcaaaatacgtctgcagttgccattatcgaactcactgtatgtaagtcagaagtggtcatccatataagagaagcacgtcacacactgccttcactagcacccgtggtggaatgacaataccgaaaagattttttcttctccagaaatgacgccacaacttgtactctttcaagtaccaaataaggaaaatgttggaactgagaatatggcataagtgggacatgttttgtagagaatatgcattcaatataaggaaataattcctattttaagagaacctagtgaattaacccagactaaaattgaagggtaagtcaccaaattttcaaatatttctgttatgtctaagactgttgttagtaatagggatataatctcagctcacaaaaatttacttccccaaagaatggagcctttatttgtccttgaagcactcgtggactctggtcgacctcaggatgagcagagctcctgggctgtactcagtgcagttgagaaaagcagaagtggcgcgtcggcgagtgtaggctgcctgctgaccctaaacggagtgagcgctttatgggctgaggacatcttggtttccacctgtaggactcatccgtcacacgctgcacattagtgctcaccaaaggcatagccctggatttctgtgttattttgtttttcaagtgctttcaatgagccaaaatggaacaaagcaagctgaagttcctccttagcttagcagcagttcttaaagatcatacagcttgatagaggcgctagccagttccccaggcatgtgtgaaggtctcctgtatgaaggcacttacacaccaggggctgagaaaacacagcatttgccttctatgatacagcacgagcctttctctccatggctgtgaaagcggtgtatttcataaccacgcactgcagatgaagcatttttgaggatggcctatggacagaggagggcctccagctcatgaaaaaacaaaacaaacaaacaaaaaaaaacccctctgctcctaccccgataggcatcatcagagctttttaagaatctgtttcttccctcctagaggctatcttcagttaatacagcaaggacaacactgcaaatccccagccatggccccatcgtacaaagaaaggtctacagataaaggcaaaaggcagtatggcaggaaagggcagacactgacattcctccaagaaaagtgtaattatgtgcaaatgtgtgtagatatactgaaactaatgaaaataattttgatcaagaagtagaatccgagctttgaaattcttaagcatagcattctattccgtcactgtgggaaatgattagggtatttgtgagtgggattcagagcccagtgggatggtgtttccctaaaactggcagagcaggagtgtctttatctccgcttctggagagagccacggaaaacaacgctcacagagacatcactgtggctgcacagcctccaaatggtcaatcatgaagtcaagcccttgtctctggacagccagggctgttaccatctaacacaatttaggaacattttcacaacagagaatggagtagcttagaaaactttaatttcaccattaagatctgctttttctactagtacctcaattggtaagataaagagacagcaaagaccttccaaaaactgagcacctggacgtggtctaaaattgagttgcaaactcggtgacaattatgaagtccatgagaagtgcatcatgaagccagatctggtttgaccaatagttacacaactgggcaggtacaaaatataaccttcttttttccccctgcaaaactctgaagaagaaggctgttcactgggaggagctatgctaggcttagtgctatgtctttccgaagtgtgcaactaccatggatgttggagaaaggggaatttaatgtttttaaatatgaaatcacagagttaaaaaagtatacatctgtgggctccgtactaacaggagtgaattttagcttgttagagcttcaagtatatgcatttttatggtgatgtgaaacttagatcaaaagagcattattcctttattctttattctctcattctattcaaaagggaatagctttagggccagcaaagaattgatctgttagatgcaatcaataaaaatgactgacttttaagaacagggtggagcaggcctgcatcgattctgacctcagcatctctccatggctggtggctctcagctctgatttcagccttttcatgggagagaaagcactttaagcacagctagggccccacagctgggcacttcagggaagtaccaggaatcacatgttcttctcccaagtgcccagggcactcgcttcttgggaaccacagctggctttcagtttggtaagtccccttgaagccaaatttgcagtcaagtgctcagtaattcaaaaccagttgctatttgcacatctgaaagcagctgtagaaacctgaggtgggatccatgctcttcagctgtggggctgtcttctgggcttgtggtctctctgtccccccagataccatcctcagtttgtctagatctgctagggcagtttctagttttgttctgctcatattacataagcttttggaatctggataacttgattgaacaaacaaaaaatgttcttgtgtcttccctgagggtcagcccacttttcttgagggcttattgtgtgacgctgggtcccacagaatgtgttgtgagctggcacactgaaggggcaggaccccagagatgacacagactccatcatgtctgtcactcactctccaatcctggcatattattcacagcacaaatgctcccagaccaactaaggatgcagtgaggtttgggaacaacaacctcggaaagtttctcagcgtcccctccatgccccagcgcccagtgcaggtgactctagcaatatgagaactcggtttttgtgtgtttaaaccaaacttctgaaatcccctgtgagtggattaggctctgccagtccatgcgcaatggctaattggttgttaaaaatggctaaaatattgacataaaccaattccttagaatcacagaatgatagactttgagcctcaggttaggtggttggataactagccccaagcagagtatccttggatgttggagaactgaggtgtatcaaggccaaacaatcccctaggcactatgggagctgtgttctcagatcctcgtctcaggagacaagcctccacgtgactccctggtttctgtatcttgagaagaatttgtaagaaataatatgttttaacgcttcctcttgtttctctttttaaaagcttttcacagatgccaaccagttcagtgaaagatgagaccaatgacaacatcacgatatttaccaggatcttggatgggctcttggatggctacgacaacagacttcggcccgggctgggaggtgagtgtgctctcctcagctgagcccagcaaggatccaggaagggcttaagtctcgtctcaagcttgtgtttgcgctgattcaaacaattcctaaaagagcttccctgccaggattttggtatgatggctgttccactcttgccaagaatcatgcaccctttgttattgtctagacgcaagatcctttgttattttctagacgcaagatcctttgttatttctaggtggaagaagctgggggaagtggtcttcccaaacatctttgcaaaatcccctcttcccagataatcttaatgtctagtctggttaacttaaggaggaaccagcttttaggcgttactaaagctgagattaccctatgttaagaaataatataaaatcaacctcatagtcttgtatctatgcgagtccttttcagaaatccactgtggaatgcagtcatcctttatatctttatgggttatgcatttagtgcttcactatggccatagtcctagtatttactttgactttgtggaattcaataaaaatgaactgatgtagattgttcttgtagggcacacctggcacagcttcattgttgtgctaagaattgtgtgcagtttccaggcatgtgcaatccccttggctctacagtttagatgtggagtctgaacttgttgggttaggtgaggtagacactttccagtgaatacattcttggaggaaaaaatttagttgtctagtgtttgcattttttttttatttgagatggagtttcgctcctgttgcccaggcaggagtgcaatggcatgatctcggctcactgcaacctctgcctcccaggtttaagtgattctcctgcctcagcctccggagtagctgggattacaggtgcacaccaccatgcccagctaatttttgtgtttttagtagagatggggtttcaccatgttggccaggctggtcttaaactccagaccgcaggcgatccacccacctcggcctcccaaagtgctgggattacaggtgtgagccacagtgccccgcctagtatttgcatttttaacagggagatccacttaaagcatgagttgccactctctgccttttgggcacaggctccttaacagtctcttactctgccctctgaattatgttcctaggcctgtgtgcccagcagtccagtcccttgaacacactcagaagggtcagagcatctagaggagccctaagctgctgtcagtgcttgtggtattctctcatcctctctgccttccagtcctacagagtaggaggataccatggaaagcctcccgggccaccctgctggggctggcatctcagtgaggagacaggcacactgcatcatacaacacacagcatcacacagacacctgcccacgcacagatgcacgccatgcagacgatcatcacaccgcgagctgctggagaggcaggcccacagtgcggctggaagttacccggtgtgggctgcagtgcactttgaattgcttcctactcatgaccacggggacttacagggctgtggtagtgcccagggaagtacacaggttttcccccaaatattattagccacttttatcactttacctatttccaataattttgtttgaaatcacagtctcccatgatagggctttctataataacagttcgaaacgctacataaagagaagtgggtcttcctgtctcagggcgcactgggcacattctcaacatcgtttcccggagaccacccaggacctcctgctttgattggaaagtcagctcccctcatcctgaattgtctgatgctttttaaagcccctctctgtggcgacggcgtggccctgagctgccaggctggcatcattgctccaggtttacagaggaggaaatggaagctcgggtgtttgcaaaaccccaaggccccacggcgaggcctcagcccaggtctttccaggactgctccccagggagcagaaggaggaggagagccaagctgtgttctgtatgatgggaatttcatttcatggtatagcggggagcagctcgatttcatctggtaattgtcaagtcctccaaatttaccaaacgcactgcaaaagcccccggttgcagagggtgaccctggttactggactgagagcacgagagtgtgccagacgcgcagggtgggtcggtgcagcccagggacctgtgtctgtctttcagagcgcatcactcaggtgaggaccgacatctacgtcaccagcttcggcccggtgtccgacacggaaatggtaggtcccggggcatggctgggcagacaattcttactccgcgccgcaggcccccgcccaggccccgtgccctctgactgcctcgtgccttcctttccactaggagtacaccatagacgtgtttttccgacaaagctggaaagatgaaaggcttcggtttaaggggcccatgcagcgcctccctctcaacaacctccttgccagcaagatctggaccccagacacgttcttccacaacgggaagaagtccatcgctcacaacatgaccacgcccaacaagctgctgcggctggaggacgacggcaccctgctctacaccatgcggtgagcgccgggcgggggcgggcggggccgggggacggtgcggggcaggcgcggctgcccatcctgccgcaagagctgcgccgcggagctgttctgaccataggtctgagactgcggcgcgtgtgtgctgggggttccccgttgccatctgcccacaccagcgctcttggacgttctttcccagggctgccataggtccgtggccgtttgtcatttggactcgtttattcggttcaagctcaagagcatctttggaaccatggcccatataatgtcggatagggaaaaattattatattaaacttaaacatctaaggaggaccgggcgtggtggctcatgcctgtacacctttaatcccaacactctgggaggctgaggtgggaggattgcttgaggccagaagttcgagattagcctggacaacatagcgagaccttgtttctaccaaaaaaaaagaaacaaaaaaaaacaaaaaagaaattcacccaggcgaggaggcatgcacctgtggtcctaactacttggcaggctgaggtggtaggatcccttgagaccaagagtttgaggttgcactaagccatgattgtaccactgcgctccagcctgggtgacagagtgagattctgtctcgaaaaaagaaaaaaaaaagaagggaattttttattttcttttgttgcaattgtgtagcctttggaagttttaaaagcctatttctcacatgcttggataacattccaatgttgaggttaagttttagtatttataatttaaatggactgttagtcatttttaaaattttgaattattcattgccttggataaatcaacaaattggtcaatgagaaaggctcctttagagtttttcaaagtttccaaagtgggtctatggaagtaggcttcagaaaatattttttaaattgaaaaaaacagcattaaagtcaagttaaaaaaaaggaagcacattccttttgcataggtactggaatttctctatcttgctacaatttttcacggtaaactttatgtttaaaaagagtaatcatagtggaaagtaatattgatgctctcatctttggaggatctgtgtttcctagcatatgttctggtgaatactgtaacacactgtgtcctgttgattaaaggggaaaaaaaaatcaagcttttaaagaactaaattttgttcagaggtcttacaagggactgcagactgaggcctgtagcctgggagccgccttttggagggggtttaccaacggcgcggtgcagtctttcatcctgctgctgtgcacttgtggtggataatcagcctgtgcaacatctcattgcagcttgggtgcaagagcacatttggttatggtttgcggaggcataatcactaaccccctcagaccctaccttctgtgtaggaaaacgcaaggactggtgctcttatcttgtaaagaatgtagtgactcagggccaggcacggtggctcacgcctgtaatcccagcactttgggaggccgaggcgggaggatcacgagatcaggagatcgagaccatcctggctaacttggtgaaaccccgtctctactaaaaaaaatacaaaaaattagccgggcgtggtggcggatgcctgcagtcccagctacttgggaggctgaggcaggaaaatggcgtgaacctgggaggcggagcttgcagtgagcccagatcgcaccactgcactccagcctgggcaacagagcaagactccgtttcaaaaaaaaaaaaaaaaagaatgtggtgactcaggcaagagatgtggggggcgtgagctctatcctgtttgagcttcaaagcatctttctggagacacaatcagggactttgtgaaatgatgctggcaggtggaaatgagcaaaggtggcttctctcacatttgttaccttgtctcacagttccaaatctatttgacagcaggactgtcctggtaacagcccaataaggagctgtgatgagtgagcctagagcacacaacttggcattttgtctttcctcgcattgatcttgaacgtgtttgcccatagatggagatgtgagttttgagcatcagtgtccttggacattaccttgttgatttagagaggttgttgaaaacctgagaaatatttcaagggttgagaataagtccttagccatcagtccatggaaaaaggaagggtttggagagaagcgagtgcagtctcagccctgtgtgtagacagcaggtgtggagacagaggccgaggtgttggaggatgtctaggggttcacgtagggctgggaggaatgctggatgtggttactgtggggatgcctgtgttctgctcatggaatgagaatacactcctggtcctcgtcggactagtgttcttgattctcatcctaattaaatctaatcttactttaatctttgggtccaaagcctgaaaggtgtaccatatatatgcagtttgctgttgttgttgttgttgttgttgagatggagtctcactctgtcacccaggctggagtacaatggcacgatctcggttcactgcaacctccacctcccgggttcgagcgattctcttgcctcagcctcccaagtagctgggattacaggcgtgtgccaccacacccggctgatttttgtatttttagtagggagggggtttcactacattggccaggctggtattgaactcctgacctcaggtgatccactggcctcggcctcccaaagtgctgggattacaggcgtgagccactgtgcccagccaaggtaagcagttttaattctagaagacaatgggacacactctattctctgaagcattgttgtctgaatgggatggagagttagtgtcattccttacaaggggaagaggcaggaatggggccgcctactgagtctgtatagcaggcaacttcacagacacagcgtccttcagccctcagacagccctgccaaccaggtgacactgtgaccataatggacagagagagtaaggcttaggggtgtttggtaaccagcccaggatcacacagctagtgaggaggtcacaggaatttgagctcatttctgagcaatgttcttgtttaatccaccacatttgaaaattcgagggacacaacatcattagattgagagtggctttttgggagtgtcatgcccagaagggagccaaggagaggtgagaaccagagcgacttgccagtggtaattagtggctgtttgtgcggaggaagagtctgctaatgagctgcaaggttgataatgagttttctttttcagtcatatacaacatttggaaagtggaaatagttccacttccaagtgttatgaattttaatgcgatagagctatagctagaatgctacagcagttttacctattgatttagcaaagctggtgaaatggctatgcaaactactggtgaaataggaatcaccaaagcacgaatcaccctgtggttgagcacttcagtgccagggtccttctggttgggaagacgccacactgtcaagtcatggaaagccaatggtatactttgatccagtcattcccacatagtatccatctcaaggaaataattaggactatggaataagctttatgcacaaaggtgtctattatattacttatgataccaaacactggaataaatattaaaatttggtaaatttttcaaatgaaaatgtatctttaattttttttcagatgttggacctaagtaaaacgacaaaatatgaaagtgtagaacaaactaggtttccatgatgccttttatttatttatttatttttgagaaagagttttgctctgtcatccagactggagggcagtggcgtgatctcggctcattgcaacctctgcctcccggattcaagtgattctcctgcctcagcctcccaagtagctgggattacaggtgcttgccaccatgcccagctaatttttgtgtttttaaagtagagacggggtttcagcatattggccaggctgatcttgaactcctaacctcagcctcggcctccacccacctcggcctccacccacatcggcctcccaaagtgctgggattacaggtgtgagccactgcacccagcccccatgatgcccttttaacctgagacaaacatctagaaatgtttgcaggagttcacttaccattttcttaaaagtgactccatataggttattgtacttaaatatatatatttttaaattcccttttatttttaatcgacccataataattgcacatctagatgaaatacagactgatacgtgtattcagtgtataatgatcaaatcagggtgatcagcatatccgtcacctcaaacatgtaccatttctttgtgttgtaaacattcaaaaccctctcttctacctttttgaaaatacacaataaattacagttaactgtattgaataagattttttaatgggaaatccctgccatgtttctgaattcctttaaattagtattcagagttacacacaattgagtgagctggcattctttacataagagattcaaaaaaagctgagggaatgtatgctgtttgctccccaaatgtctggcagtgagcccgaggcatttttctggaacttatccatgatgttggctctgaagaacttcctaccacgagtgggtcatgcattcactgaattttacaagtgaaattcagtagcttctcagaatcagcccaaagagagcagcaaacatctcctgttgcgtcctcaagaggctgcctataaagtactgaacaatttctttgaggaccatttttcagcaaatggagtgagccagtttacagaaccatgcccagaattaggcttccagcactaggcagggcagtcaggtcactccaaggaagctcagagcagttcctccctgccacgccttcctttgcagggctggagaggttaggggagctgaacccagggactggcccgaggtcatctagggtccagatggatgaccgtcccttaattgttttctcgggtgaggggagatagagcctttggttgtcattacatagcagcaggtccatagtcccctccagataagtgcctgaagtacagggtggccacctgtttcagagaccccaccagatctgacatacatacaccattacgtaagttataaagagcatatagagataataaccaagtgaattgggaggcaatggctccctttcatctgccatcttcccacaccttctaaaagtgccaacttatgtgagaacacacagtgagggtcaccttagggaatgtccccctggtctttgggcccctggcaggagagcaagtccccccggtaggctcttgtgtgactgcaacaggcaaggagggagtccctagaaggctggctctgcctgcaccacgtggttctgcctggctcagagaacccggccgctgctccacccaaggtcacttgcccgtgcctgtttaatagaaagatctgggcaaacattgtagaatgttgacatttttacattgtagtagatacgctgcaccaagtaaaataccactagacagtcgtgcactgaataccgctctgcatcatctcttttgcacactatgtattcctctgtgctgtttttactttaaggaagacatattttgatgattgcttacactccactccatttggattttccccatgagtggaaacccctgcttaattcatgaattggggaaatacgatgtagtgaaaagatcgtggacttcggagttaggctgacttaaattcaggtcctgactgtcatttagtagtcatgagtccttggaaattatattttaatctcctagagccactgtcttttttttttttctggttggttggttttggtttttctcttttctaatgcagtatagctagctgcagtctgtttcgttcttatttgaaaacggctagtaaatacacatattccttaaacggccacttgagggcagcattgtcacatttttgcttcatgattggtagtcaatatcaaatagcattaataggtaacttggatacatacatatctggaagttttgaactagacactgagatgtgtttgtatatatgtacaagcatgcatagctatacattgtcaagttcaaagtgtcaagttcaaagcttctttcatgaaaccagatgtattggctgacttgcaatttttaaggtaacacattttatattggcaagaatcaaaatatgatttaaaaatttataaaacatagaaaattacaaagtgcggaatatggttatgataacaccaagaccaaagagaatcaatgttaatattttagtgtgtatcatgtttatgtgtccctgcgtgtagacattcatgaatacatatgtgtatgtctgtgtgtatgcacacatagtctcctatagtttttgagtggcctcattcactgaaaacttttgtgaatagctttacaattttaaaatatacagcattgaaaacatttcccatgtcattaaacattgttttgaaactttgtgatatagcacatcccatcatgtggttatcctgtgtttatatgatttctgtaaaaaaattcacgatacatctattttttttctctgtgataacattctggtccaagcacctacgtatatcctttgaacaaatcccaggaattggacaaaacataaatttttgatattaatacagattttcaaactgttctctagaaaaatagtaccagtttcacttccatcaacagtgagagtagagaccacctattacttcctctctggcaccttatatacaaaaatgaacatgaaatttctgcccattttgctacatgagatccaattagccagtccattgaaaaccatgcataacagttactcatctcaagatttgtagtcacttcaattttttttttttttttttgctttgggacgtgcctcacagagctcccttgtcctgatttaacttgaattgagccttgttcccaaggttggagacatggagcctgcctgggacaccactgccctttcctctgtctggtcccgccgatctccctgtaggcacgcagccacaccatccttcatgtcctcagtcactgaagacagagactttgcaccagcctgctgtggccccactgcctttgacttcccagctgaagttctgtgttccccacagagcgtcttttggacatatatgtctcaatcatgtataacacatgcatgatacacgtgtcctgtgtaattccatatactccctgtcatcccggcactgggcactcaggaggaacttatgtgtgtgcttgtgaatgaatgaaccataatggaatgtatgagatctccttttcctaaatgaggccatctcaccacccagaccctagtatgagggacttggaaagagatccagagaatgtctggttcacagacatgttctgtgcttaggtttctgccaatttaataaagagtcagatttagttttgctaaaattgtacttgcagcatacaaataaggacatttcaacacacatttcttgcatatttggtttgaaaacgtgaccagacatattctgggcctgttgagaaggccatcagtctgcagccactgcaggcagttccgtctggccaggccatgctttggactctcgggcacacatctcacacaggaccacatcaccctttgcaaatggaccatctccagcacatgtttgctttcttaggtcctgaccccacaaaggctgcagacatcctcgtcctagtgaaacagaaaccagagcttcagaaatataaacgcatttaaactacataacatacatttggtagtatctttatcgtccttcacaacagatgtgataaatgaaacaggtaaaaatgatcacatggcaattagcccatcgataatgtccaagtgccaaacctcctggcctctccctatttgcatagatagaatatatagcaagcatgcaacaggaagctagctatgcgcgctattcagccatggggactgaaaataatgtccacgaggtggcgccgtggcctcgtgcatcgaggggaagactgacaggagggcattctagagcttggttaaagccccggattcaccgaagcacgtttagggaagacaaagtgcttcatgtctgcagagtgttcctgagcctcttggcaggtctgcgcggccttgaggttgctcagagccagggaggctgcgctcagcctcaggtcctccctagtgcgcagccagcctgcacccaccaccgcgcttccggacaccagagtcccgagtcagggccacagtgctgctgcaggcatccctcccctcccggccagcggggaaaagtgagccaagtgacccgctctgctcatttcagctcggacggtggtcccttaagcaggccgaaactgatggtctcatctcctgcacgctctctggccttgagcgcaaatgccccagaaacgttggccaagcgcaccgggtggtggaaaattcggagcagccaccgcctggcaggagtgaggcagatgcgattaggatttccatgtttaccctgagaatagttaggcgtatgccccatgctgctggagaaggaagacttggcagaggcctccgtgcccaaagtgtttcccggttggcccggaatccggagtttttgtggtcttcactcctatgatttgcactgtctgaaacggtgactagacatttatcacactttaaaattaaggtcgaaaaacattaataatccaggtcccccgtgtgccagccacattcccagcagtgggtagccggctgtgaacggtggcttccgcgctggcgggcagtgtggacggcggcgtcacccagccccggggaaatgcagccccgtggcagccccaggctcccttctccgggccctacccagcccgcgccccgggggcccagcagtgggggggctgccttccccggccgcgcgcacatgacctgcgagtccgcggacacagggaagctttaaaatatttcaaggcaagttagagtatttatgctacaatcttttaacggaggcgatttttctagagcattttagaagtttgaatgatcaaataaactatgacatctagcaggaaactaatacccattgctaatctaaagttttattattgaaattagctttcttctcagtaggatctcaagttttttgcattgcttcaagcaatattaataaggtccgagcagaggggctgttactttccgttagcattcacatggagaagaagaggatcgtgggatggaatcagctgaagggccccttggggcaggagaggtctgggcggcttccggaggcttctctgagcaagttgtgcggggaggatggagcagtgtgtgggtgtgtatgggtatgtgtggtgtgtgtgtgtatgaggttgtgtgtgcgtgatgtgtgtatggatgcgtgtgtgtagtgtgtgtatggtgtgtggtgcgcgtggggggtgtatagagtgtggcgtgtgtgtgtagtgtgttgtgtttatggtgcgtttgtatgtatggagtgtggtgtgtctgttgtgtgtgtacgctgtgtggcgtgtttgggggtgtatggtgtgtggcatgtgtgtgtctagtgcgtgtgtatggcgtgtttctaagtgtatggtgtgtggcgtgtgtggggtgtgtatgtggtgtgtggtgtgtgtgtgtatagtgtgttgggtgtgtatggtgtgagcgtatggtgtgtggcgtgagtgtatatggtgtgttgtgtgtgtatggtgtgtgtgtatggcatatggcgtgtgtgtatatggtgtgttgtgtgtatatggcgtgttgtgtgtctatggagtgtcgtgtgtgtgtatggtgtgtagcgtgtggcgggactatatggagtatgtgtatggtgtgttgtgtgtgttgtgtgtgtatggtgtgtggcgtgtgtgtgactgcccctactcaggtccctatgtgaagttatgagcagggcacggcctgggcctggacctccctcctgcgtgtggatctgatgggagcagcggtggggaggactgcagctggtcgggctgcctagggctccccttcctctgcctcgtgtccttcccgctcgcccatcccttcgaccactcacagtttcactaagccctgtctgcggagcccagggcctgctcaccctggagtggcgcaggggaaacaggaggatctgggggcacaggagtgggcgaggggctgagtctgggggtgaggggagcagggcccggcgaccaggcggtgggcacggagtctggggtgagctcgagctgcgaaggtggagaggctgggccaggggacccgcgtgggcagcagcatggaccggggcgtcagagtgcaagatgtgagacctatgtgcgcgcggggcggcggcagccggtcaaggggcagcaggaaatcagacctcaaaggtggccggggacagattccaaggacccttgcttgaaggctggtcactgtttcctttgggcctccaggagtgttaggtcgaggactggagaggggaggcagttctctccgcgcgccccctgtgctccccagacgccctttgcactgaaagccaagggccggaggctggagcgcagcggcccgggcagaagccctgcccagacggcgccggacctgggcccggactctgcgagcagcccagccctcacttggacaaaggtggaaacggaagccttctgggagggatgcgtattcccgcgaatccactacacttctctcgggatgcttttccttcttcaggccaggctagcaacgcaaacctcgactccagagaggccggtgtgcgtccaggggccaccccttcacaggccgcgcctgcacccagcgtctgttctcactgccggcctcgcgggcagccagtgggtccccgggtgagatggtgcgggcagcgctcccggaacgatcccgggcccctccttccccccgggctcttgcctgcgcctcttccacacaatttgcgatttccgtggcgtcagatggctgttctttgtcacctgcttgtaagagctggtcccatgatgtcaagcctcttctcctggtcaaatccagtttcccctcagtttccttcatcggaattccttggccttcgtcattcttggctgcatgaacctttgatttcctgtactctctggtcctggctctaggaatgatgttatatgtagcgcctggcggtgtgctgtgcgctcaccggaggaggtgtccctattttgcaggtgatggaactcagttctgggacctttctgaagtcccgcggatccataggcacagtccggccgcagaatatctggttcctccaatgtttttgtcttccagtctccgtcttgagtatcttttctgtaaattcatttgtttccgtgggtccgacttctgtctattttattttctgacatggtttaaaacacacccaagccctgatttcattctcggtggctccttgggcgccccctcttaggcatcctgctggggtctgaaactgagcccagagctcttctcaaacaggagctgctgcctggttctctgctaaccagctggttttatgtatggatggctccttttcgttctttctctacccgggggcacaagcccttcgtttttagcccctggctactgctgcaggtcgcccaccacgtcctgaccccacctgccgcccccttcacccttcagtccccccacctcatagatggctgccactgccacagctggttccttgttaccagattctctctcctattaatattattccttctgaatatggatgccaggaccaaggtaaaagaccacccggacttaccatgttaaggatttgtagcttgtggactaacttgcgcattcgtaattccacttctgtgcctgtgcaggctctgccactattctgcttggggtgcaatccgaactccgtcactaacagtgtgacttgggagaagttatccaactgcttcatgccttatggaatagaaatagtacctgtcttctagtcttgttgaaaatataaatgaggctgggcgcggtggttcacgcctgtaatcccagcactttgggtggccgaagctggcggatcacgaggtcaggagatcgacaccatcctggctaacagggtgaaaccccgtctctactaaaaatacaaaaaaagtagccgggcatggtggcactcgcctgtaatcccagctactcgggaggcggaggcaggagaatcgcttgaacccgggaggcggaggttgcagagagccaagatggcgccaccgcacactccagcctgggcgacagagcaagactccgtcaaaaaaaaaaaaaaaagaagaagaagaagaagaaaaagaaaatataagtgaaaagagtttttttcacagcacccagcccagagatactcatttagctcctgttggccatgctgggtacagagtctccccgagagctggaccagcctccccctgcctccatgcacagtggtccggatccccttccacccttccctgcaccctgtggtcgcacattcttcctccgggttatcagtgcccattgctcccacccttcagtcattcccttgctgggcaaccgctgaccgctcctttgcccgacatcatacagagtcttcgatgatttggaatgtattttcttcctttttaagggctctgaagtgtctttgtgtaagtgtgttcctgttgtctccaaagaaacaaacatttatcggtgtctctgcaaagtagccaaaaaaagctttacaaaagaggtgtatgaaatagcacataatttctctcagaaattcaaatgttttaaccctgctttaaaatctccctgaccaacaatcatgattcaactaatttgagtagatttcctcatggtctgtgtcagtctctctcccatcatttgtcaggccagaaacccagtgggtttcaattaattaaaggaaaattaattggatattactatgggctgaattctgttgcttccaaatttgtttttatttttctaggggaagaacaaataatgtttactagaaataaacagtcacaagactttctccatcttttaatttaaccaggtccatgtgttaagcaattactactttgtaataatttattatttcaatttatagtaccccaaaataggagttggtaggtttatttttacaatgagaagtgctagtgtgattatacacactggcctaaagatgttgagggagtatatgaaggaaaaaagaaattgcgtagtgatgagtgtgaattaaacatcagaaggacgctaatttaccacctggttaacccagtcatcaccaagttggcccaaggtgattgagcaagtatctatatcactgctccatttcctcgggtgatttatttttctatatcttttcaaaaagttttattatgtgaatttaagcagtgtaaattaatatgtagagaaaaaaatctctacatcttacagatgtagagaaaaaaatctctacatcttagagatgtagagaaaaaaatctctacatcttagagatgtagagatgtagatttttacatctctagatgtaaacacatttacaacacatttatgacagcacctatggaaagagaggtcccttcactgccattatagagaatacatgagcgtgaattttaaccagccaaagcagctatgtgacatgcctatgttgcttccaaattcttaagtcctaacctctcagttgtcagaatgcgactgcatttggcgaaggggttctaaagaagtaattaaatgaatttgaggtcattaggaagggccctcatccaatataactggatccttatacaatgaggagaagattagaacacgggcacccacagaaggaagaccatgcgaggacacagggagaggacagccatctgcaagccaagcacagaggcctcagaaagaaccatccctgccaacaccttgatctcagacttctacctccagaactgtgggaaaatacatgtctgtagtttaagccacccagcccgtggtactttgtaatggcagccccagcagactactacagaagctccagtgctgtgcaaatgaagagccctgactcggcagatacgctgcatcaacttcacactcaaggtgtcaatccatttctttacaaactcaacaggagtacaagttgccccttgataacacttaaagtttcaggattcaaatgtcttttaatcatagagagggtggaacaagatgcctctcgttactttccctgttacatgtcaattcctccatcacaagtctctgattctttgctgcactaacttaaaagaagtagaccagtcaacatcacatgtcgaacatcccctgtgtctcggggatgcaactgacccacggaggggctttttagtgcccattttatcacattgttttctaaaaaataatgcacctcttccaagttcatgacacttggggactggtaactcagagctcaataatttaaacgacagcaagaacaacctgcaacatttcctcattcacagaaactccagatattcccagaatatttgcctggccacttaggggtaatgatagactgacataaaatgagttgccgtggtagaaaatagagcattttgaaacgtgcactggaaagaagagatttagggttggatcactttcttagaaattgagaagaatgctactgattggcagataggtggaaaattgctgtcaagtttccaagtatggaaaaacaaatcctctgttcagtgagtcaaggcccatgggaaacgtaaaccaaatatttgcatagtggaggatgctgtacagctgtgctggtgaggctacctcaggtgggcttctgagtgtcactttatacatcaaatttctatccactcacccacacgcttcaacaagcaccctttctctccactccccagagaggggatgtggtgccatcatttgaaagagtctgcgttgttaaaacaaagtgcttaaatggcattataaatattagctcaaagtattcattggttatcagaggcattcagaattgtggaagaggagatccagcgattgaaagcagcaacatctgtaggatggaagactggcacctgtaggcagggaccctgtgggccttcacatccccagtcagcattccctctgacctgcctgtaagcccaacaagctatgggctttcttatctccatttcatttacccaatctttatttccttttttcagttatctttgggcttagcgtgctcttttttttttttttctaatgtgtaaagttccttaatgtgtaaagttcagttatcagttgaaatcgtttttcgtttttaatgtgggcattcagagctataaatttgactccaggcactgcttttgctagtcccataagtattgataacttgggtttttgttgtcatttatctcaatatttttttctttttttagggacagggtgccatcatagctcagtgtagcctgaactcctgggctcaagtgatcctcccacctcagccttccaagtagttaggcacatgacaccatgcccagctaatttcttttatttttatagagacagggtcttgctatattgcccaggcaggttaggaactgctggtttcaagcaattctcctgccttggcttcttaaagtgctgggattacaggtgtgagccaccattcctggcctcaaaatttttaaaatttctcttatgatgtactctttgacccatttgttatttagaaatgtgtttaatttccacatatttgtgaaagtttcaattttccttctgttactgatttctagtttcattacatttggtcagaagagatactttgtatgattttacatttttaaagtatgagatttgttttgtagttgaacagattgtctatcctgggcatgctccctgtgcgcttgagaagaatgtgtattctgcttttgttggatagagtgttctatatatgcctgttaagtccatttgctttatagtatagtcaaagtcttgtcaatgttctctctagatactctactcattattgaaaatgggatattcaggtttccaactgatattgcagaatagtgtatttttctctgaggtttgttagtttggtctgatatatttttgagtttccattttgagtttcatataggtttataatttctatacattttgatgaacagagccacttattatcatgtaatatctttgtctcttgcaacaaattttgtcttaaagttctctttggttttgatgtcaatggaatgcctttttcatcctttcacttttgacttttttatggttttggaactaaaatgagtcctcgtacatgataaagaattattttatatatctatatcgattctgccaatacctgccttttaattgaagtatttagtccatttacatttaatataattgctgaaaggaaggactttctaccttttttctatttgctttctatattgcttattcatttcttgttctacagttctttcatttcttcttttgtgtttaattgatgttttttagcgtaccactttaattttcatgtaatttcttttactgtatatttttaaattattctattagtggttaccctgcggaataaaattaacatctaaatttataacaatctggtttgggttaaaaccaacttagtttcagtcatatataaaaaactttgctccagtagctctgtcctcccattgttattgtcataaattgtatctttacacatagtttgtgtaacatagatttgtaaatatttattaacatagatttacaattattattttatgcattattttatgcattattaaataattatacaatttttttgtatttaaagtcatatgggataaaaaatgggttacaaatcaaaaatatcatcatactgattttatatttacctacatcattactgttactgctgttcttgatatggttttgagttatcctcttgtgtccttttatctctgcctaaaggattcctttggcatttattatatggcaagtcttatagcaacgaactccctcagtttttaaagaatgtattttttaaaagaatttcatttttggagcagttttaggtttacagacaaattaagagtatggtacagaaattttccataaacccctgtccctatacatgcatagcttccctccttacacatccccaaccagagtggcacatatgttacaactgatgaacctaaattgacacatcattattacccaaagtccatactttacattagggttcactcttggtggcgtacattctgtgtgttcagacaaaattataatgacatgtactcaccattacgatatcacaggagtatttttgttgctctaaaaatcctctgtgctctgcttaattttatccctctctcccctgaacccctgacaactactgacctttttacttcttttatagttttgccttttcccagaatgtcaaatagttagaatcataccgtgtgtcatattttcaaactggctcacttcacttagtaaaatgcatttgagtttccttggcacaacactgcattatctgcatacactatagtttatccattcatctatggaaggacatcttgattgcttccgagttttggtagttatgaataaggctggtataaacattcttgtgaaggcttttgtgtaggcataagttttccatttctttgggtaaatacaaagagcacaattgctgatacagtaagggtttgtttagttttctaagaagttgccaagctgccttccaaagtagctgaaccaatttgcattcacgtcagcagttaatgagcaagtttctcttgctccacatcctctccagtgtttactgttggcagtgttctggatttcggccattttaggagatgtgtagtgatatctcaatgttgctttaatttgtgtttttctgatgacatatgtcgtggagcatcttttcatatgcttatttatcatctgtatgtcttttttagtaagatgtttgttaaggtcttttatcattttttaattgggttgttttcttatgactgagttttatgagttctttgaatattttggataacagccctttgtcatatatgccttctgcaaatattttctcctactgtgtgacttgtcttttcattcttttcacagtgtctttcacagaacagaaatgtttaattttaatgaaatttggcttatgaattcttactttcacagactgtgcttttggtatctcatctaaaaagtcatcaccaaacccaaagtcatttagattttctcttatgttataggagttttatagttttgcatttaccatttagatctgtgatccattttgagttaattcttgtgaagggtataaggttagtgtctagattcatctttatacatgtgcatgcccatttggtccagcacttgttgaaaagactgtctcgtcttcagtctgtggtcttttgctcctttgtcaaatatcagttggctgtatttttgggtggctatttctggactgtgttctcttctatttatctagttgtctattctttcaccaattctacactgtcttgattactatagctttataagtcttgaattgggtggtgtatgtcctctgactttgttcttttccctcgatatcattatggctactctgggtcttttgcctcttcatatcaatattagaatcagtttgttaatatccacaaaacaacgtgcttgaattttgattggcattgcatagcatctgtagattgagttgagaggaactgaaatcttgacaatattgagtattcctatgaatgaacatggaatttatctccattttgttctttaatttattttattagagttttcttgtttttcccctaaatattatatactaattttgttagatttatacctaaagatttcactttggggtgctaatgtaacttgtattgtgtctttaaaatttcatttgttcattgctgatatataataaaataattgacttacatacattgaccttgtatcagcaagcttactctattcatgtattagttccaggacttttctgttgttgattctttcagattttatacatagacgagcatgctcaagctcaattgtgctcaagcgcaattttgtttctttttttctttaatctatataaattttacttcctttacttgtcttattacattagctagaactttcagtataatgtggaaagggtagtgagagtagacatccttgccttgttcctgatcttagtgacaaagcttttaatttctcactattaagtatgatgttagctgtaggtttatggtagatttttaaaaaatcaagttgaggaagttcccccatattcccaatttactgaaagtttttatcataaacaggtattagattttgttaaatgctttttctgcatctattaatatgaacatgtgatttttcttgtttagcctgttgatgtaatggattacattaattgatttttgttttttaaaaactttcatattaggttcaggggtacatgtgcagatttgttatatagataaactgtgtcacagtggtttgtttatagattattttgtcaccctggtattaagcctagtagccaatagttatttttcctgatcctctccctcatcccaccctccaccctcaagaaggctccagtgtttgctgttcccctcattgcatccatgtgttctcatcatttagctcccacttataagtgagaacatgtggtatttggctttctgttgctgtgtcagtttgctaaggataatgacctccagctccatccatgtccccacaaaggacatgatcttcttttttatggctgcatagtattccatggtgtatatgtaccacattttcttcattgattctaactttgatgggcatttaggttggttctttgtctttgtattgtgaattgtgctataatgaatgtaagtgtgcatgtctctttatcatagactggtttacattcctctgagtatatactcagtaacagaattgctgggtcaatgatatttctgcctctaggtctttgaggagttgccccactgctttccacaatggttgaactaatttacactccagccaacagtgtataagcattcccctttctccacaacctcaccagcatctgttattttttgaccttttagtaatagccatttgactggtgtgagatgatgtctcattgtggttttgatttgcatttctctaatgatcagtgatatttagcttttttttcatatactcattggctgcatgtatgtcttcttttgaaaagtgtctgttcacatgctttgctcgctttttaacaggatgttttgtttttttttcttgtaagtttgtttaagttccttatagattctggatattagacttttgtcagatgcatattagacttttgcagatattttctctcattctataggttgtctgcctactctgttgatagttccctttgctgtgcagaagctctttagtttaattagatcccatttgttcatttttgctttttgttgcagttgcttttgctatcttcatcatgaaatcattgcccattcctatgactagaatggtattgcctaggttgtcttgtagggtttttatagttttgggttttacttttaagtatttaatccatctttaatatacttttaagtatatggtgtaaaaaaggggtacagtttcaatcttctgcatatagctaatcagttatcccagcaccatttatagggagtccttttcccattgcttatttttgtcagttgtattgaaaatcagatggttgtaggtgtgtggccttatttctggggtctctgtactgttccactgatctatgcagctatttttgtaccagtaccatgctgttttggttactgtacatctgtagtatagtttgaagttgggtagaatgatgtctcctgctttgttctttttgcttagggtcgccttggctattcaggctcttttttgattccatatgaattttaaaaatagtttttctactgttgtgaagaatgtcattggtaggttgataggatacagcattgaatctgtaaattgctttcagcagtatggccattttagtgatatcaattcttcctatccatgagcatggaatgtttttccatttgtttgtattgtctctgatttctttcagcagtgttgtatagttctcattgtagagctctttcacctcctgggtgagctgtattcctaggtatttcattctttttgtggtaatcatgaatgggattacattcctgatttggctcttggcttggctgttcctgatgtataggaatgctactgattttttatattgattttgtatcctgaaactttgttatttatcagctgaaggtgcttttgggctgagactatggggttttctagatgtaggatcatgtcatctgcaaacagggatagtttgacttccttgcttcctattaggatgtcctttatttctttatcttgcctgattgctctagccaggacttccagtactatatcgaataggagtggtgagagagggcatttttgtcttgtgccagttttcaaggagaattcttcgagcttttgcccattcagaatgatgttgactgtggatttgtcatagatggctcttattattttaaggtatgttccttcagtacatagtttgttgagagttttaacatgaagggtacattaattgattttggaatgctccctcagtggctgtttatctggaatatcataatttcttcttcattttgaaggatcattttgttggaaatagaattcttggttgacaagttttttttttctttcagcacatttagtatttcctcccaccacctctgggcttccatggtttctgatagaaatcacctgtttatgttacttaggatcccttgtgcataagtttcttctctcttgcttctctaaagattctctcttcatctttgacttttgaaagtctgattataatgcagctcagtctggatctcttaaatttatactactggaagtttattgagtttcttttccttcataaaatttgggacattttcagccataatttttttcaaatattctttctgtccctttcttctttttctcttgttctgggattcccattatgtatcatttgatactgttgatggtgtcttgttagtctgttagactctgttcatttttcttcattttttttctttctgctcctcagaatggatgatttcatttgacttatcttcaaatttgctgaatcttaatctttcttctacctgaacaatctgctgttgaaaccctctagtgaattctttacttcagttgttgttttttttcacctccagaatttttttggttctttttataacttctttttatttatattctctatttgttgagacattgttctccaggtttcctttattttcttatttcttttagatctttgatatttaagacagttgatttaacatgttttctagtaagtctaatgtctgtgtgtcctcagagacagttttcattcatttatttttccctttgaacaggccattgtttctttgatgtattttatttttttcttgaaaataggatattttgattattataatgtggtgaccctggatgttatattctcccatgtccatagtggtttttgtttgtttgtttatgcctgttgtgattattgttgtttgcttgtttggtgagtttttgagctaatattgtgaaatctgtattgtttgttctacagggccactctttccttagttcattggtcaactaatgatttgacagagatatttttaatgcctgaaaccaaaatttaaaaaccaaaacaataaaagcctctctcagtctttgcagatagggtctgtgtgcatgttaaaacactctttcagtgcctagccagatagtttacaacattgctataactttgctttcttcttgtgtggagtttgaaggtcagccagacatgaaaactttgggtctttttaggtatttttttagtatgtgtccagccctgggcatgcacgtgacctcttagatttcctggtataagtgggagctttacagcccttgttcattatgtatacctttcctcagcctcttctttcctagctttatgatgaaataaatgctttaatttcttaacgttaaactttgaattttattgtgagaaagaaccttttttgtggatttgtgctgtttctcttttgtagtattttaaaaaaatcattcaggcttatgtgtattttcctacatttgatctgttaaaaagatttattatggagtgtgtagacgcacataacaaattaaacaaaaataattccatttcacgtcaattattacaatgtcctcctgagaaacatgagcattagaaaaaagcaacagctatgttaatcaaaatagatcaatatactttatatctcttttggataagaaatatactaacatctcaaaattatcaaacttacgatggttttcccaacataaataggaattgctgacatcttcttttcagtggccaaagaggaatgaggatcctaatagtgcaaagcacagtgagaagttttagcccagtataattctgatggttggtctcatgtacctccttactacattcagggatacaaaagaaatccattagccttaaaataattcatgaaatctgtaattcaaactcaaagtaagccgtataatttggatctatttttaaaaaggagacactttgttatctcaatagcagatattttaaagcaaggaactctacagtaatataaaccaaagcgtggatcattttagtgtattcttatttgaaagactttaaaatttcagtaataccctaagttgacttttacaagcttgctcttcactgagtttaaattctattatgtataaaataggtcaatgtacactttattcttctagctttctgctgcctactccccattcctgccccgcagcaggacttgatgtctcatctatttcttatgacaggcaaaatcttgctttggatttgacggggtcagacttagtgctaaggtaaagatccttaggaggttggcaaaccaggacaatcacaatggccaggcactgaaagaaactaggtctgcagttcttgtctggatcaaacacaactgcagtggatctacaaccatcacagaatgggaccagtacacacgtcacagtcagaaaaaaaggcgagggaattgctgaacctggcagtggcctttgggttccgacaaactctgatcctgacttaccaacgtttctgttccaaaagttcagttttcatatagttgactgagcttcagaatacatttttccttgaaatattattgtaagctgaagttaggttcctagaaaatcaagcagtgcctaactacaggtatacaaataacacacatggtacatcgtgatactgactgcatataataaaacaaatacatccgtgcattcttttctttagtaaacaaatttggagttatttttatgagcacagtagtacaggggagaaaagtctagccaggcaggatttgggcatcaggcagggctcatgggaaagtttctgaaggagaaacaggctacctgtattgctagcatcagtaacttattaaatatatatgtatgtatgtatttatacacttgtatgcatgcatatgtatttcagttctttttaattgaatatttggatcagtatatcttcatttgctaatcttgatttgagtcagttctagggaaacaggcctgtaatccttacagctgggtttcctttccaagacgccccactcatagcacaaactatgctccgtgtgcatgatgtgaatctcctcttccatccttgctaaggatgtgactcaggtgtagagtgaaaattcaccagcagcatccctactggtgtgctgaataagccctgcacagacttgcagctatgagtacaccagaggcaccagagtcaggctgcagcccaatagaagaatattgcctgccgtcatgccagctgcagaatgccaaacgctgtgtctccaaaccctgcaggctttccgatggggcacaactctggtgcatagaaagttttctaagttaagcattggtgtgttttttacaaggcctctcaggactagacaaagatcatgatgaaattaagccttgtttcttttctgtagcatcaatctttagatactgtgttgatactgaatttcaagggtccctaaataaattcctgtattgcctgagagtcacgggtagcatcttcacagggaggtcatgtttccaataattccagctgaggcacagcatgctgttcaataactgacccagctaggatgcctcacatgagatgtctatttcattatcaaagtctgaattttcactgcagtgaacatgatgtgagctacttacaaattggctaatattactaaatttatttgtcacctttgtgaaaatgatttcaaaatatgcatggggctgctctttggcacaataactgctggtcattagacttgtatgagcttcctgttgctgcttaacaaattactacatagttagtgacttttcaacacaaatttattctctcacatcactggagaccagaagtctggaatgggtcttgtgtgtctgaaatgcagctgtgggcaggatggcctctcttctggcttctctaggggacaatctgtgtccttgcctctcccagcctctggaggggccagattccttggttcatggtcctgcgtcactcttgcttccacttccgccatcagatttcctgctctgattctgacactcccattttcctcttctacgtggcctcgtgatgacatttgtcccacccagataacccaggaaaacctcccatctctaaagctttaaattcaccacatctgaaaagtcctttttgctataagggaaacatattgacaggtaggaagagttgggacatggacatctttggagaccaccattttgtcatagcatcaataggaaatacaaattttggcttaaaacacaacaaagttattgtcttgtaattccaaaagggtcccaggaggctacagtcaagctgttggcaggattgcatttcttttggacgctctaggggagaggctgtttcttgcctcttccggtttctagaggacacttgtattcttagactcttggccactttgcaccgacctctgcttcctcatcacatgtttttctctgaatctgacactcttgtctccctcttagaaggacctttgtgattgtattgggctcacatggagaatccaggattatctctccatcccaagatccttaaatgaatcacatctgcaaagcccttttgctgagtgaggtagcatactcacaggtttggggttttgtgcattggcacatggacatatttgcagtgctgttattttgcctgccactgtcacacctactgcattgatgcaggatttccacaagaataaggaaggcttcgatttgaagaagattttagtagaattttggagactttctttaatcacctcattgtcattgaactggtaatagccaaagcctttttaccctttttatacttatcaattatttatttcagagaatgaaataaatgtttttttttcttttttttgacacaagaagactggaccagattggttaggcagttttacaaaggtcacacaattagttaatagcaaagctactctagaatttggccattttacccatcataaagcactcttcacccatcagctgctcctgaccaagcagagagctctttcttgagtttaggaccctaagccctcaattacgatgacataaatccaaattgaagcaattatcttaaattataaaaatgcccgaccgggtgtggtggctcacacctgtaatcccagcactttgggaggccgaggcaggtggatcacaaggtcaggagtttgagaccagcctagtcaacatggtgaaagcctgtctctactaaaaatacaaaaattaggtgggcgtgattgcggacacctgtaatcccagctactctggaggctggggcaggaaaagagcttgaacctgggaggtggaggttgcagtgagccaagatcatgccactgcactccagcctgggtgacagaacgagactccatcaaaaaaaaaaaaaaaatcccatttccttatcctaaaatcaagatgttcttcaaaaatgggacattatgcttcagtaagtgaatgcttgaatgtcttaacagaaattggaagtaaaacagaaattggacctttgtaaaaatactggattcctgggtcttccagtaattcagtgaagtctttccacagtcaagtttcttaaccttttgggcttgattttctttatcgaaaaagtgagggtttcaagcaggtgacctagctgtctctcttgcgctatgacagtcacccactccacagaggccttgatctcagctctgtgtggaggcggctggttccacatcaaagcattccacatttcaagagccccatgaatagaaggctttctttcactgagagatactttttgagtattataaaagcataggccatttttgaaatgtttagagggatcgaaaatttaaatttatttcctgactgaggctgaaacagttcttattgagagatttatctgaataatacattcatgtgttagaggagagacactatcatagatgaagtatactttcctgaggtttagaattctaaggggctctataaaattgggagaagtcacaaggctctaataatagcatttattgagatggtaattgtagaaaaactgtcttttttacatttttactggagttattttttctttaaaagtgcctttttttagatccagctaaatgctgtccacctgtgtttgtgtaccctccctgcccccacccttgctgcatgcacacacacacacacacacacacacaaacacacacactcctgcaatatgctaaaagccagctccttggtatgcattccttgtcagaatgccatctttcaacattgtcagtgcagtaattttcggaaggtgggcagttctcagggccaaacagctagaatgaagcccaccatggcagaaggagcggctctggtcccttttataaacacacggtattggccaggagaggaggaggaatgaaccaggagctggcagagtgcctcacggggcctttgggatgaggtttccctggggtctgctctgagagtaggtgcatgcaacagaaacgtcacgtctggtgcctgcaatggcctggtggattggagctggatgccagcacagagcaatgggttgggggtaactcggactctccaagttgtcaggaattcagcccgtagactgacttctaggctgcttccagacccagtgggaaactgagtgcctgccggggtctggcagacatggcagtgtctggagagaagacaaccatctccatatccaccctgacgatggcatagactgtgtggggttatagtgttgttagcatctttgtcagaagactcaaagagtaaagccagggctgctggttgaggtcttcagtagcacagctgggctaagacagtcaggtcacttgaaacgccctcccctccaccccacctcagactgctcccgtgtgagccccgcgtgttcctgttacagccaaggccacaggcgatcgcaaagcatgcctctcctgatcagaagtgttctctaaactcccacagtgctgtttcctcgtgtgctcatcttcacatttattgctatggatctaatcttacagctttgtatatacttcctatttcctgactaaagtcttccttcttaaggaaattctagatattttcagatcattgtgattttgtcctcaagaacacatctgacccgttgagattctctgttccagtactgcatcacttgacaaatttgctaacaaccatataaagtaacctgttttcctttgtgttggctgaatgccatccttataggtgactttttaaaaagttctaattttcctaattccaataagttttttctttatttaccttaccaatttcatagtctctaataacagccctttttcataatttatgattgaagaggtcaattgcaggttatttatcaggtaaaataatataaaagtccagcaacagctaattgataattacacatacagacagaaacacacacgtacacatggatgctagaatcaaatatttaacctttcaatgtcatgattatataaagattttggtgatgggggaagtacttctgttctagtgttaggtataaacaagactgacttttatataccaagaatgaaaagaaaatatatgtacatgtagaaaaactcagggctaaatgaaggtgaaatcataagtgaagtggtcgatgtttataattatcttcttattctgtgaatatgtgtggaaaatcatttaaaaattcctctcccagccagatgcagtggctcacgcctgtaatcccagcaccttgggaagtcgaggctggcagatcacctgaggtcgggagtttgagaccagcctggccaacatggtgaaaccatgatttctactaaaaatacagaaattagccaggtgtggtgtcaggcgtctataatcccagctactcaggaggctgaggcaggagaattgcttgaacccgggagtggagattgtggtgtggcaagattgcgccactgcactccagcctgggcaacagagcaagactctgtctcaaaaaaaaaaaaaaaaaaatcctctccttgcctgaatgtgagacttttgtgttgtgttctaggtcatctacacacacaagcctctgtgagtcactccatctttggggaaaccttccgtcaaaagttgtggcaacagaagatttcgtatctttgatggacacagacctcccttccactgacatgtattttagtttcattcagaaaatacatacattgactcctcagtctgcaattaccatgtgaattatgtgaccaatttaacagcaaaaggttaatctattttcacagaaggaagtagtaaaagcaaaaatggatgtttatgttttgattctcaccctaggctaatcagcgacattcagtcttatataacaaggaatgaacaatagcactactgtaaccttgaattattatttgctctaaaaatagaattataacatgcacttgaagttgaacgttttgtatcttcatctttcattgtatgtaatttcatttattttaaataatggaaagaaaaactaacaaacagaagatgggctcattaataaaatttagaatcatccgtaattggcaaaggtggtagagaaatgaaagcaccacagtgtggcggctctgggagtgcactggcttcctacacaacagagccctgcctatgccgcctgtggtggtgcctttcagggacctctgcagccagggccaggcagcctgggtgattgttattgtcatggctccaccactgagcagctctgcattctaggccccgaattccttaatatccgcacctcacttttcttctttgtaaactgagatggttatagcaccagatctccccgtgctgttagggtgagatgagtcaatgcaggtagaatccctcacaggctgcctggcacagacatgccagctcttgttaccatcattattgtagttaccagtgacagtggtagtgctcggtgatattataatttggaagactaggcctggattaaaaaataataattagggtgtaccagaagattgttatgatattacaggttcacttactatacagtttcatattggcccattacacaatggttatagccaggttccggtcaaaatttgggcgtgtaggaaaactctgcactaaatgtaccacgtgaagttataagtgaaatagtagatatttgtaattgtattacttcaactttttctgtattttcccatattctacgaatatatgtgcatttattctacatttatattttttgagcttataagcaattttagaaaatgcatgttttcagtcccgtcaaggaaagctttatgataatgctcaataagggataggaaacaaagaataaataacttttaaaggcatcttaaattgctttacaagcagtaatatatgtataggtacacaccctaagccaccgaagtgctgagtagatttgatttaagccttatttctgaatgatattcacctacaacacaaacttacgtaatttggtggggatagttcagataatctcataagagacattaatttttaaaagtacttaatatggctttctgggacacgatggtggctcagtgaatggctagagtgagagagtcgttcaaaggtcttcatcttttatttttcagcttgaccatctctgcagagtgccccatgcagcttgaggacttcccgatggatgcgcacgcttgccctctgaaatttggcagctgtaagttattttcacaagtaagagccttggacatatactttggggatcaattccacatttattcagaagaatttaggttctgcatatacataagcacaataggatgcagtctgtttaagaagcgtggagagtgtattgttctccccagactagctttcttgtctgcaaaatggggtcattaacacctgccatacatcacagattaggataaactatgacaatgccagtgacatcactgaacaatctggaatgtgcccctctgggggtgtttctcctcagatctcaaccgggcagttcttttttgtttttgcatctcagattacaggtcacctggtcaaaggtgaccagtgcccagtactcagccagtgatattttttattgtgctgtaatcattgctgtgttgactcacttcttctagaatgttccataagagcaacagcctcatctgtcatgttcatagtcagtgctcacccacaacactcagcattttaggaaatatgtgctgcttgaacaaataaacaaattattcatatcacaatactataggtatacacttatacaattctaataggaattcctggattccagccattccagacagaggaattgacagttgagacagttgaaaagttctgtgtcttacaggaaaatgtaatccattttctttactgtgacaattagaatgtttaaaaatattcttgaaatatttatttctccaagtattaaattttgttacacttgtttcagcatcatccccacatgtgagctattgggagcagacttgaaactgatctagtttccatctttctttctactcttcacttgtgcacatgctatatgaagttttcactttgaaagcagaatgttctccttgagatgaagcatgaaaactgtgtgggtttgaatcctggctatcccactcctctgctgagtaactgtgggcaagttaattagactctctgagcctctttcctcatttgtaaaatagatgagggctgttataatatgtttgaaactggcagagtaacaccagttaaagtgttcaataaatgcccatcatcatcattaccataaaagttcattatatttatagcttcttgacaggatgcatgtctcatcactataaatcatctctctttcaccatgtaatgcctatagaactaagttttgtcaaatattaatattgccacaccagtttcttctttaattcttgcctgggatatctttctactccttttttgtctgtttcctgtttcattatatatccaagttgaaaagttctgtgtcttactggaaaatgtaatccattttccttactgtgacaattagaatgtttaaaaatattcctgaaatatttatttctccaagtattaatttttttacacttattgtttcagttattttcctttcctctttaaaaagaaacaccacttgttgaagagattatcttttcctcatttttgtattcttggcactcttgtcaaagatcagttgactgtatatgcatagattgatttctggaccttctattttgttccattgttctctatgtcagcctttatgcctgtgccatactgttttaattgctgtggctttgtaacatattttggagtcaggacatgtaatgcctccagctctcttttttcccaagattgttttggatatttgggtttttttgttatttcatatgattttaaacattgttttttctatttctataaaaactgctgctggaattttgatgggcattgtattgaatctaaagatcacttgggtagtgtggacattttaataatattaagtttttcatccatgaacgagtggcatctttccatttgtttgtgttttctttaatttatttcatcactattttgtagttttcagtgtatagatttttcatctccttggttaagtttattaataagtattttgttctttttgatgctataataagtgggattgtttttctaatttctttttcagatagttcattgttaatatatagaaatggaactgatttttgatgttgattttgtattgtgaaactttaatgaatttattgattagttctaaaagtcttttggtggagttttttgggttttctgtatgtaagatgatgtcatctatagatagggagagtttcacttcttcctttatgatttggatgccttttatttccttttcttgttgaatcgttctggctaggtcctaaagtattgtactgaatagaggtggtaatggtgggtgggtatctttgctttgtccctgatgctagagaaaaagttgtcagtttttcaccattgactatgcaattcactgtgggattttcatatgtggcatttatcatattgaggtaattttcttctattccttgtgtatcgagaatttttatcatgaaagggtgtggaattttgtcaaacactttttctgcatctactgagatgatcaaatggtttttgtttttcattctcttaatgtgatgtattacatcaattgattttcatgtgttggaccttctttgcatcccagagataaattctgcttggatacgaatctcttaatgtgttgctgaattcagtttgttgatactttattgaggagtttggcatctatattcatcaaggacattggcctcttgttttcttttcttggaatatttttgaccacttttcatatgagagtaatgcaggactcataagtttgagtctttgttcctctttagttttttttgaagagtttgagaaggattggcattaattcttccttaaatgtttggtagaattcactagtgaactatctggtcctgggcttttctttgttgggaggtttttgattatagattcaacttccttactagttattgatctatttagacttcctatttctttgtgattcagtcttagtaggttgtgtgtatctaggaatttaccaatttcttctagattattcattttattggcatataattgttcattgttgtcttttacaagtctttttatttctgtggcatcagttgcaatgtctccttttatttctaatttatttgacttttctttttttctgaatctacataaaagtttgtcagttttattttttttcaagggacaaactctttgctgattctctgattctgtttattgtttttagattccctactttgtttatttctgctctaatatttattattttcctccctctactacatttagactagtttgtgcttctttttctaattcccgaaggagttaggttgtttataaattttcctcttggtgctgcttttcttagatgccaataagttttgatatgctgcattttcatttttatctgtttcaaggtatcttctaagttcccctttgatttcttctttggcccattggttgtacaaatgtgtgttgtgtaatttccacatatgtatgaattttctagtttttcttctactgtggatttctggtttcattccatgtggtaggaaatttctgtcttcttaaattgattacatttgttttgtgacataaaatgtgaatgttctgtatgtgctttagaaaaatgtgtattctgctgcaggtgaaatgttttatgtatgtctggtgttgttccagcccactgtacctctttgttgatgttctgtctggttgttttatccataactgagagagaggtattgaaatctactactattattgcactgctgtttctcccttcagttctgtcaatgtttgcattatattttcagttgttcttacgttgggtgcatatttacttataattgttatatctctctggtgaatcaatctttttatcattacatattgttcttctttatctcttgtgacagtttttaacttaaatttattttgtcttatgtaaatatagccatccctgctctcttttcatggccctttatcatgagatacccttttccatcccttcattttcagtctatgtgtgtccttaaatctactgtgagtttcttgtagataaaatagagttgtgtaatcccagtactttgggaggctgagatgagtggattgcttgagcccaggagttcaagaccagcctgggcaatgtgggaaaacaccatctctacaaaaaacaaagttttaaattagctagacatggtggtgcatgcctgtagtcacagctatttgggaggatgaggcagaaggatcacctgaacctaggaggcagaggctgaggtgagccatatttaccccactgcactccagcctaggcaatagtgtaacaccctgtctcaagaaacaaaacacacacaaaaaaagagtcggatcttgttttcttatccattcaaactctcttgtgtcttttgattgaggagtttaattcatttacatttaaagtaaatactgattgggaaggattcactattggcattttggtaattgtttctatttgtcttttatctattgctcctctttaactctcctgctgtctttgtgcttcattattttttttgtattgatatgctttgattcctttctcttcttttctgtaacttctatagttattatcttcgtggttacggtgtagcttatataaaatatcttaaacgtataacactatcttatgataatatcttaacatcaattacatataaagactacactttactactatttcccacacacttatttacatccatttatattgtgcatcattaacatttttagttgtaattatttctaatacttttgccttttgacttttatacgagaattaaaagtgacttattcatcactgttacaataatacagtattctttatttgtctgtgtaaatacagacaaatacctgtgtaaatacctttcccaacaagttttatactttcttatgctattgtgttgctatttagcattctttcaacttgaaaaactctctttagtatttcttgcaagtcaggtctagtggttttgtatactttctgcttttgtttttctggaaaagtttttgtcttgccttcatttttgaaggagagttctgccaggtatacttttttttcagcactttgaatgtgttttatcattccctgctgtcctgcaagatttctgataaaaaaaaatccattcataatcttatgacatgactatttataacaactggcttctctctggcagctttgaaaattctttctttgacttttgacaatttatttaatgtgtcttggtgtggattctgggtttgccttatttggaatcctctgtacttcctagatctgtttctccatttcctttcccaggtttggaaattttcagccattatttctttaaataagcttttgttgttgttgttgttgttgttgttctttctctctctcttctccttttgaaactcagtatacatattagtcacttgatggtgtcccataagtctcttaagctttcttttctcttcttcattcttcttcttgctcctctgactgaataatttccagtgatctatttttgaattcattgatctttccttctacttgatctagtctgctgttgaatccctctgaggaatttttcagttctgttattgtattctttaactccgtgatttctttctggtaatttaaaaatattttctgtctttttattgaaaattcactttgttcatatattgttttcagtaagtatctctatgatggttattttgaattctctgtcagataaattatataactccatttcattaggctcagtttctgaagatttgtcttctttcattttatggaacatatatccctgttcctcatttctttatattctgtatttggtgtgcacattaaataaaacattcacctctcccaatcttcataaactggcattgtacagggaaagaccttcaccagtccacctttgccagagattctggggacctctccaaccttggtgctagtcaaactcactttctttattctaagcagctcctaggcatctagggtctgctggatcccactagcactcagagacaagcaagactgaaatcggttcctccgacagccctcagagaagctgtctttctgcgttttctgcattagttgatataatcatgtgagttttctttagccagttaaaatggtgggttacattcctgccttgcagccctggaataaactctgtttggttatcacatataattatttttatatattgttgaattcaatttgataatattttgtaaatgagtttttgcatatatattcattttttataatatcttttgttttggtgccagggtaatcctggcttcataaagtgggaagtattcccaccttttttattttctagaaaatactgtatagaataggtgttgattatttaagatgtttgttacaattcttcactgaaaccaccagggcttgaaggtaactgtttagggagatatttatgatttaaattttcttagtatttaagactatttgaattatgtacttcttattaggtgagtttgggtaaattgcgctttttgagaaattggtttattttatctaagttatattaaatttgtgtagagttgttcatagttgttatattactgtcttgatgtctgcagtgtctgtagtgatatctcttatttctgacgttggtaatttgtgttactctttcagcaagattgatagaggtttttcaattttattgatcttattatttgtagctctttgtttcattgatttctctattgcttttctattttttatttcactgatttctgctttcatctttttattttctttcttttgcttactttgcatttagtttgcatttcttttttgtagattctcaaggtgggaacttaggttattgatttgagacttttttcccttctagtgtgctcatttaatgctataaatgtttctatagcactgccttagctgttttgctcaaatttttagtcattgtattttcctttcattccattaaatgtatttctaaatttcccttaagactttccctttgacccacgtattatttagatatatgttatttagtttccaactgtttgtagatttttctgttatctttttgtcattgacttctagtttaattccaccatatccagagaatgccctctgtataattacaattcttttaaatttgtgagcattgttttatgcacaatatggcctacttgatatttattctgtgaacatctgaaaagtatgtgcattttgtggttgctgggtggattgtctacaaattttgattatattatcttgattatgatggtgctgacttcacctctatccttgatgattttctgtctcattgttgtggatcagttgttaataaaggggcactgaaatcttcagctataattgtctatttgtctatttccactttcaagtaaatcaatttttgttacacatattttttagctgtattatttggtgcatacacatatataattgtttgtcttcactatttaatatttctctctgtctctggaaatttttctctgctttgaagtccacataacttgatatcaatgtggccagtcttgctttcttttgattaatatttgaatgataaatattttttcatgtttttactttcagcctctatatatcattagataaaaagtgagtttcttataaatagcatagctcagatttttaaatttactttcccaatatttatcttttaattgatatatttacactctttatatttaatgtaatgaatgaaatgttaaggcttaagtctgccatttctttggctttctgctttttctgtgtttttatttctttgttttcttttgtctgtcttactgtggacattttttactattccattttgatttatttataatgttatcatgtgtacattgctgtatagctttttcagtggttcttctaggtgttacttacttaattaactaattaattaaagagacaaggtcttgctttgttgcccaggctggagtgcaatggggtgatcatagcacactgcagcctcaaactctttgcctaatgcaatcctctagactcagcttcccaaagttctgggattataggcatgagccactgtgcttggccagtattactttatatatacaaaatttatcacggtctgctgtatactcattttgccagttcaagtgaaatatgaaaaccttacctccctttatgtccctttacctttccctaatcttaacacagttgtcttaaatatttcctctacatacatcttgaaccacatcagagagagttgcaatttttgcttgaaccatcaaacttaattttgaaaactcaatagacaaaggaaattttattatatttatccatatttttacttactgtgttcttttttccttctcagtgttccaagattcattcttttatggttatctttctgttaagcaaactttctctagccattatttcagggtaggtgtgctggcaataagttctcttagtttttattcatctaagaatgtcttgacttctgcctttgattactgaagatatttcactggatatgggattaagctttgacagttcttttggcgcttgaaaaatgtgccacttccttcttgcctccaggtttctgatgagaaatctgtctttcaaattttttttctttataggtaaggtctcatttctgtcttgttaccttaaagactttttttttctttgtttttagtgttcagaagtttgactatgatgtttattggtgtaggcatatgatatttataggtttattggtctacaccaatagcctttctggtgtgcttgcttgtttctgtaggttttggtcaagtttgggaagttttatgaattaattctttgaacactctttctggtccagcctgtctctgttcttccctgacctccaagacatggatctcagctcttttgttacactgtcattttcatctactttctttctgttttacagattggacaatttctgttgttctgtcttcaattcactgattctttcctttttcccctccatcttattttgttcctctaaggaactttttatcatggatattttactttttaattctaaaacttctatttttttttctatagcttctgttctgtgttgagactttcagttttttaaaagtttgttaccagcatgtttgtacttggtcgttgcatcattttacaatggctgctttaaaaacatctttgtccagtaattctgatctctgtcatctctgcttgatttatttttattgagtttcatctccctcattcttggtttgacgaataattttctatcataacctggatattctgtatattataatacaaggctttttttttttttttttctcactgctttgtcaggggaaggtgtggtacagcctcgttaccactgggtcagggtagaaatcaggttccagcttagcctctattgatacaagagttcctgggattccttgttaatgctagtgtgtacaggacttccagatccatgctaggcctctactgatagttccctagatgggaggagctgaggtgatttgtcactttccacatagctttcactgacaccatatgcatggcctcattactgccaagtggtggagaaagtttggaacatctactaatcctctgacatgactcccataaagagcaagagggagttgcccctgctggtttagatgaaactccaggcttcctacatggcttttactaccattaggggacgggcctcattgcagcttggcaggaatcaacgtcctggcccccttagtctgtggccttctctggtgtcactccatcagtgggttgggcacctggtgagggcagaagtcttagctgtctgttcagcatttgctagcctggaatagggcagggccacgttttttggggggatgcttggttggagtacagtggccagtgtctaaaaggtttcttgtcctactaggttgcaccctttctggtcctgtggctagatcgcacaggcatcagtttttgtctgtttgtgcccgttggtgtttccaagttgccagcttctttagctccaaacctgggatgtgtaagacaggaagaaaaccagacagtcaccactaggccatcccttcggttccaagacctatctgcctgcttctttctaccattcagatttttcctacatttattttatgtataatatgcacttttatttataaatataaatatatgatatttatttttagtgggaggaatagaggaaaatgcattttcatctttctgaaagtggcaatccccctagatttgttttcattttaatttatacttcttgtggttttctgagcctcttgaatctaaatttgtctttcaccaaatttgaggcattttgaccattatttcttctaattttttttttctgtctcatcttcttcctcttttttatctgaggttctaattacatgtactacaccttttggtataatcccatggatcactaggggtgtgctcatgtttttaaccattgtcttgcctctatattttttatattggataatttatatttagtgccttaagttcactgattatttcttcagtcatttccaatctgttcttaagcctaaacaataaattcattattcagtatacaatatgtatcaagtttagcatttgtattggattcttttaaagtttcaatttctctactaggatttactgttagttttttattacagcaattttttattataaagcattacatattctcttttgtattcttaagcatatttataatagctactttgaaattcttagatgctaaatccatcatctgaatcctattgggattagtctgcactgattgcgttttctcttgagcacaggtcctttttttttgtttcttttacgtataataattttgaattgtctcctggatattttatggttatattgtacaggctctggattctgttaaatttaaagtgttcatttttatttatttgtttttaagccagttaacttggctgagtgtgaactcccagttctgtcttccttgtggcaggcaagccctgaaacacaggtggttctcgcgctggagttgggctggtataggcttatgctccccgcatgcatatgcataattgaggggcgagttagagatctggggagagatgatgtacatctgtatacatcactgtgggcctctcttgtggttcttttccttctaggattttgcacctcactctccagctgctgctttaatagttccaggctcttctttaggttcttcaagcaagggagatggaggggtcctatctgagcatcagctgccttgcagcgctgacccacagcttcttaagtgaaaagccattctttcctctaaatggcaactcctgtccatttctgcttgtctttgagtctctccggggctttcagggagtagtttttcatctgacatccagagataatggatgttacctcatagcaggcattctgccattcctggatgcagaaaatgttttgatttcaagaatttcattttatattacttccatcattccaaagagatttttggaattagaagaggaattataagtgatgagccaaaagttaggttagatggaaataattcaactttttcaaactatgatctttagatatatacagagattaagatatacatttatttgaggaggccagtataatggaaagggactatctctgggatttatttaaatcatttgcttccatggggtggttggggacatcattacttagaacaaaggaccctctgaagatccctgaggcatttcatttgggaatcactgattgatgtctttgaaagaaaattacttgtttatatcctcagaggaagtggagttgtacaacttgaaattatgccactctgtatatgaaaattgtgcttttgatgtgatcaaaaataaaacactctaagtcaaagatgattgtttttttgatcattggttaagttcaagtcaacgtgatacccagatgtaatgctactggtgagcagggcaggtagcacaaaagtaagttttggtaaagaaaactacgtgatgtcctgattatttcctaaattttcatctttaacaatgaaccaactgcagttaaatcatttatcacactcaaagctaaaatactcattcagtgaaagctcttcactttctatattcagtcaaataaaataagattcatattatatataagaagtaaaaccaatagaagtgctccttgaactcagtaggaattttgaactcttatgtcaaatttatttttatctgcctgctattttttttttcttttttgagacagagtctcacactctcaccctggctggagtgaaatggcacaatctctgctcgctgcaacctccccctcccgggttcaagggattctcctgcctcagcctcccaactagctgggattacaggtgcccgccaccatgtccagctaatttttttttttttttgtatttttagtagagttggggtttcactatgttgggcagcctggtcttgaactcctgacctcgtgatccacccacctcggcctctcaaagtgctgggattacatgtgtgcaccactgcgcccggcatatctgcctgctattgagattgatatgatttgcttcagaggttgatcattcatttatatttactgttaatattattactatgaaaaacaataagaatgattttattcatatgtcatgtattgtgtgtaaactgttgaccaagagctagaaaactgtacacacttcacctttcctcagttatatgatttcagctcagcacatgataattctaagagaagaattgctattcaacaaagtttttttcttacttgtctttcatcttttagatttactaaaaatagatgcttggccaacttgttcacttataccattggcatctgagcatgcagaggctaaatgtgatagtataatgagtttcaaattactcaattcaacagttctctgctattaggagacaaaggaatgcaatatgtgtcattattctaatgagccacatgctctagtttctctaatgcagaactgaattaacagacatttctgttattggtatctctactcttaagaattccatcaaatcttgaaattagtctcagcttacaaaaggatgtttctcggtccataaggaaattccttaaaaataatggcatggtgtccattcggaagcaaatacttaaacacaacaagactatttaggaaaaaaatatatttagattatgtcattcattttatttgtggagtgattcattaaatattaagccatgagatgacatctggattcacgaaaatatgtactaaattagaactggaagcttctttggtagtcatccagtagagagaatttcaggaaatgaggggtgaatttcaccggagtgagctactattccattcagacacatgaattatgcctgctgttgcattcatcatccccagcttctagtgactcaggatgagcgtggatgatctagaacacaggtttctgagtgcctcgtgtgaacatgttacagtctcgacagttgtagaaacatactgaagttttaactgtgcggtgtctgaatttagattgtttcaacaatcacgttgatgcgttagttacccttggttgtcactggaatctgaatgtttgtttcctccccaaatcatgtgttgaaacccaatccccagtgtattaagaagtggggcccttacgaggtgattaggacgtgagggtggggggtcctcctgcgtgggattagtgctcctataaaagaggtcccagagagctctcccgtcccttctgccatgtgaggacaatgagaaggcacccaagcagactaaaacaattaccatctaagagatactctgagtgttgctttagtctggtttggctgttataacagaataccacaaactgagggacttaaaaacaccagaaacttatttctcacagttctggaggctggaaagttttggatcaagttaccaacagtttcagtgtctggtgagggcctgctttctggttaagacagcatcatctcactgtgccctcacacgatggaaggggtgagtgaattcccaggggcaccttttataagggcattaatcccattcatgagggctccatcctcataacataatcacctcccaacgccccacctgctaatgccatcatcttggggctgaggatttcaacatatgaattttgggggggacacagttatttagtctatcacattcttcccctggacacccagcattcatgctcttctcacatggtttcagtccaaaagtctaaagcccaaagtcttagctgaatatcctctaaatcagatatgggtgagacccaaggtatgatttatctttgggcagaattcttttcaagctgtgaaactgtgaccagacaagttgtgtgcttccaaaatacaatgggggcaggcacaggatagacattcccattccaaaaggaagaagtgagaaggaagaagggagtgagaggtgcagagaaagtccagaaccgagcggggcaagttccatcagaccttaaagcttcagattagccctccttggcccacgctttgccctgcagacccatggggaaagagttccatatcttccagtcacactggggcagcagctgtgtcccagcagttttgccaggcagggattgggccgcatgactttggggatcccctgcccctgtagcagcttatgcctgtgccccacagctctctgggactggggtcctaatggctgtgcttggaagcccagtgctttgaaatctaggtggaggccattgtgccccctctgctctgttgagcgcagccctcaccacaccagggccccccagaacccctgctggggtggctgaggagtgtggtgctggagagcagggagcagagcccaagaggtaaggcagtgcacatcagggcagggcagggcgcctctccgtcctgcaggtaccagcatccctcctttgcattctcccattgtcttgcacagcagctcttggcttctgttggggtggctgactaatgaatgtctttcttaaatggtcctttggccacacccatcccggtattctctcccaaacaggctttctcattcctttcaaaatagataggttgaacatttcccaaatctttaaattctgcttctttcttcttcttcttcttcttcttcttttttttttttttttgttttttgttttttgagatggagtttcactcttgtcactcaggatggagtgcaatggcacgatcactgcaacctccacctcccgggttcaagcgattctcctgcttcagcctcccgagtagctgggattacaggtgcccgccactacgcctggctaatttttgtatttttagtaaagacggggtttcaccatattggccaggctggtcacaaactcctcaggtgacctgcctgcctcagcctcccaaagtgctgggattacaggtgtgagccaccatgcccagcctgctcccttcttaactaacaattccatctttaagtcatttccctctcctcccattttacaataagctattagagaaacaggtcacttcaacactttgtttagcatatttccttagccgatattcaactccattactcctagttccaccttccacgaaaactatgactataacacgaacatggttcagtcaagctccttgccacttggtaacaaggatcacctgtcttccagtttccaataacatgttcctcattttttgtctgagacctcattggaatgacctttactgtccatattccaaccaacattctgctctggattgcttatatattctctaagaaaatggagactttctctacaactctcctcttttctttctgggccctcaccagagttgctttaaacagtccattcatgaaaatgtaggcttcttctagcacacatctcttccagcctctacccataacctggtcccaaagccacttccacatttcaaggtatttgttatagcagcaccccagtcttggtgccaatttctttcttttttttctttctcttcttttcttttttctttctttctttcttttcttttttttttttttttttgagacagagtctcactctgttgcccaggctggagtgcagtagcacattcttggctcactgcaacctccacctcccaggttcaagcaattctcctgcctcagcctcctgagtagctgggattacaggcacctgccacaatgccccgctaatttttgtattttttttggtagagacggggtttcaccatgttggccaggctggccttgaactcctgacctcaagtgatccacctgtctcggcctcccaaagtgctgggattacaagtgcaagccactgcgcccggccgccaatttctatctgggttcattcagtctgctataacagaataccaaatattgggtagctcatacataacaggaatgtatttctcacagttctgcaggctgggaagttcaagaccaaggtgctggcagatttgatatctggtcagggtctgcttcctggttcacagacggccatgttctcattgtgccctcacatggtggtaggagcgaggggtctctctgagacctcttttatgaggcctcccccatcatgacctaatcacctcccgaaggctcttacaaccaatcccatttaggattagattttaacataagaattttgtgaaagacacaaactttcagtctatagcaggtgtgttaagcattcagcactcagctaggtgcagtgaggaacacagaagcatgaaccatggcctgtttccaaggagctcattatgggcacttttggaaaattgggttaaatacctttgtgcagttgaaaccatttggaattcatagatgggaatatttattatgaggaccatgctttgagctgaatctggtaggatttgaatggaaagaggtataacggaaaacagaacaaaacacaaatggccaccgatcagttgtcaagatattgaaacaaaggagaagcctcatctggggaagtgacaggatagcatcaccactcaaacaggaagggtcttaaatatgaaagagtcaaagtagcaggcaggatatgcagaaaattgagagtggactcctcccttacaccttatacaaaaatcaaatcaagatggattaaagatttaaatgtcaaacccaacactataaaaaccctggaagaaaatataggcaatgctattcacgatataggcatgggcaaagattttatgacaaaaatgtcaaaagcagtttcaaaaaatgcaaaaattgacaaatgggacctaattaaactaaagagcttctgcacagcaaaagacactatcatcagtgtgaacagacaacctacagaatgagagaacatttttgcaagctatccatctgacaattgtctaatatccagaatctacaaggaacttaaacaaatttgcaaggaaaaaaacaaccccattaaaaagtgggcaaaggacatgaacagacaattctcaaaagaagacgtttatgcagccaacaaacatgaaaaaaagctcaacgtcactgatcattagtgaaatgcaaatcaaaaccacaatgagataccatctcacaccagtcagaatggtgattattacaaagtcaagaaacaacagatgctggtgagactgtggagaaataggaatgagtttacactgttggtgagaatgtaaattagttcaaccattgtgaaagacagcgtggtgattcctcaaagacctagaaccagaaataccatttgacctggcaatcccataactgggtatatacaaaggaatataaatcattattctattataaagatacatgcacgcatatgttcattgcaccattcacaacagcaaagacatggaatcaacccaaatgcccatcaatgatagactggataaggaaaacgtggtacatatataccgtggaatactgtgcggccataaaaaggaacaagatcatgtcctttgctgaagccatcatcctcagcaaactaacacaggaacagaaaattaaacactgcatgttctcacttacaagtgggagctagaacaatgagaacagatggacacagggtggggaataacacacactgaggcctgtggtggggtagtgcggggagggagagcatcaggaaaaatagctaatgaatgctgggcttaatacctaggtgatgggttgatagatgcagcaaaccaccatggcacatgtttgcctatgtaacaaacaggcacatcctgcacatgtatcccggaacttaaaaaaaaaaaaaaaagtagcaggcagtgtgagtgatgtttgttgagcagacgaagaacatgcaaaaatcactatttgtggggctgaaagcaaaagctgggaattcccatgaagtcattagaagtgagggagcagagagcagggtggtggccagatatgaaaagtggatgtagaggggaaaagagggacgtaattcaaagacagccactccattttaagaccagatgacttgggaaatactgttttccatgaggaaattggaaataattggaaggagctggtgcattgaaggtaaaaaagccaattggagtatgagggaggggtaagcaattgttacatgagagatttcttcctaaacacggctggcctcctgccttgcttctcactgctgtctgcagggcaaacagtcttttctgctgggagagtgacagtcctttttcttctttcctgatctgggcccattaagttcataaatagtaacagcatggtctctgactctctccctgtcaggccagtcatggccataaccctatgtgattctgcaaggtcttactgtggcacagtgatgggagtgtatcttcactggtacctgggcagacgtgttatctgttcatccccattggcttattcctcttacttcccatttgatcttgggcaagggaaagggtgtggccaaaccccactcacgtcatttttactgtcaaatttaaagcagagatattgggtgtccagtaggccatcagagataacatgtctttatctgtttgtatttttcaaagttttaccattgatgtgttaggtgctgacctggtgttcagctcaggagactgcagatggtgtcattggggtgctgtgacaaggtcttgtgctgctgttactctgctcattcccacccaggctttcaaagagaggggaggctgaggcgggtgtatcgcttgaggccaggacttcaagaccagcctggccaacatggcaaaaccccatctatacaaaaaatgcaaaattatccaggcatggtggcaggtacctgtaatcccagctactcaggaggctgaggtgggagaatcgcttgaacccgggaaacagagattgcagtgagccaagatcgtgccactgcactccagcctgggtgatagaaagagaatgtttaaaaaaaaaaaaaaaaaaagaaagaaagaaaaaaaaggaaagaaagaaagaatgggaagcctagagatatgggtttagataactcaaaccctgtaccttttcaaatcccaaaaattccaagaacctgttacattctaatctgcattgtcacaagcagtgaaaacacagagtcacacagtcgccggagcttaccagagactcacaaactgagtttgctttggaccaagaataagaaagtaaattaaagtagaaagaccttttcggatttgacaccaagcaaaaatcattccccacacggttatgtccattatagctgctgttgatgaagtacctactgtgagtcaggtgcgtgctaaatactcgacattcacatatccactttgtcatcagtgtattaggagatgggggttttttccccgatctacagatggggaaattgaggctgagagctcaaagaggttgctcaagtccaccctggtagtgagtgtcaggcccatgctgccttacttcctttgtagttattcagaagacccatggtttctgaaataccttgagaatttgtgccactgccacctcccactcaggatttgcaaggctaggagaggacaggcagggtcaactcaggggaagaagcctgaaggaaaacggtgatgaatttccaagcccgatgcgagtgaaaatgtttcagaccttcttgcctggctctgctgatgtgtggtcagaagagggtgagctttatgttttccagagctctaaatcatgacaaatggcactgcaacctgattgcctcatttactcttgtcccggcaaaaagattgaacgccacactgctgacacagagaaggaatttagtgttggttgctgaacagtggagctgaaatggacacaaggggtcatttattcccacccttaatgtgatgaggagagcagaacttggtgatgtccagctgacgcactgcaaccacattgtctcttgctgctgtcattattaatgctattaacatcgtcaatatcaagaggtcatttaatattcactagtagtttgaaaaacaagatcacgtgaattatgatgatgcattatatgtcactcagtgattctaggtatctttcatccttacaatgattatttcattggattcttactgtaaggtaaggattatcatccaacctctgccccctaaccatggagaaagcggctcacaggacttgcacccagcgaggcctcaggtcaggctggcctcggccccagccggcctccccacagctctccttgctggcagtgctcaggcacgtgcccctggtctcgggttagtatgccacttggcctcgagtccaggaggagccatcagtgactgtgccgtccccagtccgattgaggaaagtgatgagtgggccacagcctccacacttcacgaatcccatcgcgtctcatgtcctcagtctgcctccctccaggcctttgcaggaggcctctccaccctcagacctctacaagtcccagaggacccctatatcctcccccctgcatctctccttctcttcctctccctgcttccctttcatccttgagcagatttggcattgagttgttagctcctcatcggctgatgagggcagcattgtttcctgtgctctgcacactgtttaggtgaatgtttgtgttctcagatggcccctgaaatggcttggctgtgtgtccccacccaaatctcaccttggattataataatccctacatgtcaagggcgggactagtagaggtaattggattatgggggcaattcccccatgctgttcacgtgatagtgagtgagtctcacgagatctgatggttttataagcgtctggcatttcccctgctcgcactcattctctcttctgccaccctgtgaagaggtgccttccgccatgattgtatgtttcctgaggcctccccagccatgtggaactgtgagtcaattatacctcttttcttgataaattacctagtcttgggtatttcttcatagcagcgtgagaacggactaatacagtccctgactcccagaactgccctaagctttgggctcctttgcaagcttccagattaatatattccagcctagtcacatcttttagaggttgcccactctcctcggcttatggccccccttaccccatcctcaagccagcagtggtgagtggagcccttttgtcatgcttctaatctctctgattagggaagttctctgtttttaaggaggcaagtgattagattgtgccccctgggaaaatcacatataatcttctgatattaaggtccagaacctgaattccatgtgcaacagtgtcttttgccaagtaaggtaccatattcacaagtgtgacaccaggggtgcaggtcctgcttgccacaccaccttcacacccaggatggcgtggacagcaggtgcctgttgcagagtggaaggcttggagtagggaatgcggccgggcgctgcttcaggtgctctgtgcttgtaaatctcgatgtaggtcatgcagtcatagccagagccctcagacatggttgctgtttttatcccattctatgatgaagggactgaggcacagagaataagtgacctgccaaagtcacagagctggagggacccaggcactctggtctcagagctcatgttctcacctcctgcaccatcgtgcgctctgcagagaaacacaagtgtaccgggaagtgccagacagcagcctggcacccaggcctttagacatgggaagatgccgaactgcagtggcgtctgccctggtccaaccaccctatgcattttttaggtcatggaaccttgacttttcaaacgttctcatcctctctcttgctactttagtaaaagcttctgtgttttccaggctgggaatgatttcatgtttatgtcactttctgccccctcctcatacagatgcgtaccctaattctgaagtcgtttacgtctggaccaacggctccaccaagtcggtggtggtggcggaagatggctccagactgaaccagtaccacctgatggggcagacggtgggcactgagaacatcagcaccagcacaggtgagggctcggcacgcgctgtgctgccaggcgcactcaggacaccacacccttggagagcttgctgctcccagcacctctctgcaggggccacgtgggaggccgcacagcagcctcccacacaacctgtcctggccagctgtgctctccatgggccacagctgtatgagagctggccaaaggaatcctcccagcctgcccctccctgcagctgcacacagaggcaccagctgtggccgggggttgcggtggacctgcttatataacacccccctaagcaggaaaggtagacagcttcctacaaataccccagttacctgcttccccacctcctgctttaaacagtgcagagatttccctggagttgaaattgggaaagcacaaccaggcagcctacagagaagagctgaaatgtacaagaaggaagcagatgctctcaatgccaagtgccctgggctggcctgagccctgcagggccaatatagccccatcccagcctggcttcccttgacacaaagttggtggggaaaccaaagaaacaggatgcattgcatctccagagcctgcaagttatgtggccagatgtctccaggacaggaaggcccagccatagaggtcaaggtcaccaggggtgctgtgagcaagggaggggattttgagctccaaagagcctctgcagccttggagaaaagcctaaagggagggagggggccctgatggcagaaagagctctaagccccagaggatattttcaggggaacgctctgtcagcatagctgattgtcagcacccctaccgttgcagctggccgagcacacaggccatttagtgcatagcctgttctgcatgcacacacacgcagtcagcaccctgttgacccatgggcctgcgcgctgggcatccctgggggatatgagagtctgggaggatggcttcaccatttggttaccatgctaaagggaaaggcagagggaaccggccggttttatgcaaaccagtggaaagtagtgcagcaggagtttggtgtaagcaattgcgatgctgagggaggatgctccagtttggagctgtttcatgtagttctttaaatattaataactgggatttctactcctatttgcattctacaatcttttaaaacaaacactaccaaattttcctaccctcaactcaaaaataaaacaaaatgaaaagaactaccgccaaaataattagaagtaggagagtaatttcaagtcctactgtaaaacagaatgccatttcacttcttcaagtgctaaggagacaaagacttggatcaccagtagagatccagtccttgctaccaacataccctctgcctcttctttgcccatttctcggctctgctccctcacctgctgcggactatggggaaagtgcacctttgcactgcgggcctgtccaggcactgctgagattgttggctcctcttgtgttagagggcagatttttgccacatgtgattgctatggttccttcgtctccgacatatgccatgttttgagttggcactcagtgaagcatccacagtggcccttgctgagctgtgggcttccatcccaacagtaagcactgcaactgtgctgtcagactctaatgtcccaacacgcagtccctgcagcagcagaccactactctgacagacagaccagggcctgcgctgatggagcccccaaagcctgttctccccacgttcacagtgcatcccagctctctggccataccatccactcctcgcaattcagccaaagttttttgaattgctcttcctccacccctcaaagaacacttcccatctccccaaggtgaggcaaatccaggtagcaagaagactggcccagcgggcctcacactccctgaccacagctcccgacctcagctccttaccagttcaccgtgaggacggcatcattctcagcaatgaatgggaggtctcctcgtgcctcccacacagccaggcaaatccagagaaggcactggggcatcgccaatgaaatgcccccgatttcaaagaacaggcgacacctctctggtaggtggcagaagggttgagctgccaggacccagagcctcctgagctgctgcatctcactctgcacctgcgacacagccagcacagggcctgctgctggtgggagtggtcgtctcacctccctggagcctctagactggaaacaggaaggactctgtccaccctctgcagggctctgtgaaatcctgagttacatctggggaggctaaatcctgaaatcctaattgcagaagcaggcgagggagtggggggagagaggcacagattgtgactggagattagtaaaacacacaaatctgattttccccaggaagagcatccgtcatcaaaggctcttcagagaccaggggtcataagacttacttataaaatgaccgataacaaattcatgcatcctcctgtgtcctctccttaacccagatcatacaaatgaatgcttgtccaaaccgacaggggagtggaagggaggctcctggtgaactccttggatgcagcaagcagagactctaggggactgatgtgcagtcatttgcttatttgcaggcgaatacacaatcatgacagctcacttccacctgaaaaggaagattggctactttgtcatccagacctaccttccctgcataatgaccgtgatcttatcacaggtgtccttttggctgaaccgggaatcagtcccagccaggacagtttttggtgagtgtccccaagccaggcctggacactggtgttttgtgactgaccctaaccacccggaagcaacagcaacaacctccacgaaacttctagtgctgcctctttgttgtgtgacctggaaaagaaattgacccactaattaagaatttaatgttaaggattagagtttaggatttctctccaaagaagggtttaaggaatatcacatggtctatttgatagttatttacttgttgaaaagcctttttgtgtggtttgacattgccagcatgtatctgttttatgtgagattttgctatgcaggttgagcattccttatcccaaatgcttgggaccggaagtgtttcagatatcagattttttttaaattttggaagaattgcatgataccagttgagcatccctaatctgaaaatccgaaatgagctccacggagcattttctttgagcattacgtcggtgcccaaaaagttttggattctgtagcgtttcaggttttggatttttaaaataaggatactcagtctgtagaatttttggttctcaccaagtatgactttgtaagttaggcagttttctttgaaatgtgcctgccactttaaaattaaccaccaaataacaatcaatgagatacaatagtaataaattaaatatatatacctggtaagaatctagagcagcatcattttacatccctaagacataaactaaattgggagagctctaactcaggaggtacctcggcccagcaggcacagttgagcgtctgagtcttaattacctcgaagctcagcttcctcagattcaggaagatactaaaggcagttttgccagtcagtcgtgatcctggatgctcacatctttgtaaactgtaaagtacgattcacacatcagcatttgctattgcagtttcctttccaaagcaggaaaatattagcgtgcattttatcttaatgctcccc

SEQ ID NO: 214 - DNA, 86109 bp, Homo sapiens
  source 1..86109: mol_type = genomic DNA
ccacgtgcagaatggagcctcagtgactgtgggtagcactcaggccagtggccggctgggaagatggtgcatcctgggcctttcacgtgtgggtgtccgggtggcgccgtgcgtgaccctgtgcagccgtgtctgcgtgtgcgcaggtgtccgggtggcgccatgcgtgaccctgtgcagccgtctgcatgtgcgcaggtgtccgggtaacgccgtgcgtgaccctgtgcagccatgtctgcgtgtgcgcaggtgtctgggtggcaccgtgtgtgaccttgtgtagccgtctgcgtgtgcgcacggcttgtacatgcctgtgcacctgcgtgtctccatgctgagctgaatggttggaagaggagaaattctggcggtagcatggccaggtgggggccacagactcccttctgagctgggtcagcctggatgggggttttcctgtcctgcaacccagaccccaccgtcctggcctccattctatgcactccatctcagcctaccccggaccagtgacctgctgcactccacaccttcctccatcctccgcagtctcggcctagcctggaccggccacccgctgctctccacacataaccagaggctcaggcccctgacggaggaagggtgtgcagccagccagagggaggtggactcacttgtccaggcagggtggctgggtttgccacaggccggggagaagcgacccaagctttcagagttaagggtctggggcggggtctgggggattagtttggagcttgggtgtgacgtgggcggcagcaggagaggagggggccgcacagcacagggctgaggctggagagcctagagggagcgtggcccgagctgcccccagagcaggagcatctgagttggggtggccagacccggagccggaatccagacgaccttgatgtgaaaatctcagcacctatttagcttctcattattttttaaaagagctaaaaatagtggcgggtgcatagcaaacgtgcagtcattattctctgaaaacaggaagagcctggcggtgagttcagggctatgattcagggcctcctcgagtctgctgtggggtgggggctcaccatggtcaccttctccttccaggggcccctggtcctccaccagcccgacagcccggaggccaccttggccctgcggggatggcacaggggcagtgtggagcccacccttgctcctaggtccagggcccaggggcaggggccaagtggagaggagagaggagtcccggggccgaggggaggaagggggtctggggactgcaggggcccccgcccttggccttgccctggctgggctctatggccccctgaagagctgcccagagccgctgcagccccgggacccgcttctcctctccactcggcccctgcaacaatccaaccacggcaaggttgctgaggaagcacagccttgtgccccagctggtgaacggcacctgggcgagtggatccacactggagacacagcagtcatcggaaaatagtttaattctgtacagacaaccacgggactgattacaaagtgcggtgcaaacaccagggcccatgagcgccagcagcgtggcccaccacgtgccggggctccagaggccacgcccgaaacaccaaataaatcacagacgtgacaattgcgggaggagcatgaatcagctgttccttcgggaggagaaaaaggaaacaacaatcagaggctttggaatgctttctcttcatgtgcctggaacgctgggcgggcggtgacccggggctcggagccccaccctggccacacctgctgtcgcccacggggtcctcacggtggggacccaggtcccacgacggctcccaacctgtggagctgtgtgcgcagccaccaccactgcggcctcagaagaggggccgggagccctggttctcaaactccgaccaggcgtcattcagctccatgaagatcatcttggcgtgctgctcgtacggctgccccgcagcctatgggtgacaggcggtgtaagcgcctcttataagcatgcgggggcgggcggggcaggaccccccccccgccccgcccctgaaggcctcaagcggccgcctggcagctctgctcaccttgtcggggtgcacagccagcaccgcgcggcgatagtgcttcttcacttgctccggagccaccaggtcggccatgcccacgggcgtccagcggctctccccgtcccacagcactgtgtgcagcgtggacagcagggcccggatgttccgctccttgccctcaatccagtccaggagctgcgggagacacggagcttgccgagccctgggcacctgcctgccctcctcctctgcaccgcggaaactgaggcacgacgctgaggaagtgcctggtcacgtggggtgggctcagcccggctcacagacactgtcccactgcacgccctgccctcaactatatagagcccactccggacgacacagggccaggtggtcttcatgtttcagggcctggggccagagggaccctcgtctcagccagatgttcaccgaggacacaaaccctggttctggtggtgcaaccccttggcccatcccaggccccagactccgagggagaaggggatggtccctggtgcctgtgaaaggaccccaaggtcacaggcgcatgtggcctgcagagctgggcatcggccaagccacagagcagggcgtgtctcagggccggcacagtgacagcctgaccgctgcatcctcaccccccagtgagcgtcctgggttgggaggctcagtacccagagcagcccccaagagacgcctgccctcaacagtctctgcaaacaccccggggcactcactcctgtaacgcccgcccaccccacccccaccagcgctgagccatctgggcacgtggggagcagcacagcctggggcctgactctgccctgcccccctggcctcaggccaccctgtccttgagggctgccaggcccatcggcagtgacaggtccctgtctggagacgccggctccatgtggtacagcagatgctccaggggtgaaaggttgctgtctggagacgccggctccataaggcacagcagatgctccaggggccatgggttgaggcctctgggctcccaggaagagctgcccacccacccaccttcagcttgagtgggtccgtgtctttagccaggtcctgcttcctcatctctgcaatggtctttggccctttcttgtcagacctggaggagaagccttgattggacaacagatcttcaaagtcgttctcagagacttttggcttttgagctagaaaagaacagaaacttttttttgtttgagacagggtctccactctgtcacccaggccagagtgcaatggcgtgatctcagctctctgcagcctttgcctcccggcctcaagcgatcctcttgcctcagcctcccaagtagctgggaccacaggcatgcgccaccatgcctggctaatttttacattttttgtagagaggaggtatcactgttgcccaagctggtcttgaactcctgggctccagcgatctgtccgcctcagcctcccaaagtgctgggattataggcgtgagccacaaagcccagttaagaacagaaactttctgcagagacacacaggcccaattccacctgctgcccccgggaacagggctaccatcctgatgcctccagagtaaagaagagggaagacaagacagggttgcaaaggccatttgttaaaaacaggtcaagaaggtgtcactggaacaagagggacccagaggcctgacccagagagagaccagtgaacacacatcggaaaccgcgtcgttctctgagtggcttggccgtgcctgtcccaggactgggctctgagatgaagaaaacaacataggttctacctttagccaattcagggaggtctctgcaaactccacagcaacagagagtgggggactcaccaaagctgggtgcgcggaccccccgctcctcccgcgccccgatcacactgaagttcgaggcatagttaggccttggctgtgtgcaggctttggggggcggcttggcctgagggggccatgaggcgccctgggctggcggccgacttgtctgccaggagctgctgcctttgggcgtggtggccgttttgggaatgaagcccccaggagggaatccagctggtgagcctgtggagatggagatcggaaactcggcatctggttgtccatgaggggcaactactgtttctataacgcagagcaccacgtatattggaaaacatgcgcttgcaaaatagaacaccgatcactcgaggccgtccagaggtgccggctccacccacacgtgtgaaggtctccaggggctggagcacaggccaggtgctggggcgacgggaacactctggatggagggcagacaccaggacagggcagctgtggaggcagcaccccacccccaggagccaaggcagacccagggcttgtccacgggggttggggcagtgtccccacgtcacccccaggagccaaggcagacccggggcttgtccacgggggttggggcagtgtccccacgtctgtagcgtcctagagggccaccaccatctgtcacgtggccactgcctctcgcagcacatcaaatcagggctgatcccgtaactttttttttttgagacggaatctcgctctgtcacccaggctggagtgcagtggtgtgatctcagctcacttcaagctccacctcccggattctcaccattctcctgcctcagcctcccaagtagctgggactacaggcgcccaccaccacgcacggttaattttttttgtattttttagtagaggtgggatttcaccatgttagccaggatggtctccatctcctgacctcgtgatctgcccacctcggcctcccaaagtgctgggattacaggcgtgagccaccgtgcctggcccgatcctttaactttttattttggaataatcagaatagcaggaagctgtaaataccctgagcacctgcgcccagcatcccccagggagggcgtctctcataacctcagagaagcactgagcccgggcagccgcgccacctacagatgcaccagacgtggccagctggactcgtgtgtgtgagtgcggggccgcgccactgaccgcaccacggattcctctcagcaccacagcaatcacgacctgaatgcttcactacagttctgtcatctttttttttttttggagatggtctcactatggctggtctcaaactcctaggcttaagagacccgctggcctcacctcccacagggctgggatggtaggtgtgagccaccatgcccagactgtcatcttagttatgttctagaaggggaccaacagctgcagcctctggactggcactcttcactagggctcggggcatccgccactccccctccctgccaagggccatctcgtggtgtgcagaccacctattgaaccgttcacctgtaggacacctgggttgatgccactgtttggctacaacagacacgtctctgaacgcctgttacggacttgtgtgtgaatgagagtttccgtttctctgggataaatgtcccacggtagctcagtagctgtgtgtttagcttcgtaggaaaccgaccacctgttctccagagcggccctgccacttgtcactccctgggaatgcctgagagacacggctcaaccctggcaatgcatgagacacagctcgcccccggggcaatgcgcgagacacgcggctcgtccccccggcaaggcgtgaggcacgcggctcgtcccccggcaagtccccccggcaaggcatgaggcacgcggctcgccccccgggcaatgcgtgagacacacgctccagcctcctccgtgttcgggcctcctccgcgctccggcctcctccgcgccagcattcggtgatgctgggtgtctcagcctgtgcttcctggccatcggatgtcaatgtgctggaggtctcttcatgtctcttgcccattttctttttttttttttgagacagagtcttgctctgtcgcccaggctggagtgcagtggcaagatctcggctgacgcaacctccgcctcccgggttccagcgattctcctgcctcaacctcccgagtagctgggattacaggcctgtgccaccacgtccagctaatttttgtatttttagtagagacagggtttctccatgttggtcaggctggtcgcgaactcccgacctcaggtgatccgcctgcctcagcctcccaaagtgctgggattacaggcatgagccaccatgcccggccgtctctcgcccattttctttcttttttttttttttttaattgatcattcttgggtgtttctcgcagagggggatttggcagggtcacaggacaatagtggagggaaggtcagcagataaacaagtgaacaaaggtctctggttttcgtaggcagaggaccctgcgctctcgcccattttctaactggattgctttcagtttgtttttgactgtatttttatattctgtagatgagtcctttgtcaaataggtggtttggaaatatcttctcccagtccgcagctcagatgctcagagctctgaagttgggtccacctgtcctcttatgggtgtggtttgggtggcgagtctacgaactctgcccagccccaggccacaaaggttttcacctaaaggccctgcattctgatgagctgttctgtagaacgagggcttagggctttgcctaccgctgcccaggtgctccagaccatctgatgaacgggttttctgcctctgtcaaagctccgctggtctctcttgtgtggcctgagtcctctcttctctccacagacgcgtctgtctgccatcgccgcaatgttgatttgtggcttcagagtaagcctcaaagccaggaacagtgacttctcccatttcatttttccattacaaaaatattccaggcatggctgggtgcggtggctcacgcctgtaatcccagcactttgggaggccgaggcgggcggatcacgaggtcaggagatcaagaccatcctgactaacacggtgaaaccccatctctactaaaaatacaaaaaattagctgggcgtggtggcgggtgcctgtagtcccagctactcaggaggctgaggcaggagaatggcgtgaacccggtaagggaacttgcagtgagccgagatcaggccactgcactccagcctgggcgacagagcgaggctccatctcaaaaaaataaactattccaggcatctagtccatctgtctttcaaatacactgtacagtaagctcatttgtatctaggaaaatccctgctgaggcgttggtaggaactgcgttaggctacagatgcacacaggagaacggccaccttactcgggagcctccaggccgtgagtgcagcgtccgtcccttcactcgcatctcctctggtctctttcgccacggttggttttgtagtcccaccacacaagccctagacatgtctggtcagatttatacctaaatgtttattttttctaaaaaaaaaaaaggtgattgtaaatggtactgttttaaatgttggcttccttatataattgcaagtaaacagaaataggacagatttttgtgtgttgacctggtatcctgcgaccttactgaactcatagttctaaaagatctttgtagattgcttcagagtccctgcgcagacaatcgtgtcatctgcagacaggagtaattttatttctccctttgtagtgcgtgtaactttgatctccttttcttgccaaatggcagcagctgggacttccgacaagtacaagtggagaaaagacactcctgccctgttcctgattttaggaggatggttaaaaatgatattggcttggccaggcagggtggctcatacctgtaatcccagcactttgggaggtcacttgagatcaggagtttgagaccagcctggccaacatggtgaaaccatgtctctactaaaaatacaaaaattagctgggcatggtggtgcatgcctgtaatcccagctactcaggaggctgaggcgggagaattgcttgaaactgggaggtggaggttgcagtgagccaagattatgccactgcactccagccagggcaacagagcaagactcttgtctcaaaacaaacaaacaaaaaaaagatgttggctgcaggtttctggagacagggtcttgctctgctgcccagactggagtgcagtgatgcaataatagctcaggccagccttgacctcctgggctcaagcgatccaagtgatcttcccacctcagcttgctgagtagctgggaccacacctgctcaccacagctgctcaccacacctgctcaccaccacagctgctcacacctgctcaccacagctgctcacacctgctcaccacagctgctcaccaccacagctgctcacacctgctcaccacagctgctcacaactgctcacacctcaccacagctgctcacccctgctcaccacagctgctcacacctgctcaccacagctgctcacacctgctcacacctgctcaccacagctgctcaccacagctgctcacacctgctcaccaccacagctgctcaccacagctgctcacacctgctcaccacagctgctcactacagctgctcaccacagctgctcaccaccacagctgctcacacctactcaccaccacagctgctcacacctgctcaccaccacagctgctcacacctgctcaccaccacagctgctcaccacagctgctcaccaccacaggtgctcacagctgctcaccacaggtgctcacacctgctcaccacagctgctcacacctgctcaccatagctcaccacagctgctcacacctgctcaccacagctgcccacatttgctcaccaccacagctgctcaccacagctgctcaccaccacagctggctaattcttacaggggtctcactatattgctcaagctggtttcaaactcctgggttcaggaaatcctcccacgttggcctcccagagcactggggttacggtgtgagccactccgcctggcctggctgtgggtctctagacatgcttgttaccaagctgacgacgttctgctcatgactggctgacagtgctgccataaaaggtgctgactttctgaattttgttaaatgccttttctgccttgttgatgtgaccacatgactcttcagccagttaatatgatatcagattagtgcaaaagtaattacggtttttgtgattactttcaatggcaaaaccacaattactttcgcagcaacctaaatagattttgttaacaattctgaaatgtcagccttggattcctggaataaatcttacttgatcttggtgtagaattctctttatataccgataaatcctatttgctgaagtttggttgaggatctgtgtgtatattcatggggaatatagtcccagtttccctttccggtgctgtttctgtctgattttggtatcagggtgatagtatgagcttcgtaaaatcaattagaaagtgctccgtctctcctgcttcctgtgagagggtggaattggcattctctttcaacattcggtgaaattctccagtggcccaggtgggtccgcaggtttcctttttgggaagtttttaattatgaatttattttctttgtatttatagaatttttcaaaggatctacttgatattgggtaagttgtggcaggaactggttttgaggaatttatcaatttcacgtaagtcgtcaagcatactgcacagaggcgcctgcacccgtgaccctcgtagagcctgcggggtctgcagtggtgcctcctgcaccatcccccatatcgatgacctgggtcactcttcccagcagccccgggagaggtctgtgggcttcagaactggcctctgtccctgtgttccactgcactgcccgtggctcctcattctttctttccttccgcttgctgtaggcttatttcgctccctttttttccccccaaatgtcttgtgcagagagctcaggttactgctggggcattccagcttttccacagcaagcccccacggctgcgggtgtctccacactgcctgatggggccctgggctttcctaggctgcacttgcatcttcactcagctccacgcatcgtctcccttgagacctcctctctggcccaggtgtcgtttgaaagtgtgctgttttgttcccaagtgtgaagattcttccgttctatttcattgtggtcagacggcatgctgcagaatcctagttctctgaggacagggcctgtgtggaggaggctcccacggtgcatggaaaggtccgtgcctgcagctggtgggccctgctggctggcgcctctgcccttctacatccttgcagccttcagtacagctgctccgtcatgtgtcgggacagcagtgctgacgtcgccagctatgatttgggtttgtctattttttccttcagttgtatcggctttgctcttccagaattgctgtcttcctagaaggcaggatggtttcaggccgcccaccgagccagcaggcggagggctggggctgtgtctgggacacaaacggcggggatccctgggagtccactccttctgccccagtgccggctgcccagggcagtcaaggcacacgcaggtctcctcccgagggcacggccctcgcaaccccaccgtgctctcagacaacacaagacagaggccacaaagggaaataaaatacaaaaccacaccgacagaaacgctcatggatgtcctcaagacatagtaaatccccaaaaccacctgaaacataaaaagaacattcaaagacgaaaaaactcttgggacttcatgacagaacagaaggcacttcagatgtgagctcgcaagagcagagtgaggactcaaagccagcccgggagagagtgaggactcgaagccagccctagagatccaacgccgacacctgctcacaggaatttgaggcactcagggaaggacaggagaaacgatgaggagacgggaaatgctcccggagctgagcaggagcagatgccatagcctggggctgcatgctggagcgtccgggggtcaccggcaccaacaagcatcccaaggtggagccacttcccacccagcattccacccgacggccaggcaagtgcaagggaggccccttcagatgatcatccccccgccgccgacgcttcttctgagaagccacagggaccccagggggatgcatcttgggagtgaacccagagacccaggggcatcaggtcagcccaaggagacttgaagccacagcgcccggggccgggcctgaggcagacgtgggaccggagactcagaccacagcgcccgggccgggcctgaggcagacgcaggactggagagggtgggctcggttcttgtggccgacagctagcacgctccgagcacagcctcggggactgagcagagcccagctacaccccacttccatgcagagaccccgcctccccgatggcccccatggccctgaggacaggatggatcacgcaccacaatgccggtgggggctggcagcagtgccagtgtcagcaactcccggttttagcttgccagttggcagtcgcctggaacaggtgcagacacgctgtccccttgggctcactgtgctctgggcttgggggtcttagtgaacagaggcaaagacttcactttgggcagctcagagtcagatagacgagaataaacctcctacaaggaaacagcttccacacccccaaagtgccctccacgttaccttggaggccggagctgaggtcgccaaggtcagcaaatgggtccgggttctgagacttggtccagctggcctgagagccacaaggggccggctgacctccaggagagaagagggggcctggagaaggggcacagggcattagaacaagcaccatctgaagcgaaacacatcctcctgggacctccgatggcgcctccttacgacatgacagcctcactcctgcctgagagctggcacctgcatggcttgcgtgcacgagaccagccaggacagaggtgtgtgtggcggacgctgcctccatgccccatgctgctcctcagggaaaacagcttcacagctcacacccagaaccaaaccatgctcatatcattatgattatgattctgcagtaccactttctggaatctatctaaaatgtgaatgctcttcaggatactctttataatagcataaatttgagaatatcctaagtataaaatcataaaatacaggctgggcaacatagaaataccctgtctctacaaaaaataaaaaaatcatccaggcacggtggttcatgcatgtggtcccagctacccaggggggctgcggtgggaggatcgctccagcccaggggttgacggccccagctacccaggggggctgcggtgggaggatcgctccagcccaggggttgacggctgcagtgagccaaaatgatgccactgcactcagccccagtgacagaatgacactctgtctcaaaaaaaaaaaaaaccgtggtagagctacttgatagagtgccatgcagtcattaaaaccaggctcttcatgtataaagagccctcgtggatctatttgaggaaaaagatgaattcctgaggccaaaaaataagcaaagaacatgaaatgattctcaaaagaaatacacgtaaccaaaaccactcaaactaagagtcaacctcattcataagaaagaaatcaaactggcgagacaccttcacagtgatcatccaaccaggagacaaaccggagatggcagttgcccctgggcaaagacgtcctgaagcgcacttgaggggacgggcacccaggccctggcgcacctcgcactgtgcacacggggagaagggcacccaggccctggcgcacctcgcactgtgcactcgaggggacgggcacccaggccctggcgcacctcgcactgtgcactcgaggggacgggcacccaggccctggcacatcgtgcactgtgcctcccggagctctgcagacagtgtgtgttccacctgctgagggctgtgtcaactctgtccggcaccattttccgcacgccatgtgcactctgtgtccctgtgccccattttgggaactgtaatgatatttcaaacttcttcatgattgcatctgctttggtgatgtgtgtcccatgagttgatgctgctgctctaattgttttggggtgccatggactgtgcccatagaagacggcgagcttaactgacaacacgctgtggctgctccacagaccagccactccccgtctcgctccttctcaagcctccctattccccgagacacaactttactgaaatcagtccaattcagaacctacaacggcctataagcgttcaggtgaacacaagagttgcaagtgtctcacttgaaatcaaaagctaggaacaactgagcttagtgagcaaggcacgtcaaaagcagaggaaggccgggtgcagcagctcatgcctgtgttcccagcacagtgggcagctgaggaaggagggtgcttgagcccaggagttcaaggtcggcctggacaacacggaccccatctctacaaaaaataaatttaaaaaattagatgggcatggtgatgagtgcctgtagtcccagctacccaggaggctgaggtgggaggatcccttgagctcaggaggttgaggctgcagtgagccatgatcgtgccactgcactccagccacaacaagagcaagaccctgtctctaaaaaaaagaaagctgagataagctacaagctaggcctcttgcaccagcaagccaaattgtgaatgcaaaggaaaagttcctgaaggaaatgagaatgccactccagtgaacacacgaatgatacgaacacaaaccagccctattgctgatacagaggaagttcgggtgatctggagagaaggtcggaccagccccactgcccatacagaggaagttcgggtgatctggagagaaggtcaaactagccacaacatcctcctaagccaaagcctaatccatagcaaggtctcaactctttcaattctatgaaggtggaaagaggtgaagacgctgcagaagaaaagtgaagccagcaggggctgaggctgaaggaaagatgccgtctctgcaacgtacaagtgcaaggtgaagcagcaagcgctgacggggaagctgcagtaagtcatctgctaagatgcagctgagaccactgatgaagaggctgcacccgccagactctccatgcagacgagacggcctaagtcatccgctaagatccagctgagaccactgacgaaggggctgcacccgccagactctccatgcagatatgagacggcctaagtcatccgctaagatccggctgagatcactgatgaaggggctgcacccgccagactctccatgcagatataagacggcctaagtcatccgctaagatccggctgagaccactgatgaagcggctgcacccgccagactctccatgcagatataagacggcctaagtcatctgctaagatccggctgagatcactgatgatctcacgcctgtaatcccagcactttgggaggctgaggcgggcggatcacgaggtcaggagatcgagaccatcctggctaacacagtgaaaccccgtctctaggggtttcaaaaaattagccgggcgtggtggcaggcgcctgtagtcccagctacttgggaggctgaggcaggagaatggtgtcaacccgggaggcggagcttgcagtgagccaagatcacaccactgcactccagcctgggcgacaaagagagactctgtctcaaaaaaaaaaaaaaggattctaaattgactcggcttgtgccatagaaatggcacagcaaagcctggatggcagccatctgtgtacagcatggtttatggaatattttaagtccactgttgagatctacagctcagaaaaaagattcctttcaaaatatgactgttcgctgacaatacggacaatgcagctggtcacccaaaagctctgacagagacgtacgcagacagtcacgctgctttcatgcctgctaacacaacatctgttctgcagcccttggatcaaggagtcgtgtcgacttccaagtctccctatttaagaaacacatttctaaggctatagcggccagattcctctgatggatctgggtaaagttcactgacaaccttctggaaaggattcaccattctagatgccattaagaacattcacgattcacaggaagaggttaaaacagcaacatgaacaagagtttgggagaagctgatctcaaccctcaaggatgactttgaggagttgaagacttcagtgcaggaagtctctgcagatgtggtggaaacagcaagagaactcgaattagaagtggagcctgcagatgggaccgaattactgcaatctcaggatgaaacctgaatggatgaggagttgcttcttacggatgagcaaagaaagtagtttactgagatggaatcgagtcctggtgaagatgctgtgaacactgaaatgaggccaagggtttagaatattccttaaacttagttgacacagcagtggcaggtttgggaggacggaagaagctccatgtgggtaaacgctatccaagagcactgcgtgccatagggaaccttttgtgaaagggagagacaatcacgtggcaaacttcatcgtcttattttcagaaatggccacagccaccccagccttcaggaatcagcaccctgatcagtcagcagccatccacattgaggcaagacccccaccagcaagatcaggatcgttagcattttttagcaatgaagtatttctaaatcaaggtaactatatttattttttagacataatgctattgcacgcttaacagactatggccaggccgtggtggctcacgcctgtaatcccagcactttgggaggccgaggcgggtggatcacaaggtcaggagttcgagaccagcccgaccaacatagtgaaacctcatctctactaaaaatacaaaaattagttgggcgtggtggcaggcacctgtaatcccagctactcaggaggctgaggcaggagaatcacttgaacccaggacgtggaggatgcagtgagccgagattgcaccactgcgctccacagcctgtgcaacagaacaagactccatctcccaaagaaacaaacaaaaaaccagactacagtataatgtaaatataacttttagctgggtgcagtggctcacgcctgtaatcccagcaccctgagaggctgaggtgcatgcatcgcctaagcccgggagttctagaccagcctgagcaacatggcaaaactttgtctccacaaaaaaattttaaaacttagctgggcatggtggcacatgcctgtagtcccagttactcaggaggctggggtgggaggatcgcttgagcccaggaggtcaatgctgaagtgagtagagattgcgccactatgctccagcctgggtgacagagcaagaccctgtctcaaaaacaaaaacaaaaacaaaaccccacacaaaaaacccccttaactcttatgcttactgggaaaacaaaatctgactggctttctaggggtgttcgctttgactgtggtctggaagcaaacccgcgacatcgctgaggccggcccaagacgcagctgcagcatacgcatccgcgctaccagacgccgcgggagggccggctccagggtgacgggaaggacagacgctcacagacacgactgctgtacgtgacccccttcctgacagggcacggggcgtcgcaaacacgactgctgtacatgacccccttcctgacagggcatggggcatcggccgcaacaccgagacaagacccatggggtcggcctcagtcacaaaccccttcaggagggaagagccacggggtgctacaggcagagccagcacgtggtccacagagtgtggggcatgaaatcgcatcacagacgcagacgccctgccgggtgggaggaggacccttcgggggtgctgctgatgctcaggagccactgcagctctgggacaccaagtctgtgtccccacgtaccccaggcacaccgggtgagtgaggccgctgcagtcataccacagccttgtgtgcggagcccgcaccaccaagcacgccccagcccttccttccttctctgcgcagagagggccctgttacaggtacgtgtgaaatagagacgggccacagcagctgcacgtctgggagccctgtccttggtgggtggtggccataccttctgtggctggcgtgggggccactgccgatgctgcagtctcggtccaggcagcccatcctcccagcaggtctgggttgctggacgaggctgtcatcttgctgggctctcctggcagatcccctgggaagaaggaaccagaagagagcacagtttggtgtctcagcagcaggcaaatgtggcggggcgccaggctgtgctcagggccctaggagcggacacctcttgcacccaggctgagctgaggctgggctgacggcctctctcttcctgaagggtcctgaggatgcatcccatcacacagaactgagcgagtggacgtaggggcaccagcaggcggagcagctcgcaggccaggctgagaacaagcatctgcgcattcccatccaaaagggtttgtcaggaccccactttctgccgccatccccacagcctgcgttcccgcctctcctaaaacccaccagagcccgaggtggctccacctggctgagctgccttcggcagacagagggcccagcaggtcctgtctgccctggctctggccacgcagcacacctctggcggcacccgccccaacgctgcaaggctgcactccacacacccgcccacaagccatcctgcaatggtcaccatcatcaccccagagtacgccgtggaccacgctgctgcctcctcaggagagagaacccaggctccttcccctaggaccacactggaggggcgcgcagccctctcccagggcctggccccaccggcgtctgtctaaacaagccatgctgtgccccggcgcctgacctcctccccatggatacggtgccccacggcccctgctacacccagaccaggtcagcttcccggaccctgggtcccccagctgcctccctctgacctctggtccctacacaagctctgggtgcaggtggccttctctgctaacagctgcaaggcctgggcctgaggaggcctggagaaacacctgttgccagtcacagacgactgaggcactgcagggccccacaacctgttccaggtttggggatggtttggggagacagagcagggagcagtctgtcctgacctctgggacgtcctgcaggatgcttgggccgcaaggagcgcacccggaggccacacagtccagccccaccactgcctgagacccacagctctgtttcccaccagaggctgcggtcctgagggaggcggccatggagagctggctgccaggcgagaggcacttacccaggtgcaggaagtcggcgctgcaggatgggggcggagcactgtgggcagacgggaaggatggtgggacggtcacagagtccgaattgagaaattcgccgaagagatcaggattggagcagggctgggagttgttgcctgaagacggcagaagcgggccaaaggggtcagctgtggggacaggcgggcatggggaggactcagcccggctgcctgaagacaaaggagcccagctctggagtcaggcctgcccaagaggccactccagctgggcagcccagaccccacggctgccctcgcaggggcactgaggcagtcagcccaggggctccccgtgccccacgcctcaggatgactttcccagggacacagcaacactgctgagatggagaagccagtagctcccggcccgtgagctcaggtgggcagcacagaaccctgacatgaccccgaggctgctcctgggggaggtgggggaagggcacgttcccttcctgcaagcaccttcgaaacacgcccatgcagtgagaatgactcagcctcatcactcatctactgtgaagccactcgccttcagaacagaaacacgtaccagcggcagggggccctcctcttggggtgctctgcacgctcaggggaggggccgggcttgccaggagcagcgggtcctcgctgagcagatcctccgggggcccctgggaggcggcctcagggggcccaaggaggcagctgagcaggtcggtgttgctggagggggccttgcaggcctgcgggggtacagctggccctgcgcccacctcggagtgcaggcccaggaggtcgaccccgtcttcctgtggcacaggctctggcagcacagccggtgtctccacctcaaaaaccaagtcctgctgcaccagccctgctgccaggccggggggctctgggtcggccctgggttcctggccctcgctggagatcggggatcccccttcatctgacacctcactctcgtctctgtcctccatcagggcagactcgctctccttggaagaggcattttctgcaccagtctctgcctccttctcttctgcgaaaaggaaacaaaaccacaggctagtgagaccacacggccagcaccagggtccccacggcgcgtcccttcagggcctcctcggcccagggccttggtgaacacacgtggccagcaccagggtccccacggcgcgtcccttcagggcctcctcggcccagggccttggtgaacacacgtggccagcaccagggtccccatggcatggcccctcggcacctcctcggcccagggccttggcaagtgctgcaggaacaccagggtccccacggcgcgtcccctcagcccagggccttggcgaacccacatggccagcaccaatgtccccatggcacggcccctcagcgcctccttggcccagggccctggcgagtgctgcagaagcttctgggcgggcggtggggtgttgttcctgaggcgtctccagcacacccacctccagcctctgcctcaagggtctgcctgtggctctctccgcctgggcctctgcggtgcctcaggctgagtcaagtgggggccacatggcagcactagggggtaggaacaccaatcaagggtgctctgggaacaggcggcagaagggacgagcccgatgggaaggccaggggtgctgggacaggaagtggcaggtgcatcccttggggtgtgtctggggtgaggtccagtgatggcgcccaggtgttttcctgaaaagcctcagaggggctgggagcccactgggggtgtgggcaaagagaggtgtgggatccccaggtggtgacagtctgtccctccgcccaggcccttcccctgtacccaggggccccgccagcatggcccatgctgccagcctccccaggcccacagactgggatgaagagcgagggttgttatttcagactttgtgggcatgttctttttttttcacctttaaaaagatatgaaatcattcttagctcgtgagccattaaagaacaggctgacatgccgggtgcacagccccactgaggtgcaactcagctctgccggaggcccgtctcccaagacgcttgccctgccccaggggcacctccagaccaggggcctgccctctgcaagtggccaggtccagggacgctgcctaccctgccagtccagcgtgtgcaggaagcgactggcgtccgcgctgctgcttggcggtgagtcagagtctgtgggttcggcttccggggaccctgccccagcatcatactgagccgtggagccaggctgccggggaagctccggcttccctgcaggagagggagggcgtcagggcactggcactggccagcagcctcggggcaacactgaccccagagctgggaagtgcagccaggcgggcgccagcaccgtggcaggccaggccatcggtaaagcagaccaatgacatgacggggaggggctctctgaacagattcctgctatccactcggatgccactctgggccatgcgtgcacacttgggcacagcacacgcacacatgaacacgcacaaggaacccaccactgaggcatcaaacgccacacatatgcagggtacacatgaatgcacacacacagctgcacggtacacacgaatgcatagagcacacacacaggcgcacagtacacacaaatgcacacacacagatgcagggtacacacgaatgcacacacagcacacacagatgcacagtatacacgaatgcacagacagcacacacatagatgcagggtacacatgaatacacacagcacacacagatgcacagtacacatgaatgcacacacagatgcatggtacacacggatgcacagacagcacacacacagatgcagggtacacatgaatgcacacacagcacacacacagatgcacagtacacatgaatgcacacacagcacacagatgcacagtacacacgaatgcacacacagcacatacacacatgcagggtacacacgaatgcaaagcacacacagatgcacggtacacatgaatgcacacacagcacaaatgcacagtacacaggaatgcacacacagcacacacagatgcatggtacacaggaatgcacacacacagatgcacagtacacacgaatgcacacacagcacatacacacatgcagggtacacatgaatgcacacacacagatgcacagtacacacgaatgcacacacagcacatacacacatgcagggtacacatgaatgcacacacacagatgcacagtacacacgaatgcacacacagcacatacacacatgcagggtacacatgaatgcacacacagcacacacagatgcacagtacacatgaatgcacacagtacacacagatgcacagtacacacgaatgcacacacagcagagatgcatggtacacacaaatgcacacacacaggcacagtacacatgaatgcacacagcacacatagatgcagggtacacatgaatgcacgcacacagatgcacggtacacacacatgcacacactcggatgcacagtacacatgcatgcacacacacaaatggacggtacacacgaacgcacacacagcacataccgatgcatggtacacacgaacgcacacacagcacacacagatgcactgtacacacgaatgcacacagcacacagatacacagtacacatgaatgcacacaccactcgtgcacacacacacacggcacacaccacccacggacacatacacagcacgcacaggtcacacatacagcctctttcagggacgctgaagatgctcagaaagaaaaagcaaacactgcaaaccaagagccgagaacaagcgtggcatgagcagtggacggccctgggcccacctgccagcacttcctgggctgccgtttcgaaactgctcggaagtgaagagcgacaggagcgagggttctgttccacatgctgccagcaggcctgaggctcacagtgagagtggacgtgtgtccagcacacatgacaaaaatctgacccagacacacgcctgggacaaaaccccgcttcgctccaggagcctgggttttcctccctctgcctccgtccctgcccatgggcctcagaaattgcagcctgcgagtccttctctggtgtagctggtggtggtgtccaacatccacgacggagtttccaaaacctcctgcagcccaagctgctcagggcctgggtgcagcagcaggcgtggggcccagccctgccagagctcagccaaaggtgtctctctccacagagacactcaccagaacagggttcacctaattcacctgcgggatcttaccaaacttagacagaatgtcttgctgctcctcccggctggaaaacaggattttggggttcagccccctcatgctcgagttctcccatggtggggcttcccggctcggcctgtccctgggctccacctccacttccaggttcacttgaaataaatccgggtatttttcttgaatgtcacacgcgtccaggtcatacctgcggttacaagtagacaccacttaggaaggccacccaagtagtctgtaagtccttggacattcactaaagaaacgtgcatggaaacaggtggcagctgcaggcagcggggcgagaacaaccagggcagccggccacccccgcctgcggaagctggagccctgtgagctgacccagcagctgtcccaggaacccacagggcaccagcacccccggtcacggccccagaagagcatcatttcactcgctcctcggacgtcacagtggggatgcccgcgactgtgttcaaggcagaggggcaccgggcggggccgccatgtttcctgcaactccaggggaggccacgtgctcagagcagacgggacaacatcccacagctggagactccggcacccaggcaggcagctctgaggtgggaccccagggttccaaggcaggcgctggccctcactacccagcacacacagactgcagccacccggcagctcagagcacgcactctgggatactaaatgtgttttccataaaaatgacgacgtccgccctgacaaaaatccacaactgtcaacagatgcccataaaaccaagacctctagaatccggctgccagggaattgggaacatgattccgggggaaacaaagctgtgttcactgtggggctggggaggcagcccaggctgagctgtggggagcagggcagaggtcagcagggcctgccttggggtgtcggccgtgcgggtggggagcagggcaggggtcagcagggcccaccttggggtgtcggccatgtgggtggggagcaggggcaggggtcagcagggcccgccttggggtgttggccgcacggggaggcaggtgtgacctgacactgaccatttcccagccccacagctctctaaggaattccaggctatttcacacatttcctatgatcatctctgatcccactgtcataaactgcactgataagcctgggctctccagcgggcagcaggctccccatgcctgtcttattttacgccacctaaaatctctacatgttgaatgttatacacctaagaaaataaagaagaaacacaaaagagtggcggccagttcctgggaaacccaggctgccagtgtctgcagggccaggaacacccagagcagagtgggatccgccgagggagggcagggagacgggcccggcggcctgtgtgggtcagagccacggctggttttaactgtcacttctctgagctccacacatgcctgtgatgtgtgaaaggcctctagttcaccccttcctgctcaccctctaaaacatcctctccctgcacgaggggagagcaccctgtgcccgccctgaggggtggccaacctcacgcagagcagcgccccctcaatgcccactcaaggctctgggcggaggtggccacggccgaagccgggactgatgtgcactccagccggggccaacacgagcttccccctgcgcccgagcctctttgcgtgccgctgtctgtcgtcaggggtggcagggactgcacagcggtggcacagctggcgtggagatgtggaggaggcaacgtctgcagaggagcctgcaggcaccagcagagaatccgacggccaccgcagcggaggctcagaccggccacgaccgagggcggagaggcacagtgggaggggcacggagggagggagtgtgcagggagccaggtcggccagacgggcttgggtcctgggacagaccgaacttgggcagccccagagggagtgccgctcatgcccagcctccctcccccagctgccccttgagatggccctgggcactgggcctgcaggctcggctcacccagcctggcgctgagggcacaatgaggtctgtgagcagggctggccactcccgagagccctggactgcagaggacactgcccgcaggctcctgccagactagctccaacagggcagagcggactcctgacaggctcagctgttacatctgtgccatggctgcaaccctgtgctcctctcgcccaggcacggcgcaggctcaccacgcagggaacacgcctctcgcccaggcacggcgcaggctcaccacgcagggaacacgcctctcgcccaggcacggcgcaggctcaccacgcagggaacacgcctctcgcccacagcgcagccttgatctcgcaggttcaagcaatcctcctgcctcccaaagtgttggaattacagctgtaagccactgtgcgcaaccaacctttcttccttttaatgtatgcatttgaagttacacatttcctctaaaccctgcttcagatgcaccccacacatctggtaagtggtattttgattatcaatgtgtttaaaatattttctcatttcaacagtgatttcctttttggcacacaggtcacttaacgagcatacggtctctgggtgttttcctgtcactgattcccactttaatccactgttgagatgccttgagacttgctgtatgacccaacgtggagtccactttaataaacgcccacttgaacagatgccatttctccaagtattcgctgaagtttgcaaaactcaggtcaagttggttaaaccttgtaaaaaaaaaaaaactatatcctgttcttgtctacctgttccactgcctggggagagaggcggccatcagcgtgggcctgtcaacttcacccctccttctgccctttgtgctgcctgtactgaagccatgtcactgccctcgcccctgcaacgtcacccgtcacctcctgccttggtctatcccacctgatatggacagtgacaccagccttcttcctgttatggtctgcatggtaagcaatttccaattattccacttcagccttgctaggtcttcgtgtgcaagggttttgaagtatggctcctgtaagcagtatagacttgagttttgtgtgagcttggtttttaatccagcccgattaactggagtgtgtcttctatccaccttcaatgggatgactgacaggcacagcagggcgtcggtctaccagctggctgttttctatctatatcccacctgggtttgtttgtttatctctacgttgttctggcgaattcatcacatattttttgttccatttttcttcttgattgcatctttaatctgccctagggattggtacattctctgcttcctggtgatggagctcctgaaacacattcactcggttaatcccctcctcggctgtgtgtgtgtgtgcgcgctggtgcttgtgtgtgtgtacatgcacacgtgtgttggtgctcctgctgtctgtgtgtgcgcacgcgctggtgctcctgctgtcagatatgttactaccaaacaggttttaaaacccacaggacgttagtattggtgttttaagcagctggtgctggtgtcatttcaccacagagtcatgcattccagcctccctgcccttccttccctaggctgcaggctttgcaggcttgccttggatacttgctgaaatggagcagttctgccaacaatcaactctctcatcctttgcttggctgaagacatccttaactggctttcatatttcaaggataatttcactggatatagaattcccgtatttttctctcagcactttagagacggcgcgcctcagctgccttcgggtgtcactctgcaggtcatgcattcccaccccgtcctgtcctcgggctggagattgttctcttcgggttccagcaattcaaccaggatgctctgaggtactgaacctcttttcttctttttgttaaaaaaaaaaaaagtatcctctttggcgtctgcagagcttgatttcgtggttctgacgtcctccatcagtttaggaaaatttttggccaatgatttttcaagtattatttctgttccactctctctcttctcctagaacttcaagtaaaagcatgccaggcccctgcagtgccacagtctctctcgtgaccctctctgtacgtgtcttcttccatcctttcttctctgcgctgctgtcagaagatcttttctaccaattcagagtctgttctgctgtgcctattccactgttaatcatgtactgaagccttcatttcggctgtaatatttttcagttctagaattcacatctgtctcctttttatgttccagatctctggtgaaattcccatcattcccccgactttcttgaataatcaatcagttaccaaagtccctgcctcctgcctccagcatttaagtccccgacaggtccttcaccgacattttcctcttcatcatcagtaccttggtctttaaaacactattttaagcaccgcctccaccgtggctgaaaactctaagagcactgggtgtttttcttcctccaaaggaggaaaaaagaaacaaaattattaaagttgcgaatatgtgagttaaaaaaagaaaagcgtaagacacaacaaagacaagagatgtaaaaaaagaatcacagagacagaaaaacacaagaagacaccccggtctcccggtgcaggccgtccctgacagcagcaggcgccagctcttcctgagctcacccaggccaggccagcacccctcccaaggtgcagagtccgccagcatccccgtggggctggcccaaggcttccctttgtttactgggtaggaaccaagagcacagagcctggaacacagcaggccctgcagccacagcctctgtcttgggagcccccgtgggtgccccctctgactcctggaacaatgtttgttccactgtgtcttggcagataagcctgcctgtgattgagtagaaagatctccagttaaatgggaggccgaggcaggtggatcacttgaggtcaggaattcaagaccagcctggccaacatagtgaaacccatctctactaaaaatacaaaacttagccatgcgtggtggtgcagatctgtaatcccagctactcaggaggctgaggcgagagaatcgcttgagcctggtgggtggagttgcagtgagccgagattgcgccattgcactccggcctgggcgttagagcgagactctgtctcaaaaaaaaagacagacctccagttagaatcaggacgcccgggtgtgagagcctgctctgctgctcaccgcatctgcacctgagcctgcagagggcagggtatgcgctgttgggcaccaacgtcaagaggacagagagctaacaggtgctgggcatggcaggggtgggggccatcccgtggctgcgcttgtttacagagggagctaacaacagagtgtgagcttccagacaggactgccccgcatcatctccagcctccgcctggcagggcactctgcacacagcaggctcaggaacgtttgctaagatgcagccgccacccgctcacctgcttacgccacgcccgggtgtgagggctaaattctaacagacacacacaccaacgggggggcagagcagcagccaccgggtccaccccagcagcctacacacgcgcagctccaggatggcccaggaacaggcccagagccaccaagcagcagtcacacagcccgccactccccctggggctcccacgaccggcccacatgcaggtgctgcggcacagggcacctgtccctccccaccgagcacaagcggtaccaacgtacttggcaaatttcacagtggtggcgttccgaggcacaaaccccgtgtggaactgaatctggaacatcttcatggatgccatctgcaaagagagcaaacacgacaccccacgtggagggtgaatccagatcctggggccacaggccaatttttcccaatgggcgagatctgagagcggctcatggtgctggaggcatggacggcgcccccgtgccacatgttgtgggggaagcgggagagggtctgtgtgtggcaggtaaccctgaggagaacgcatgggcccacaagctgcttcacgggactgccgtgggggctgccccaagtggaccctcaaactcagtctcgatggaaacgccaggcttttcaggttgagatcctgccgcgtcaagtgcacggggcaagcagggggcgctgtggggcagtcgccacatgagagcccacggcactcaccaaacagcgagcaccctggaccctcggtgagaagtgagcgcactgtggcccccagccccccatgagcctaggcgtgagtggggagcaccgggcaagccacaggctctctcaccttggcctgcagccggccgcccagagtggaccgggcgtgatagatgacgatgagcacgtctccttgcaccgtgacgcccaggggaatcaccgctttgccatcttcaatcttaaagtccctaaggacagaatgacaagagaaaaattttaaaaacccccaaaaccaaccaaacaaaaacaacaaaaaacagaatgagaaattgtccacttagctaaaatgtgtaataaccaataaagaataacccccatgaagagcctcacaagaattctaaagtctcctgggcactcggatccctgtgacctcctgctgctgaccaggatcccattctcaagtctcctggacactcggatccctgtgacctcctgctgctgaccaggatcccaagtgacctgccacagacgccacagttccaaacacgtccgcctcagcaagcgcctgtccccggcaaggccagggttcctctttaacggttttccggaggggtgaggaggagggagcacagcgtggggctgcagctgcactcaccgcatcttgtcgtactcctgggaggtgctggccacacgctcgtcccccacgtagacctcgcagaagggcctgcagccgctcctctgcttgctgaacagcggcacgggtgtcatgaccacggccctcaccaggatgggcttgctgtggggtgtgatgggctcctccgccaccatgtcacacatgtactcgatgtacctgggggcagacgtgccgcgtcaccacgtgacgtgccctgagaggggaccacacagctgattttgtctttcgaatagaagtttttcatgctagaaatttcccttgtagcaatgttttagttgctcctaacaaatctgatgttataattttcatttagttatatatatatgtgtgtgtgtatacatatatgtatttttaagacagagtcttaaaaatacgccctagttgaagatatttttaaatttctcgtgatactcccacttttactcatgggttatttagaagttgcttaattttgaggccaggcgcggtggctcacgcctgtaatcctagcactttgggaggccaaggcaggtggatcacaaggtcaggagtttgagaccagcctgggcaacacggtgaaaccctctctctactaaaaatgcaaaaatcagccggacttggtggtgtgcacctgtaatcccagctactcgggagggctaaggcaggagaactgcttaaacctgggaggtggagatttagagagttttccagatattcttctggtattgatttcaatttttattccactgtggcctgacagcatagtttgtctgatttcaaattttaaaaatgtattgaggtgtgtttatagccccaaatctgatctttctccttgcatattccatgtgcatttgaaagaaataaatgtgtgtttttctattgttgggtggaacgtcctagaacgctctacagctgtgtcagccttcatgggttggcacattcggttcttctatatccctgctggtggtctgtctacttgttctacggattactgagacgaaaatattgaggtctaccctacaaatgagttgtctggttctcctttcaatttgatcagtttttgcctgatggatgtggaatggaatctgttttctctgaccttggtagcacagctctggctttcccgtggctggcgttcccgtggtgcctctgtggagcataaaccccccagagtctgcctcccacctcgtggcacccatgccctgcaggaggccctctcccggagcttgtgcgggccaggcaggtgacaccacttctatggtgacggtgcagaccccatcttcccagccacaggacactgtggcccagctcagtcagcagggagccaggacagccggtccttcagccacaacaaataaatcctgccaacagcccgagtggccaaggaagcagattcagaaatgaaagagaaatcggctttctcagagtcagtgcggccaacaccttgaacggaggagagggcccagctaagcctcaaggtccagggagaccacgagagaatggatgtgtgtggttctaagcccgagtgtgttgtgtcgggtcatgtagcaatgactagtacgctcttcccccaccatcctgttctgaacccacctctgcctccgtgctgaaagaggacttcctgcagtgtatggccgagctgtgcgtttctgtcccatatggcaatgcctgtcttttaaacaaaaccactcatgttcagcctgaacactgatgtggctggattaaaatctaccatcttgctggctgtttcctacttgtttgatctgttcttggtttcttttttcttcttttcgccttctcttgacaaggtttatgttttccttttacttcctgttgacttcttaattacagcaccgaagaaaaacccttactgtttgttctaggctttctgacgagaaccttgcggctgacatctttctttttgtacctgatgcatcttcttctggccacctccaacacttcctctgtgctcggtttgcaggagttctgaccggtatgcacccgagtgggttttcatgtgttcatcttgctttcatcctgcttggtgacctctgagcttcttgaacctgtggactggtatctgttactcattctgggaaattctcagccatgatttcttcactgctcccgcttccctcttccctttctgggctccacgtgtgtgtgcccctgcctgaggtggaggcagctcttgggtgcttgttctaccccacgctttctctctgtgattcagtttcagtatctctcgacctggctccaaaggccactgactcagcctcagcgatgtcgaaggcgttctcatttcggggatttccatttgcttatttcctggcatttccacggctctgaagagtggcccactggaccgcgcacctgcctgagggtcctctttccacagctctgacgaatgccccactggaccatgcaccctgcatgagggtcctctttccacagctctgacatgtggaccactggaccacgcaccctgcatgagggtcctctttccatggctctgacatgtggaccactggaccatgcaccctgcatgagggtcctctctccacagctctgacgaacgccccactggaccgtgcaccctgcatgagggtcctctctccacagctctgacatgtggatcactggaccacgcaccctgcatgagggtcctctttccacggctctgacgaatgccccactggaccgtgcactctgcatgagcgtcctcagcacatcaattagttacttcagtttcccccagagtcacagagtgcagctctttctctcgtctcctccatctggaggcagaagaaagggtctcggccaggtctgggcctcccttatagtagctgcgcccccttgcccggccctcactctcccatctgtcctgtgggtgcccacagagactgtgccttccagagggcaaggacccttccagtcctgcaaccctgaaggcttcactcgcccactgagacacctggcctccaccggttggactctttctggcctccttctcttctggggtccagttacgtccaccccagacagcacacacacacctcctcccacaggcacctgactctccttagattctgggccagtgatgtgaaaaggccatgaacttgaagctggtccagctagctgcccggtgggagcagcactctgcacatctctctgctcctccaaggaaggagctgtgggatttgggggtcatggaagcccagccacatgccacagggaaagagactccctggttctcagacgccccctgctgaacaggccccaccgcacctggcctgggggtgccaatggctttcagctcaatgtgtggaggggctcccaactttgcactcctcttgccgggggtcacacagaagacaaagctggatggggcggcaatgatctcctccccccaaggctgtgagcaaacgaggtggggccctccctggggatccacagcagcaggaatggcctcctgaccctcgccccgtccacaggctgtgcgccccatccagaggggataaagaatggggagtcccctgacgcttgggtccctcctcttccctcccgccacggtggggccacggggccggcctttgctcctgggccctaacccttggggcctctgtggtccaggtcaagacctgctctttcagaggctaggaggctgctccagcctcaccaggtcctcatggagaccaaggccaggggaggctttctgctggggtggactcctcgggcgtggacacctgcagccccgagaaacagggagagccctaaacacgctgtgaccacactcccgtttgagaaacagcctcctccacacggccagggagagcctgctgcgcgctgaggtggagcggcacagaagcctgtatttggcagggccctaaacacgctgtgactgtactcatgtctgagcagcgtcaggtgctccacacggcacctgtgtcaggtgctccacacggcattttcacgtgcattatccaccagagcccaccacatacatggcatttgtcagagaacctaggatccatgcacaagctgggcaggtgctgccccacagcagtcaggactaccgcggctgagggcccatcctccccgggctctgcggccgtaagcccagggctcagccatggctccgcgaggccgggcctgcctttcccaccagcgcctgcagcggcaccgactggccctccaggagacaccacagcgggggcggcagtgccacacgggcccacagagctgtcccctgtccccggagggccacgcagtaccttttgtgggatggccagatgcctggtgggcagcgcttcatgctgaacatgtacacggcggcctccgcggtgctgaagagacggcagaagcacaggaaggagcagacggccacagcagacgcggctctcccgtcctaggacagacagacacgtctcgcgtgcgcctcgcactcatgcaggacaagggctcgcggggtcctcgggcatcctacccaccctgtggctgcagggacgcagggctgttcctctctgaagctgggatatgtttagggagctacataacgtgcctgccgaggcaagaatggagcccaacagagactgaaggttccctaacgaagaacagggctagggccactccaacaggctctgctggtgccccgtaccccgcaaaagacccctcatggaaacctcaactccatcacccacagtggcagctgccacaccctgggaggctcaagcaccactaagcctcgagctgcagatcgggaaactggaagtgactcttaggtggccaccgagcaggaggggaggtgggctccccacacagcggagtggcctccacacgggcatgcaggtcaaggccaggaagggccacatggggagggaagggcggggccatctgtcatctgtcccctccagacccaaagacaccaagcacagggactttcttccgtgtcccagggtgaagaacaggccccagctcatgactggcgctcagatcctgttgaactatgcatgaaataatgaactttgacagaagacggcgccagcccacggccctcgagctcaccatgcagtgcacgacgcagacgttcttgtggtcctgccgcagccaggcgtgcatgttcctgcagatgttgtacagggtgtgcaggtgtggggcccgccgtgctgcccagccacactcggagacctgtggggacagggcacggtggcacggacggcagaggagccccgccccagccttggtcagctaggagggacagcctgcctgcagtgcgggggcctccgccagctggtgtcatgaacaggcgtccacctgcgcgagacctgagcaccagggctgccactggccttgcagacagagctcagtcagctgttcctgggctttgggtccctttgcatactgacaagtgtcgtgtctggaaggaatgcctcggcctcgagcaccctctggctggtgggaagcagtgaggagctggggcctccagagttcccggcaagcggcatcctcagagcaacagagaccccacctcgccccctcctgtcccacgctctgcagcccctcaggagacctccggccgcccccatcacagccccaccctggccaaagccctcagctatgcccctgcactggagcggaaggaagctccagagtggcaccaagacaaagcctgtggccacacacccggttgtggaacctggagggccggtaggtcctcggggacaggttgtagacggcatagtgccctgggtgcttggagtccaggaacaaccgcacatcttcgatgttgtttttgagcgctgactccacaccttctgctgggaatgacatcactgaaacaagcagacctgcgtcagcacctgggagatgcgcacctcgtggccaggctgctgctgcggcctcgctgctcctgacgcccccgggcaagcgcagcctccggcagctccaccagccactgcccacacagccggccccctcaccctccgtggactcccagcctgggtggacctaggagcatggacccagccacacgcccatcagccggtggctgggacttcctgagacagctttctgacacctgccctgtctccaggtgtcgggatgagtgactgggatgcctggtgcacagaggccctggttttccacggacacggccttgtgttgttcctggcatgacctcagggagccatgggaggccaggctggcgctgaccctgtccactgctgcgcctggaggtgctgagcacaggccgcctgcctgccaaggggccccaggtcacccctgtgagtctgtggccacagagaaggctggagcagaggcacctgtgccctgacacacaacagggactcactgggcacacagggaagggccggggcgcgtcccacagcctcatgtggcacgcatacctgcaattctggatgtgatgtaagatatgtccaggtcaccctttgcataactggaattaaaaagaagagaacttggttatgacaagaaacactccgcagttaggtcacagggcttaagccagagcccgaggcctggagaagccgtggggctctcactgtagaggccgcatcccaggaggaacgtgtgtgtgcacaggcgtgtgggcagcttcccggctgtgtgcgtgctgtggagctgacccctacatcagaaacggatggaaatgacagcctgcagctggtggaggcatgggtgagacaggagagacatccgctgtctgactgccccttcccctgcgctctccagggaggcacggcccaggagtgggctgggagagggatggcaacaccggtggaaggggagggctggagagcaagggtggcttggacgatggtcacgggtcatgccaggctccacgcgctgcccaggcctggtggttgtagcagtgcgactccagcagacgccgctggaggcagagagggccccctgccctgagtgcctagaagcccctgctgtggccacagccaactctctacagaccaactgcccccaacactgggtccacggaatcggtaacacagagatcaaaaccctcaataactctgcaaggaccctgacaggtttatcccacaattcactggcagcagcagctgtgtaagaatggccaagctgttcttgtgagggaaggagcagaagggagcctccctcccaggacagagcaggccggaggctgcggggaccagaaaggctgggctaggagcaacctcagctaggcacatcgcagaggtgctgtccccatcagaggaaagcctggataaaggtccagagagatgaatgacccaaatacacacgaccgaaccatcgcctgaaagtgaccatgcgttcaaacgttttaaaagccgtctaaacccgcagagcaggtgctgacataggatgcgggtcttccgtgcgttcaaacgttttaaaagccgtctaaacccaccgagcaggtgctgactcaggatgcgggtcttccgtgcgttcaaacgttttaaaaggcgtctaaacccaccgagcaggtgctgacacaggatgcgggtcttccaaagcaacaagggaagacggggaggcacggtgagcctgacgcttggccacttttgcagcaagagacaaacaggccacacaaagcatggctactggacctataatctaatcaccggtagaaaaacaaaaataggggccaggtgcggtggctcatgcctgtaatctcagcactttgggaggccgaggcagagagatcacctgaggttgggagtttgagaccagcctgaccaacatggtgaaacccccactgctcctgtaccacggcaggcagcggcaagcacagcaagctgacacgccttaagcaaaggtgggcattgagtgccacaggatccacgcacatctcacccaccccagcagccctgcgggggccccatggacctggctgtgtaggcctcaggcacgtgtaccacaggtgtgtgtgtgctagggctgcaccggatgctgacgggacagaaaccagggcccagacacagggctcaggccccgaggccctggcttcagaacagcaagcaccagggcagccaggggctcatggccacccaggtcctgactcctgggcttgtccgtgggggagagccagaagcacaaatgaattcactgtccttttttttttttcattttttaaattgaggcagggtcttgctcactccaggccagagtgcagtggcacaatcacaactcactgcagcctcaacctcctgggctcaagcgatcctcccacctcaggccccagtgtagctgggaccacaggtgcacgccacctcgcccagctaattttttatttttgtagagacagggtcttgctgtgttgttgtgttgtccaggctcgtctcaatcttcaagtgatcctccctcctcggccccccgaagtgctgggattacacgagccaccgtgcccagccatcttttgagcctccaggcccaaccagaactcactgttgcttctaagtcaactttacaaacacgaggttatgcagcttcatctgcctcaagcacgtgatgtgaacagaaggcagagcaaaacaaacagcagggctgccctcagctggaacctgggggtgtcaggagggttcccaccatcccctaacaagcagcagctagctgtgcctgagtgccatgcaagcagcgcctgctcaagccaaactgtgtcctcctagggcctggaacccatgggtcccagcagagccatttctagaaccagcccctgcggccttaggcttccagcagacagcagctcccaccatccccacagctgctggggagggagcgtggcctggagtcccccagggaggactctggagctgtgcccggctccctgaacgccccacatgcctcctccctctgctgactccactctgcctgtccccacaatgtgctgcggccatggagaccattttcactgatgccgaaagtgaccgttcctagtgactttcacttatggctttgctgccgcatcctctctgtcttgtttccactctgatcccaacatcactctcaccaagatgacgctggagagtctctcacccccctgggtccatggctagccctgctgacgctccacacgcagtgtcacctgtcaggaccctgcaggagccacagccctgggcccagtgggcggtgcgctggcaccagacagacagagctgcctctgatcttctgtcagccacaactcaggcaggaggcgtcacagaggaggtgcccagaggtgcgagtgggctcacgtcctgctctggggatatgcaggcccactaagagcaggtttctttccaaaaggttgcacaaggacaaggcacacaggtaatggaaccacacagccaaacatgcagcacacacagaggcacacagctcacacacacaggcactcacacagcactcctacacatgcacgcggcccacacgcactcacaggcacacagctcacacacacaggcgctcgcacagcactcctacacacgcttacacatgcacgcggctcacacacatgcgtacacatgcacgcggctcacgcgcacacacgcgtacacatgcacgcggctcgcgcactcacgcgtacacatgcacgcggctcacgcgcactcacgtgtacacatgcacgcggctcacgcgcactcacgtgtacacatgcacgcggctcacgcgcactcacacgtgtacacatgcacgcggctcatgctcactcacaggcactcctacgcatgcatacatgtgcacacagctcaggcacaggcactcgcgcgcatgtgcacacatgcatgcggctcacatgcactcacaggcactcgcacacatgcatacacatgcacgcagctcacgcacacaggcacttgtgtgcatgcgtacacatgcatgtggctcacacacacttgcatgcgtgtgtacacatgcacgcagctcacgcacactcacaggcactcctactcatgcgtacacatgcacgcggctcatacaggcactcgcgcgcatgcgtacacatgcatgcagttcacgtgcactcacaggcactcgcacacgtgtacacatgcacacagctcacgcgcactcacaagcactcctacacatgcatacacatgcacacacgcatacatgctccaacatgcacatgtgctcatacacgtgcctgcacacaatacgagcactcagctcacacaaggattcacaagcacaaggactcacaagcaccagcacacatgctcataccagcaatcacacacgcctatgcacatactcacaccagcatttacacacacatgcacacatgttcacatatgtatgttaacacacccattccctcacatgcacacatgctcaaagacacatgcacccacgctcacatgtgcagacgctgcggtacatgcaggcacaagtgcacacacgtctacctggtgctggggacacaaaacagtgatcacagcacagaacaaaaaacataagaaaaagcccgaaggtgtcgccagctgtggaaggaacgtgggcccaccaggggccgcagttcctgcatcacgggcaccagtccagcccagctcctaggctgtttcctgacatagccgacgcccttgagctggtgcgaccgcagggccagatgagcagccagcgtgctcctgggcgttcagctcctcagaagagccagcgcatggaccccgcaacgcagaggggccgcactctggaacattcccagtgttccgtgagcagaggctgccgggcctgtgggccgatgtcggggccacccccgcacagacgcgcccttggacagcccacccagagggagactttctcccaccacaggctgggactcacctggtctaagtctgagtaactagggctttaactcaaggactggctcagtgaggcgccaccaccgaggtttcacccaatttacagagtcccgggaacaagccaggaacgccccagagtgaggggcgacattgcagcaagggaggggagggcccaggcatctcctcagcagggccttgccccccaggcgatgaaaggaaagggatctgcctggctctgtgggatgctgggctcattccgactccctgggagaagcgggtgatgctgtcccactgcctcaggggcccctgtggggcctgatgaccagctgttccaccgcagccaggaagcaagggccggggctgcagcctggaacgagcgtgcggcaggtccagggctctggagcctcacactcacttagcgacggactggatgaccttggaggaggtgtccttgaggttggtgaagagccgctctgtcccaccccgcagaatgtccaggaagccgccatacggctggtcgtactccgccagcgccaggcctgcagggagacacagtctcagcaggccccaggtgctcggtcccacctccccaggtgcgggttgctggctgggcccaggccccaggcgctcggtcccacctccccaggcgctcggtcccacctccccaggtgcaggttgctggctgggcccaggcagcaggagcagggagtgggtggtatggccaggcccctgacccacacgtacccagcgggaagccaggcctcagcactggcaggtctaccctgtcctcagcctttccagagacccaggaaatggtcaatctgggtgcggaagggctatgtggccgcctcagcacagctggggctgggactctgtctgtggggatagtccggcctcacggccacagcttcaggccaccatgaccctggacgtgaaggcagagtggtggcccctggcctggtgggtcctgcgagtgaggtcttcacaggcggctttggtggcacaagtggtgttaaaaaaaaaacacctggccaaagtccctcatgcagacaggagaccgaggcccaggcagcaccgagcagatgggggcactgcagaacccagcagctcgaggactcacccttcctccagccagcagagacccagccagccactacacctgcatgtgtgggacccacactgcacggaccggggtgccccagacatggagctgagctcctccctgggaagcggaggtgaaggacccaggtgaaacctcccacaccgcagtggggatgcggggcgaggtcgggaggggtcagcgccatgcagagctgcagacccagccgctgcctgtcagggccatgtcctcgacggctcacccggaaccttctggaacactcccggcacggagttccaagagcatgcagcgtctgtctccagggccctctccactcctcaccagctgagggccctccagggacacccaggcccatcacaggtgcccactcctcatgcggcagaaggggccacctcacactagcggcagaactgtcttcccccaccgccctccactgtccaatgcctgctcctgccccctggcctcagggtcgctactgtagtaaatggttcaccttgcccacagcaggcctggcccttcattcccagctcctgggaaggaacctgggatgccccctccagccccaaaaggggtgtctgtttccctggggccttgggctgtgccagacacgacaatgtgatctatgctggggtcttggccacggcgcaggctgcctcccacataacccctgagcgaggccgcctggtcactcgggcccggtctcctgggccctgccctggagcctcttcccttggctggctttagtccgaatcctgaccccctcctgaactgcaccaagacaccagctttgctgagctctgtgagccccagggaactgccgaacctgagggtgtgctcagggaccctgacctcacagtcatctctggtgggagaggaggccccgggagagaaggaccccagactccatcccaatgtgctgcgggtgcccggggtgcagcaggagcgagggacaggtggcgggcacaggacagggcactcacctccactgtagccactgccagcggggcccacgggagggggtggccctcgggacagtgtggcgctcccgtagcctccattctgctccaggagctgtgacaatgaaaatgcagaggtcagttctctaaactgacaactcacgcctgcccacgtcgggcagaggtacggtatgggtgccctcagagcccatccttctgccccctgatctatgacacagtgcaagggaggaacttcccacaggctgaagcatcagctggaactcaacaaacgcacgcagccctcatcccctcaccccgcggcctgcctcgcttggggctgttgcaggtgctcagcactccagcccagcttttcagactcttgggctacagcttctgttccttttccttttctctctcttcccagtctgtccaaccaacatttttttttttttttttggtagagacagagtcttgctctgtgacccaggctgcagtgctggagggctgtggcacgatctcagctcaccgcaacctccgcctcatgagttcaagcaattctcctgcctcagcctcccagagtagctgggactacaggcatgcgccaccacgcctggctaatttgttttgtattttagtagagatggggtttcaccacgttgcccaggctggtcttgaactcctgagctgaggcaattcgcctgcctcggcttcccaaagtgctaggattacaggcgtgagccactgcacccaggctttttttcttttttttttttttgaaacggagtctcactctgtctcccaggctggagtgcagtggcatgatctgggctcactgcagcctccacctcgcatgcccaaccatattaagcagacacatggcctgtctgtcccaggatgttccatcacttcagctcctgggttctgggggccaccctgtgaggctcactacctcctgggggcagtattttatttcattgtgaactcagctccatcatggactgtgttttctgggggagtcggttggcttaagcaggggtctaacgtctgtccccacggggtcccggcctagaagcactcagatgagaagcactgaggaccccgccccatcactaggggcctgattctgcccatctgcccagcggcacctcctcccgccccatcaagaatccctccagcgcactcgacaaagcaagaggcccacacccccctgcgagcccactgtcctctgtgacctccgggggagtgggcaggcattttctgtaaagagccaccaagcgagggggacacgaggcccaggctgctaaagagcaggacggcccaggagtgatcccttcctgccgctctctgacagccccagggaagcttgctgagaggccaccagtgacatcaactctcccgcctcagagcgccccacacctcaaaatgcttccagcacccagcaccagggctccctctgctggtgcacccaccatgatggccgccagagaggggcaccacagcctctccccgtctgcactgggcttcccagcacttccctgctcccaggtctctgtacccacgcggcccccaaggaactgcaaaccctccacacagcccaaaccttccttgtcccacagggtcctgtcctcagacagggactccgggcagcagctctgaccttctccccacgctccacacccaccgcctgggtcagctccactgcagtggcccctggaagttccggcttccagctaccagggagtggaaacgacccaagggctgaaaaggggacaaaatgcaggagccaagagtcctgggtccttggacacagacccctgcgagatctgcagaggggccctgcgtgtcctgactgggccctgagctgggatgcccaggggcctccctgctccccgtgggtgagggccgggccgcgtgtctgctctgcctcgaggatctggtgatggagatgctgcaccctgtccacggctgggtcagaaaagactctgaggaaagcatcttccagccaacacgtgctgctccctcccaggcctcacacttccacaaagcacacggccctgtgggcctcagtctcccagcccccaggccctgatgctgccagcagccaccggtgcctgggagtggaccctggccaggcccagccctgacacaactgcaaccaggacgcccagagctgagctgagggtcagaaacacagacgcagagcaactcaggacaccccaggacgcccagagctgagggctggctgacctggcttggacaccagaccccagaaacaaagacacaggagcaattcatgctgtcctgtcaggggaagaatctagaaaggcgcctgcaaacctcaaggaggccagaggagcgcgtgcagagtgcgaagaccttggcaatggtcccagcatgcccccggggtctcggccctgggctgcggtggtgaccctgctcctgcaggagcccagggccctcaagagcttgtggctccccactgaagtgggcagagacccccagggtgcagggtccggacgaagcagcacagccacatgccaccctcctctctgtggggggatttggggctcacatgtgcctccctcccctctgtgataggaaacttggggttcaggtgtgcctcccgcccctctgtgataggagacttggggttcacatgtgcctccctcccctctgcgggggatctggggctcacgtgtgcctccctcccctctgtgataggagacttagggttcacgtgtgcctccctcccttctgcaggggatctggggctcacatgtgcctccctcccctctgcgggggatctggggctcatgtgtgcctccttcaccactgcgggggatttggggctcacgtgtgcctccctcacctctgtgatgggagacttggggttcacgttgcgggcggccgcgatctcctgcagctggtgcaccacctcggcgatggacagccgctcctccgggttcacctgcagcatggcgcctgcagcagaagcacagcgcgctcggccccacggttccccaggcgggtcagcaccccctgcactggcagaggtcacagaccaccagaggccactccctctacacacatcagtgacgtcagaagcaagaagggagcggcaaagggaagaacaaaaaccgaacaaaatgatcaaaaatcaccactcagagcaccgcaaattcaccagcggggtgggcggcaggggagctctctggaaaccccccccccagggatgttgtcaaaactatggtgacgggcgggagtggggccaggtgagcagtgccccaaggggagcggggtctccagagccacgcggggtctgtgctccagggtcctgccccacgcacgcattccaccgggacttacggatgaggctgtggaagaccgtgtactgcgtgtcgtgcggggggatcgagtacttcccattgactattcgaagtttcgctccatcctcaaaagggtgctgccggaagcacagcaggtacaagatgcagcccagggcctgcggggagagcaggggtgatgcctaggcccacggggagcgcaggggtgacgcctgggcctgcggggagagcaggggtgatgcccaggcccacggggaatgcaggggtgacatcggagccgtggggagcgcaggggtgacactggggactgcagggaacacaggggtgatatcgggaacatgggaaatgcaggggtgacaccggggcctgcgggaacaacaggggtgacacccgggccgcggggagcgcaggggtgacgttggggccgtggggagcgcaggggtgacgcctgggcctgtggggagtgcaggggtgacacccaggcctgcggggaatgcaggggtgacgtcggagccgtggggagcgcaggggtgactcctgggcctgcggggagtgcaggggtgactcccaggtctgaggggagagcaggggtgatgcccgagcccaaggggacaagggcgtgagaggagcaccgcagacatggtgactggccgaggggtggctccttccttggggatcctaggggtatagtcggtggttacacaaacatcacttgactgtgcggagctggcggcgtgcttcccacggcacggggaggcctggatgctccacttctattcaccgcaaagaactgtccaggtgacagtgttaaacggactctaggctcttaagattaaaaagttccgttcaggccgggcgcagtggctcacgcctgtaatcccagcactttgggaggccgaggcgggtggatgacaaggtcaggagttcaagaccagcctggccaacatggtgaaatcccgtctctactaaaaatacaaaaattagccaggcgtggtggtgcatgcctgtagtcccagctactcaggaggctgaggcaaagaactgcttgaacccgggaggcagaggttgcagtgcgccgagatcgcgccactgccctccagcctagcaacaaagcgagactctgtctcaaataaataaataaataaataaataaataaataaataaaggttcctttcaaaattccggggttcccacactcatgcactgaagatctatgagctggtgggaccagcacagaccctgctgtgtgctatgcgaggggcaaggcacctgtcctgtccttggcaacagcagagacccacttttcagaactgaccccatatgcagggtgtagggcacagggcagaagctgcaggaagcagcctcctcagtctgctcaggattttcgcagaactggccttgaacaatcagcgacttctcgtcaatcacccaatatgtgagcccagagaagggactggtgattacttcggcatcaggatcttatccagccaagagtaagagctcacaccgggaccccaggccgagcaagagccggccaggagtgtcctcgtgcgggatgtgcagaggaccagtcaccagggtgggccaagaacacaggcaatgaccacacacgtggccccatccttccacactcctcaagggacacagggcctcagcctacagcccacatactgtctcagcctgcagccccacgtgctgtctcagccttcagcccatgtgctgtggctgatggcacggctgacccggtccgtaggcaaatacactacggagggccaactgccgcacctggtggctgaatgacggggtaaggggacgtcaaaagaaccacaaggcaggacaccctccacgcgtggtcaccctcggtcaatggggacatggccttggagagatgcagggatgagggaggacgcaggagaccaccccagccatcaggctcagccctcactctggcctggctctgagcgcagcaaggctggggtgtggcagggacactcctgggccaaggcactcagggccagatgcacaacaagccatggacggggccgaggggagcctcaggcagacccagccgcacaggacgcccccaactgctactcgactcatccctattagaagtagtcaaggttgggcagggtgcagtggctcaagcctgtaatcgcagcactttgggaggctgaggcaggtggaccgcttgagctcaggagttcgagaccggcctgggcgacatggtgagaccaccccttctaccaaaaatacaaaataatagccgggcatggtggtgagcacctgtggtcccagctactcgggaggctgaggtgggaggatcccttgagcccaggggcgggaggctgcggtgagcctgagccgaggtcacaccactgcactccagcctgggtgacagaggaagaccctgtctccaaaaaaacccaaaaaaacagtggcagccacagtgattcttaaggaaaggaaaaagaaaaggggacgggaggggaagagggggtggaggaggcaggccagttccgagtggcaggtgcccggcccacgccgcctcaggttaagtagggcgcacggagccaggcactgccactgagaggcgccagacctcacccagatatcctgcttctcgccgatcgggaagttggaatacaagtctatgatttctggtgttctatacattggtgttgtattcctcgtgatctgaaaaaatacaaacatttcaaaggaaaagttgcatcccacaaacagtattttttatgttgcaccacttccgtgcagctttccaaatgcacagcagactgaggggcagcctgtcccgcacactatgccccgggatgacctcaggccagtcggccccatgcaccagctccgctgctcatcttcggcctcagcgcgctccttacgatgaggactgagtcattcacctccctcaatctcctacggcctcccgtgcttcatggcatgtcggcaccgacgtattggcctgctgcgcaccaagtccgcttgctgaggagaagggtgtctcacctggcacaagggccccgctccagagtggccgcacccagagcagcttctgtgacacccagaaccccagggtacgtgagggtatctgggaggaggaagccgtccacccaagctcacccgactggttcaaggttaacaatggagagcctcacaaacacacggaggcacttgcgagaggcagaggctggggccacagagctgtgaggagagagtgaatctccgtgcatggcagacatgttgtgagaggcagaggctggggccgcagagctgtgaggagacagtgaatctccgtgcacggcagacacacaaaccccatcctcagctgcagattcacaggagagcagggggcaagtgggctctgcagttatacagcaggacagcgcacggccttgggcaggccacaatttcttaaagggaatgggaaaatgagagcttacggaaagcaggataaagcgccctccactcatgctgaaaagcacgaagacctgctttccaggaatgacctgcctgaggccgggacagtcagctaccaatgcaagacacaagagcaagaaggcccaagtgcagagagcgcaagttaactcctccagctccaagacacagggtgagagcaggctacgtgtgggcagagacggcatctatctgcccatctctgggaaaagaagcttcggaggagagccaaggacgtgaggggctcagaggaaggaggggctgtgagagggcatggatggggccaccctgtgttttcagctccacttcctgttaccttcaactgctctaaaaaataaagtctgtttattacattgctcacgcctgtaatcccagcactttgggaggctgacgcgggtggatcacaaatgacgtcaagagatagagaccatcctggccaacacggtgaaaccccgtccctaccaaaaacacaaaaattagctgggcgtggtggtgtgtgcctgtaaccccagctactcgggaggcagaggcagaagaatcgcttgaacccaggaggcggaggttgcagtgagccgggattgcaccactgcactccagcctggtgacagagcgagactcaaagcaccccggcggaaaacagcactccgcactcagggcgtggaatgtgggaagggccagcttcccccagcataggccccactcagctcacctcttcctccaccagggctcgcctctgggcgctccagctgtagtcagggtagtgcgagatggtcgtggcactgccaaagtcacacagcttaatggtcccttggttactaagcaacaagttctcaacctgtaaaattccacaagacagccccgtgaacttggcgtagacagagatgggacttcagggaaaacgaacgggtgtgagacacagccagggcccttcgcagacagcactcgcccagggccacggctgccgggtgcctgcagcacctcacacctgcggacacagccagctctgcaccagcagctcggggtgcaggggccgctccaggcctaggcagaggggccctggcgggtgggccggcctgagaagcgggccccgaggggctgagggatttcacagagttcagtaaatgagccttcctcaaagatgtcttaaattacttctgatcaaatgtaatatgtgtaattcagaaaaataaaaagcagaaaattaaaaaccacccataaatcaaagaaagataatccagttaataatggggctcacaggccgggcgtggtggctcacgcctgtaatcccagcactttgggaggccaaggcgggcggatcacctgaggtcaggagttcgagacacgcctgaccaacatggtaaaacctcgtctctactaaaaaatacaaaaattagccaggcatggtggcgggcgcctgtagtcccagctactcaggaggctgaggcaggagaatcgcttgaacttgggaggcggaggctgcagtgaaccgagattgcgccgctgcactccagcctgggtgacagggcaagactccgactcaaaaaaaaaaaagtatacagagacacaaagaactagaaagggccacacaattgtgaagcccacattacaccttctggcgcagctctgataacagggcatgggagctcgggccaaacagggaatccagcgagtgctgctgagaagccacggacgccagaggctgcacgcgtgacaaggcagcaacgcagtgactcagccccacagtgctcacgccccacacaacacccatcttaatggcagagccatggcaaaacagctgccagcaccaggcatccatgtggaacgaaaggagaaagcctcgcccccagctcacacaatcaaggaagcctcagccccaacatttaggcaaaccacagatctttcggaagatggcccagaggagctccttctgagatagggaaggagcggcttcttcaacaagacagacagcacagacgtggcaggatggccagcacaggcatccctctggagaggaagaacaatgccagcacagggctccaagagggcagcacgccagccacagatggaaggtgctcggcacacacgcggtcagtacgggctcccacaggcagcacagggctccgagagggcagcacaccagccacggacggaaggtgctcggcatgcacgcggtcagtatgggctcacacaggcagcgagaggaaggcaagtcgaggaaaggcaggcattttcccagaggaagcccaagttctgataagccagcctcatcgacaggagaaaaaatgcaaactaaggccatgggcacccaggacaggctgagggagcagcacccgccatgccccaggacagcaaagtgcagagccgtggcatccaagagtgcaaggggacgcccagggttagatgcagacgctctccaaccacagcgccctgcagaccccagtcctagagaggacgcctgctccgcggaccagcaagctgaacaggctgtccacgtggtgcagacaggatggctcaccataaacaagggaaagaaacggacacacatgccacccatggccgaccagagaaacccagtgaagcctaaggccaccactggcccccgaggagatgcgggccacatacaggaccggggcctctgaaccacagggctgagcaagaaaatcagatgcagagcgtggggcgaggctcccctcacaggacgcccagagaaaagatcagcgaccctggctcggatgcagagcacacagcggggagatgcagtggcacacggccactgaaggcccaggagtgcccatcccctcgcgtgtgcccgttcccattctacagccaacagagacgaagctgtgcgcacagcaggacgatgcacagggcaggcgagtggggccacctgtgcccgttcccattctacagccaacagagacgaagctgtgcgcacagcaggacgacgcacggggcaggcgagtggggccacgtgtgctgcctgcccctccgcaaacagccgtccagactcccacggcggaggccacaggtgaacacacgcgggctgcagggctggcctgggttcccgccacgccgctgtggagcagcagcaaggccagtgctgtgaagtgcaggcctggctcacagacacggattcttcaccaattcaacccttctgtttctgttctccttaaaatacacactcaagccccgctacacgacccatcacacttcaaaaatgcgaaccaggagggtctcggtgtcatgagaaaatccaccactcagagactcctcaggaagaaccacccagacagcaaacagcaccttccacgggcaggactggcccctcatggagccctgcagccccttccgtcagaatggggcctcaggcgcatgggtttctggaaaccaggggtcttgcttgcaaccttgaagaagcttccctcaaaagcaaccctgtgtgctgggcagaatgtacttttagaaaagtaaaatacaaggaaagaagaaacagaaggaagagagggagggaggaaaggaaggagaaggggtgaaagggcctggggcatggctcaggagcaggctccacagcggtggccatgggagcgaaagggcctggggctcaggagcaggctctatggcggtgcccacaggcttctgccatggggcatctgtccagtcggccaccttacaccctggcattctaggccctctgagttcaggggacaaacgaaaaaggccacacttacccattttcaaaatctacgtgaagacacctgtgctataaagtaggagtgtacagccaagtagagaaaaggcagccctaaccagagaaacacagagggaagctgcctgccagagccttggccctgggtgggctgaggcaggctgaggcggaatgagcctgtgcagttaagaacagctcagcatgggtgcccacggcttaggcacccccacccagggcacacagggagagccacggccttggatcccccacccagggcacacggggagagccacggccttggatcccccacccagggcacacgtggagagccacggccttgggcctcccacccggggcacacgtggagagccacggccttggatcccccacctagggcacacggggagagctggggggctctgaggcctcctaggcacccacgagcagacgctggagaggaggcggggcccaggtggctgcatgggcagacatgagctgatgcacggggtgcagggccaggtagacacaaggatacagctcccacctcaggtcacacaaggtcaattccagatgaacgaaacctctggacacaggccaggtagatttcagcagctggaggagcagctgaggcgggtgctgggagcaggatctgaaacacagctccgtgctccacaagagacgccacggggctggggcctcactggcctcctcgtccccttggcctgggcagtggcggggagccaaggacagcacagggcatcctccacaagccgtggccagaggcgccgctcccgattagcgaggtctgagagaagccacactttgggaaaaccagggaaggctgagaacaggagggcaagagacaaggctcggttcctcccacctcactgcggataatggtgtcaaaaccacataaaaaatgtcctggccgggcgtggtgtctcacgcctgtaatcccagcactgtgggaggccaaggcgggagggtgacttgaggtcaggagttcgaaaccagcctagacaacatggtgaaaccctgtctctactaaaagtacaaaaattagcccggcgtggtggcatatgcctgtaatcccagctactcgggaggctgaggtaggagaatcgctggaacccaggaggcagaggctgcatgagccgagatcgtgccactgcactccagcctgggcaacagagcaagactccgcctaaaaaaaaaaaaaaaacagaaatgtcctcacgtccccagagacatggacaaaagtatctgggagtgataaggctttaaaactttggcagcctgggagcggtggctcacacctggaatcgacccctttcagaggctgaggcgggtggatcactcgagctcaggagttctggaccagcttgggcaacatggtgaaaccccatttctactgaaaatacaaaaactaggcaggcgtggtgtgcgcctgtggtcccagctactcaggaggctcaggtgggagatcacctgggccaagtcggccgaggcggcagtgagccccgtcagtgccgctgcactccagcctgggctgtagagtgactgactcaaaaaaaaaaaaaaaaaaccccaaaaaacctcttcagcaaaagcctcagcacggaggacgaggcccaccatgggcaggccaggcacaggcttcacagataatggagaagcctcacaacgtcctaggttttttaaaaaacacaacagcaggagtgaaaactgggccacaaaccagaagacgccggcagcacaggcgacacttagcagattatgagaatacacaagctgctccaacgaaccaaacacacaagccagtggaaaatctttgaaaaaggcaagaaacaaaaggaagtttactgaagagcaagacccgaatgactataacaaacattcaacttcattaacatcaggaaaaggcaaaatcacaacccgtcagactatactccccaccaggccagccaaaatcaacacaggcagctcagggcatggacagcccacggggcaggagtgtcctctgtggggctgtgggaagcagccacatcacatggaaaccgcgcagtgccggcagcagcacggagcgcaggcccagccccggcccagaaccacctgtgtggcggtgtggtgggcagggatggagcgcgagcccagccccagtctagaagcatctgtgtggcagtgtggtgggcaggacggcccttttacatgcagccagtggctcatgcccacatcacgccaaccccgggatgccacgcctcggagaaacccgtggtgacaggagagatgggcaggagagtctgccggtgaacggaaggggaggtgcagtggggggacagtcaggaagtgcaaagagctcccctcaagctgagtaggcaaggggtccggcccccgaccccagcgcctgagacagggccaggcagaggagcgccaggcttcctcccagctccaagaggccgaaccagggaggcactgtggggtccaggactgcccaggggccaaggaaggggcactgggtgagcaggagttgggggcctgggccaacaccactggggggctgaggaaggagcgtgggatgagcaggaatgcggggcctgaactgacaccaccaggggactgaggaaggagcgtggggtgagcaggagtgcggggcctatagtgacaccaccggggggcggtgggggggcggccgaggaaggagtgtggggtgagcaggaatagggtcctgaactgacaccaccggcgggcaccctcgtccacagctccccacggaaactggagtgagcaagcatccagcatggggacctggtattccagacggaagctccaggctgtgagcacccccaactgggcgtgaaggcccccagcagggaggcggggccatcccgggatctctgtcggcaaaggcctgtgagacagatgctaattttcttcagggctggaaaagcaacgtttctggaagatccgcttccactgttgagaggctcacgcacatcttctaggtgagatggtgtagcctcacctgctctcacccctgcatcctaactgagcgggagccccccacagaggctgtgaaccgcgtgtggagggagccactaccttgtggtccctgtggatgatgggcggctcctaaccgagtgggacccgcacacagaggccttggcagctgcgtgtggagggagccactaccttgtggtccctgtggatgatgggcggctcctaaccgagcgggacccgcacacagaggccttggcagccgcgtgtggagggagccacgaccttgtggtccctgtggatgatgggcggctcctaaccgagcgggacccgcacacagaggccttggcagccgcgtgtggagggagccactaccttgaggtccctgtggatgatgggcggctcctaaccgagcgggacccgcacacagaggcctcagcagccgctaccttgaggtccctgtggatgatgggcggctcctaaccgagcgggacccgcacacagaggcctcagcagccgctaccttgaggtccctgtggatgatgggcggctcctaaccgagtgggacccgcacacagaggccttggcagccgcgtgtggagggagccactaccttgaggtccctgtggatgatgggcggcttctgccggtgcatgtgctgcacggcgcggcacgtctggtagaagatcttcagaaccgtgtcgcacgaaagggggcctcgagattccattttcttcaaaaattccaccagctgccctaaaagagaatgaaactcacatggaggcaggagaacagggtccggagacagggaacctagggctgtttcacgcggacttcccagaactaaatggaaaggaaaaccctgactttccacacctaagtaacaaaacgaccagaggtgactccctttgaccttttctgcctggcagatgggaaactgcctgactgcagatctcctcttcgtttgcaactctgtaacttcaccctgtcttctgattgcttttcgtaaccaatcagatgtttgcacaggagtgtgaccttctggttggctgctttctgcaaccattaggctgatggcgggctaccacttcgtttacatgaggtgagcacaaagtggccagtgggaaacctctagggggtatttggacccgagaagattctgcatctgggcccttgagccgctgcttgggccacccccacaccgtggagtgtacttttgttttcaataaattcccgctttcgttcttttgttgcttcattctttctttgtttcgctgggcgttctgtccagtttgttcaaaatgccaagaacctggacaacttgcagtcacgactctctacggttaacatcatcaccgtggagcaatcagtgctctgccctccctggccccaggccacgctacagactctgccacgccgcgccacgctaggggctccgccacgccccatgccatgctacggactccgccacgccccatgccacgctacggactccgccacgccccatgccacgctacggactccgccacgccccaggccatgctacggacttcgccacgccccaggccacgttacggactccgccaaaccaggccacgcttcggactctgccacgccccaggccatgccacggactctgccacgttgggccacattacagacgccacaccacactttgaactctgccatgccccaggccatgctacggactccgccacaccccaggccacgttactgcagacgccaccacaccaggccacgctgccttttccagccacagtcccagttaagcccaccctgagtgccgctcccacctttccttccttcagctgctgcagaaagggctgcaggtatgaggatgcccacctcagccccgtgtgtgggaccaccacccagtggcaggggtgggctcggagcagccccacagtcaagtcacacacagagcagaggccagggggcaagacgcccaagcgtcaccgaagcaacaaccgcgtcagcatcccagcagctgagctggcatgccgttaacgtgagaaccacatcggcatcccagcagttgagctggcgtgccgttaacatgagaactacattggcgtcccagcagccgaggtggcaagccattaacgtgagaaccacactggcatctcagcagccgagccggcgagccgttaacgtgagaatcacatctgtgtcctggcaaccgagccaggcatgtcattaacatggatacaaagagaaatgactacaaatacacaagtgctcaaacctctaagtgaacactcagtgtcctcagatgacaaatgatcattctcacattcacgacagtatcagtgcctgtgcgtgacccacaccccagggagcccgtcctgccatggctggcaccttccaggcaccctagccctggcccaaccaggaaaccagggatgtggggccggggcagcacgcagggctgaggacctgctggggactgaagcattcacactgccagtcaccccagcacccctatgcagcccccacagacgtgcagacccaacccatcctgctcctaccctgatcttaccctgggtcttgcccacttcagctggccacagtccatgtgtggcatcatccctggggcctctgcatcttgtgccccatcttttcagccccgtgctcctgcctctgctctctacagagcagccaccgtcaccctctgctcatcccactccacacccctgaaggccacgacccctgcagccccagagccaaggccagtaccaccacccacggaacccacactcagggtctcccccacgctgccagagcttgcgctcccagccacactggcctcccttcctccctgcctcaggacccctcacaagctgcttctgcggccaggatgcctcccagaccgccccttctgctcacctcccaaggaaccaactctgcccacaccacctaaacgtgcacccttctcctgggactcattctctccctggctcttcgagccacccaaccacctgccatgggcatggatcagctgtgtctggcgagtcactgagcccccgatgcctgcacacagcagagcgtgtagccgactcaattccactgacaatgaaggcatggtgtgagagccggtcgggacctgccacagctcaggctgggccacgctagaatcgactcacagaccggacccacctgcgtgtccccagcacagcccagcactgcccccacctgcacccagctgaggggccctcccactcccccagctctgccggccctggccctcaaccccaggtgaaagccctctcagccctcaccacagctccctcaaaagctttgtgctgaccctctgagaaacaggggggctctcaggaaaaatgaggggcacccatagaaggaatggggtgctcagaaagagaggaacagacccgggagaggctgaggccaggcccggggagtcagagtgggggtgacttgccctctacgctggccatcatggatgggcgagtctgtttcagtggtaactgggccccctgttcagtgcctcattctcagtgagaataaatggggtttttaaaagtaaaaattctgtatgtggctgagtggggaaccggtatgtggctcttccctcagaggacactggaggggttgcctcatgggagggaccgggcacatccccggagcccgacctccaggcctcctccagtgagccctgaacctgcagctgcacgggggagcccacatccctcccgcttctcagagatgccacggctctcccctggcacagctgtgccatccacagagccctgcagctcagctctcagccgcacatgctgctccagacaggcagtccccaggagtgagctggcgcgcgcatgcgttagtctgcctcgtgtatttatgacttgaggggctgggcccggcccctctccttcccacaccaccccatgcagggtcagcgatgagccgctggccccggccctgtccccgccgctccctcgtgcacatatcctgggaacacactggacgccgagcagcttcagttttcacacccgtcctgctcaagccttccaaagccggaatgtctagaaccaagatttacccctcgcaaaggctttctgatctcggaaatgacaaacgagggagataatcagcaaaacatccatcactagacccacaggaagccccgtctggcctttatccaagttactccaagtgtgctgggcagagggtgcggcaaggctcacacagcaggcaggctgcagctccaggagaaagcccgcaggcctcaaacagaagacgcagtgatgcatccacaccaggaaaaccaagcagccttctggatggaacgaagcgaccgcaccacgtggaaagaggcctgagcagggtgctctcgccagcgatcccagcgcctcaggaggccttggtgggaggatcacctgagcccaggagttcaagaccagcctgggcaacacagcaagacaccatctctacaaaaaatacaaaacttagccaggcacaggggccaacacctgtaatcccagtgctacaggtgttgcttgagctcgcgtgttcaagaccggcctggcaacatagtgagactctgtctctaagaaaagtttactctttaaaattagctgggcatggtggtgcacacctgaagtcccagctactccagaggctaaggcgggaggactgcttgagcccaggagtttgaagctacagtgagctatgaatcactgcactccagcttgggcaacaaagcaagaccctgtctccaaaaaaaatacgcctgatacggtcaatttttttaaaaaggaaaattatataaagtaaaatcccatttttataagcactcataaaactctgggttgttgttggttttttttgagacaagagtctcggctcactgcaacctccacctcccaggttcaagcaactctcctgcctcagcctcccgagtagctgggattacaggcccccactaccatgcctggctaatttttgtatttttacaatacaaaagagacggggtttagccatgttggccaggctagtctcgaactcctcacctcaagcgatgcacccgcctcggcctcccaaagtgctaggattacaggcgtgagccaccgtgcctggcctaactctgtgttatttgtattttgtcaatcagcatgtattcttttataatgaaaactgacaagtaacaccacgagcgggaggccccacggcgtgatgcgtgctcccgacaaatcttaatcccactggtttcagcacctcccagctctggaggaggccctagaagcgcagcgcaggagcgggtgtcagagtccagggacatccagagaaaacagtgccatgaacaacaagagattgactgacagacacctcaaccgaacacacacaggagccttgacgaggccccggtatgcgcacgggaagggccgggtgcgacgtgtcagggatgggggagacagcccagcacggactgcatggacgcacgggaggggccgggagcggcgtgtcagggatgggagagacagggacgggaagggcccagcacggaccacacagcacagcctcaccaaatcgcgaggatcttctcaggggcacaaacaccagtggccatcatggaatttctctcaggctgtatagagttatgaggctttctggtcttgacgtctgcgacttatttttaaacggttagaatggagagagggaaagccgccgtgggacacgctcaagtctggggaaccccatgagcaggaagtggacaatggacgccccttgtgctgccttcaacttttccgccagtttgacgtttcagaacacaacactgagaaacacaagcggcacatccccacagtgtcagatgaagaactggggctacctggcagcatctcctcagcctgcaggcggctctgaccacccccaacccccgagacttctcggccacgtcaagcacccatccgccacccacgtcaggacaaccctggcaacaggcgctggagggccgcagaggggcctgggccagctgccaggtgtggcatcaaggaagggccaggtgggacccccaggcagagaagcatgggcagagccaggggcccgcaggcagtcaggtctcacccagctcctcccaggcacagctgcagagaagagaccctgcccaacagggcactgacaggtgcagccgctatatccaagcagcttacaccccacagtccaccctccctcactcagcacagggctcccccagctcagcacagggacacctaccctcagccctcagcagtacagagccccccgctaagtgcagtccccctccatgaagctcagggcccccccaactaaatgcaggccccccacaaagcacgggatgcccccatcccactaagtgcagtcccccctccactaagcacagggccccttccacgacgctcagggccctgctcagtgcaggggtcccccctcagctcagaacccccttgctcgccctccatttctggacacatgcccctcctgctgccctctctgctaacctgctgccccacccctacctgtcccttcaggcctgcgctagccggcctgcgggaacagctcctcctggctgctgagcaggggctggcttgtggacgacagatctcacgcggctacaggtgccctccccacaggcttccttctgtgggactccctgcctcagtctcccctgctgctcccggcctctcctctcccctctctccctgcctgggggacagacgcaggggtcactagtgtcaccaccccctcaccggccaggccacagctctgaggcctccccgagtgctcgacttcccctcgtcacctggcacaggagttctggagggcatcggcacgaggcagggctgggggtggagccgccctctgaggcacaggtcttgtttcccctttgcagacacagcctgaggctcagcagggtcaggccaggtctccggccagtcagcgtgggctccggtgacaccaacacgacatcccccgcagtcactcacacagaccactctgcccctagaactctccgaaagcaccaccccaacccaccggcctctcttcctgtcctgacaaacggaccatggagtcgttgtgccatcttcctgggctcaaccctgatgaggctgggcacccacagagggacctggagttgtccacctctgcggcctctcttctccttgccaggaccccagagcccctgacaaggacggacagcagcactcctccaccctgctcaacaccgctcatggaaggccaccacgctccaccccacagggaccccagagccctgagaaggacagacgctcctccacccctgctaaacaccactcacggaaggccaccacgctctaccccgtgctgccactggagacaggcaggatgggagcccggctctctggctgcccgcagctccacgaggagacgatgcaggtggcccaccgggacagtgggaagctcactgggcgtcagcgtgggcctctcacagaactactgtcagagagctgcccgcgcttcccgctaagaccaacacagcttgagagaagatgccgggcatgtttcacagccatgcagctgggttaggaggcatcaagccggcctctgctgggttagatggcaccaagccggccttcacaggacgttacctttacagagctctgtgagcaagaggaactcagcctgccccgtgtctgactcctcttttcctatagacgctgcagaacaaaactggacaatgttcgggtggccggaaagctttttctgcagttgtcttgttaaaggagaacgtacataaccatgtccacagttctgtgcacttcaaaataaatgtagacaatattaacacactgaagtcagaatacttgaatcgaacccttacaattttagacgtcagagcggaagatgagggagagagcagtggacgaccgagagaaaggcagacagaggcaggaggagctgcaggagagggcggggacaaaggcaggcacaccggccacacacacctgaccacagcgacaccaaagtccatcccgcgcgtggcaggaggaggcagggccctcagggggctgtgcgcagggaggctgcggcgtggctgtgtccacccgaacccacactcaggcagccggcgggctctccgagtgaacagagctaggagaggaaagagaggcagagtctgagggcagccagggccgaagactccaggctcaggagggacatgtggcagtggacagggagtgcagcccccagatcctctgtcagcgccgggagatgccccgcccagtcatgctgggacagcctgagaagggacgagaggggcggctgagaagccacatcggggcctgtgggagccaggccatctgcacggctctcagccaggtctccggaggagctgagggggccgggccgggcaagggccccctgtggtaaccagcccatccactgggcagggagacctcttgggtaggaacaacttcattcccaacacttctgaatcttctactattaccctggcagtaaaaaaaaaacagaaaaaactgcttcttcctagaagtcgcctacaactaggtttggtaaaagcaaaaagccgattttaacacatgaaagacaacgtcacggagcagcctcttggccactggcggtcacagcttgacgcaggcctgtgcctgccaaagccaccgtgctggctcctggttccaggaaaaggataccatgaagcaaacttcttgaatgatggctctgttcttttcctcttcattggataatagcctctgtatcaggaaacagcacacacaaaagatgaaagcaagtttaccttcctactccacccgatgcatcatctcagacataagcacgcaacagagcaatgcaatgtgtctaatacagctccccccgtttcgtgtgtctccacctctgacccctgtaaaaacgtgctgggggttcaagaccctcaaaagatctttgtgatgcaaggacacaagaaaagtcaaaagcaggagcctttccccaaatgggccagagtaaaatgagacagacaagaaggaagagcggcaatgctctgcagacacgggggcagcaggcgtgcagaccacgacaacaggcccactcatgcccactctcaaaggcggggccaccctggtgcccagcgtggtgacagcaaatggggccttcttacgtctcaggacaaaactgcacagtacagaccctcccacagtgacccctatttacagaaatgctagcaacaaatattttttacaagcagcttttaaactccttgtattcatagagcccttattttggcacatggaggccaagagggcatgaccccaccatgaggtcacccccagcacagcccctgccacagggcaggcagggccacaggagtgtgaagcccaaagctggagaccaaggctcctgcagtgcccaaggctgctgagattcagcagaagcaaaagggacaagtatgtccaggctgtaaaaggaaacaaagtacgtaacagggacgcatccctgaaaagactgtcaccagacagtccctttacatacgtcagaaatccagagaaggcgttaaatggttcattacctttaatgcatactctctgccactccccacatcttgagcttcatacacaaatgcaaaccctcctgaaaattaaaaagacttgtcagttcaatgctatgattttatttaacatatcaggctttaaaaataccttcactaagtaaaatacaaattgacttgtggcgtggccagcagttttctacaaaacataatggccccagcgtacacgccccccgcaaacacagccccagcatacatgcccccacacacacagccccagcgtgcacggcccccccacacacacacagccccagcgtgcacggccccacacacacacacagccccagcgtgcacggccccacacacacacagccccagcgtgcacggcccccacacacacagccccagcgtgcacggccccacacacacagccccagcgtgcacggccccacacacacagccccagcgtgcacggcccccacacacacacagccccagcgtgcacggccccacacacacagccccagcgtgcacggccccacacacacagccccagcgtgcacggcccccacacacacagccccagcgtgcacggccccacacatacacagccccagcgtgcacagcccccacacacacagccccagcgtgcacggcccccccccacacacacagccccagcgtgcacggccacacacacacacagccccagagtacaaggccccacacacacagcctcagcgtgcccggccccacacaaacacagccccagcgtgcacggcccccacacacacagccccagcatgcacggccccacacacagagccccacacacacacagccccagcgtgcacggcccccacacacacagccccagtgtgcacggccccacacacacacagccccagcgtgcacggccccacacacacacagccccagcgtgcacggccacacacacacagccccagcgtgcacggccccccacacacagccccagggtgcacggccccacacacatagccccagcgtacacggccccccgcactcagccctagcgtgcacggccccacacacacagccccagcgtgcacagccccacccccaacacacagagccccagcatacacggccccccgcactcagccccagcgtgcaaggccccacacacagccccagcatacacggcccccaacacacacagccccagtgtgcacggccccatacacacacagccccaacgtacacggcccccaacacagatagctccagcatgcacggccccacacacacacacagccccagcgtgcacggccccacacacacacagccccagcatatacggcccccaacacacacagccccagcgtacacggccccacacacacacaggtccagcgtacacggcccccaacacacacagccccagcgcacacggcccccaacacacacagccccagcgcacacggccaacacacacagtcccagcgtgcacggccccacacacacagccccagcgtacacggccccccgcactcagccccagcgtgcacggccccacacacacagccccagtatacacggccccacacacacagccccagcatacacggccccgtgcactcagccccagcgtacatggccccccgcactcagccccagcgtgcgcggccccagtgcatacaccactgcctttcacttcctctactccagagacagacaggaataacctaagaacagaggtcaatagaaggaaaaacaaaaccacaagcagttctccaaagaccaacgagactgataaattctagacagactgatccagagagagaggacagatcaccaatacccagaacaagagaggggacctccttccccgacgcccaaaagaggaaaagacataaaagagaatacacaccaacatcactcacgaatgtggacccaagaattcttcataaaacagcaaaccaagcccaccaagacatcaggagcagagttggtttaacatttgaaaatcaatttaattctattgttttggggtctaatttgcttagttttcttttaggtttctgcagtggaaaaactacatcatgaaatttaaaactctcagcaaacgaggacagaaagaaacctccccagcctgatagacggcatctgtgagagaccaacaggaacactgcatttcgtggtgcaatgtcgaatcctcccttctgagatcaggaaggaggcggggatccttgttctcaccactgatggtcgacactgtgaggaagttctcgccggtgccatcagtcaagaaaaagaaataaaaggcatccagatgaaaaaaggagtaaaattatttttatctgcaggtgacatgattatctatgcagaaaatctggtgaaatctactaaagaaaagctaccataacaaacgcattcaggatggttgttggatataagggcaacatacaaaaaccaactgtgcttccacatgcccaaggttaggcagtgattttttagatataagcacaaaagcaggacccataaaagaaaaataatgataaatggacttcaggaatttctgctttttgaaaactggtcagaggatgaaaagataaatcactactaagttttgcaaatcatatacctaataaaggacttctatcgagaaaatattttaaaaatccaagtaacaacaatttttttttcttctgagacagggtcctactctgtcaccaggatggagtgcagtggcactatcacaacccactgcctcgacatctgggctcaagtgatcctcccacctcagcttcccaagaagctgggactacaggcatgcgtcaccacacccggctaatttttttattctttgaagagacgaggtttcgccaagttgcccaggcgggtctagcctcccaaagtgctgggactacaggtgtgagccaccacgcccagaaaacaacaaaatttttaatgtgcaaaagatatgaatagacacatcaccaaagatatacttgtgacaagtacacaacgtgtcccaccactgcccattagagaaatgcagacttaaaccgcgaagataggaccccatacctagcagaatacttgacatttaaaaaccgcccagaccaagtgtcgctgaggatgtggagcgactggaatgcttatgcacagcttttggaaatggaaaatggtacaatcactctggaaaacatgttggcgatttcttaaaaaggtgaacataaatcaacaatacagccctgacattacgctgctgtgtatttacccaagaaaaatgaaggcacatgtgcgtaaagagacttctacacagcagcttcatgtgcaatagcctaaaaatggaagcaacccaaatgtccatcaacaggtgaatgaacaaattacccacacctctaacactacctagcaataaaaaggaggaaactgctgttacatgcaacaacatgaataacacacgaaaaggcagtatgccgagtaaaagatgccaggcgaaaaaagagtacatacacatacatacagtcaatgtacagaaaactccagaaaacacaaacgaccaggccaaaaaaagagagtacatacacacatacagtcagtgtacagaaaactccagaaaacgcaaatggatctatggtaacagaaggccaatgccaggccaaaaaaagagagtacatacacacacatacagttagtgtacagaaaactctagaaaatgcaaatgaatctatagtaacagaaggccaatgccaggccaaaaaaagagagtacatacacacacatacagtcagtgtacagaaaactccagaaaacacaaatggatctatagtaacagaaggccaatgccatgccaaaaaaagagagtacatatacacatacagtcagtgtacagaaaactctagaaaacacaaatggatctatagtaacagaaggccaatgccaggccaaaaaaagagagtacatatacacatacagttagtgtacagaaaactctagaaaatgcaaatgaatctatagtaacagaaggccaatcagtggtttcctgggatgggaacaggaaagcagggcgaagggttaccgtggggaggagggagaccgtggcgctgacgcacatgtttgctgccttgattagcgtggcagatacagtgtgtgacacacacatacatacatgacatgtgccgaaacatttaaaacatgcagcctgtatatctcatttttatctcaactgttaaaatatttaaataataaataaatctgtgaggaaaaacacagatgaaaggaagtaaatggaaatccatgaaatagaaaatagaaaacagatggctccactgctaaattacatcaaacacttaaggaagaaatcacaacaagcttataaagtctttcattagatagaggagaagggttcccagctcattgcttgaagttagcataacactaaccaaagaagggtataaataccaaattaaggaaagagatcactcattaccatagacacaaaaaatcctcaagaaaatactggcaaattgattccagcaaaacataataaggatactacatcatgaccaggtggtattcatcccaggaatgcaaggttggtgtaacattaaaaaatcaatcactgtagtaaacaacattagcagaatagggaacactggatcaccaacaaaatttagaaacaacaactacaaaaaactgacttctaacataagacttaatcgtgttttcttcctaagatcagaaacaaggcaagatgtctgctctcagcactgtaagccaacattttactggagattcgagttaatgcaagaaagctaggaaaattaataaaaggcataaagatcaaaaaggaaaaactaacgaaagacaaaacttcagttagctaggaagaataagctcaagagatccactgtacaacacggtgactatacagttactaacgacagattacattctgaaaaatgccccaaaactgacaactatgatgcagtacatgtgttaactagctagatgtggtcattccacgatgcatatatacttcaaaacatcatagcgtacatgacaaagacatcaattttatctgtcaattaaaaaatatattaaacacaaaaaaaaggaggaactaaaactcctctcattttcagatgccatgactggaaagacagaaggctccaaaggcctcagcgccccatgaccttagaaaggcagaaggctccaaaggcctcagcgccgcatgaccttagaaaggcagaaggctccaaaggcctcagcaccccatgaccttagaaagacagaaggctccaaaggcctcagcgccccatgaccttagaaagacagaaggctccaaaggcctcagtgccccatgaccttagaaagacagaaggctccaaaggcctcagtgccccatgaccttagaaagacagaaggctccaaaggcctcagtgccgcatgaccttagaaagacagaaggctccaaaggcctcagtgccgcatgaccttagaaagacagaaggctccaaaggcctcagcgccccatgaccttagcaggacagaaggctccaaaggcctcagcgccgcatgaccttagcaggacagaaggctccaaaggtctcagtgttgcatgaccttagcaggacagaaggctccaaaggcctcagcgccccatgaccttagaaagacagaaggctccaaaggcctcagtgccgcatgaccttagaaagacagaaggctccaaaggcctcagcaccccatgaccttagcaggacagaaggctccaagggcctcagcgccccatgaccttagaaagacagaaggctccaaaggccttcagtgccgcatgaccttagcagggccacaggtctctgggtgcctccccagcctcctcctctccagccgcaccccgcatttggttccaagccaccacattgacacaactgctcttcctcaaacgcagcaggcccattcctgcccagggccttcccacacaccacaggcctggaaggggcccctgaccctgggcacctcctggcttgctcccttgcgtccctcaggagctgctcctcaccgcttctgcgatgccttccctaatgcacctgcccatcccagccactctttattaacttgttcctttttcctgacactttctgatatctaacattacatcacacactactcggatacctgtttaccgtctgtctcagctagactacaaacaccatgaagcagaaatttcctccacattgtttacatctacatccagcacctaagtggtgcctgaccaaaagtgtatactaaggtctgggaacggctcatgcctgtaatcccaaagcttagggaggctgaggcaggaggatcacctgaacccaggagtttgaggctgcagtgagctatgatcaagccactgtgctccaacctggatgacagagcaagatcttgtcttaaaaaacaaaaacagggtgggtgcagtggctcaggcctgtaatctcagcactttggcagactgaggagggcggatcacaaggtgagatcgagaccatcctggctaacgcagtgagaccccgtctctactaaaaatacaaaaaattagcccggtatggtggcgggcacctgtagtcccagctactcgggaggctgagtcaggagaatggcatgaacccgggaggcggaggttgcagtgagccgagatcacgccactgcactccaacctgggcgacagagcaaaagtccatctcaaaaaaaaaaaaacaaaaaaccaacaacaaaaaaacacagcatcactgatgtgacttttaacacctctaacgcagtatcacacacagtgcagggaaagcggaaggaaaatgagcaggaaggatgtgcattgaactcctggtggtgaaaacgccaccaggaaggagaaggtcccagaagtccaagaatattgcgacattattctaccaaaattgtgaaaaaggtttagagccattttttttttttttttttttttgagacggagtcttggtctgttgcccaggctgcggtgcagaggcacaatcccggctcactgcaacctccgcctcccgggttcaagcgattctcctgcctcagcctcccaagtagctgggactacaggcgcccaccaccacgcctggctaatttttgtatttttagtagagacggggtttcaccatgttggccaggatggtctcgatctcctgacctcatgatccccctgcctcggcctcccaaagtgctgggattacaggtgtgagccaccatgcccggccccagatactattttgttaaaaggttaacgtttattctggatagtaggacataggtgttcgttatgttactgtatttttctgcattttaaaatatttcataatttttaaagatagtaatatctggacttgatctcaggacttactacacagctaaattaatcaaggctatgtggtattggcagagggacagatacaaagatgactggaatggaaagaaaatcgcagaaacagccacacaaatcaatccaggtgatttcttcttctttttcttttttttttgagacggagtctcgctctgtcacccaggctggagtgcagtggcacaatctcagttgactgtagcctccgcctcccaggttcaagcgattctcctgcctcagtctccccagtagctgggactacagacgtgcgtcaccacgcccggctaatttttgtatttttagtagagacggggtttcactatgttgcccaggttggtctcgaactcctggcttcaggtgccttggcctcccaaagtgctgggattacaggcctgggctaccacgcccagcccatcgagatgatttctgagggaggcacagaagcaactccatggaagatccacaaatggtgccagacaatgagcttcatgtaaatgccagccacatacagtaattcaccaaaataaacacggacataaatctgcaactgtgaaggtttaaaactttcagaaaaacacaggagacaaatcttcaagataaagagctaagaatccttagctgtgacaaggcgtgattcgtaaaaggaaaaataaatcagacttcacaatgaaaaactttggatctgcaacagaccccgctttgtttgttttttttttttaattaactggtctgagtttgcgtccaaaaagatcctgtttaggggacgaaaggacaagctgcagactaggaacagatacttgaaaaccccatgtctacgaaggacttaaatctacaataaagaacactcaaaacttggtcaaaaaaacataattaggaagtgggcaaaagacatgaacagacatttcacccctgaagatatgcagatggcaaagaagcactcccaagctatcgggaaaatgcaaatcaaaaccacaaggaggtatcgctacacatgtatcacaatgatcacagtaaaaaccacgacgccaaatgctggtgagtacaaagagaaactcgctgttagggactcaactgtgtgcccccaaaatgcatctgcggaagccccagatgaccctatgcggagacgggccctcaagtaatgaaggataaataagttcatacgagtggggccctaatccaataggactggtgtccttataagatgaagacacaccagagatgtcagcatcccctcagcaaaaaggcagcatcggccgggcgcggtggctcaggcctgtgatcccagcactttcggaggccgaggcgggcagatcacttgaggtcgtgagtttgagaccaacctgggaaacatggtgaaaccccgtctctactaaaaatacaaaaatcagcggcgcatggtggtgggcgcctgtagtcccagctactcaggaaactgaggcaagagaactgcttgaacccaggaggcagaggttgcagtgagctgagattgcgccactgcactccagtctgggtgacagagcgagactccatctcaaaaaaaaaaaaaaaaaaaaggcagcatctgcaaaccagcaaaagaggcctctcctggaatcagcactgacagcatcttgctcttggccttcaagcctccagaactgcgagagtgaatttctactgctccccactcagtctggagtattttgttatggcagcctaaccaggctgatacgctcctacattgctggtgggaatgtatggccactcaagaaaacaatctggcagttttctaacaaactaaacacataattaccacacatgaaccagcaactgcactcttaaacatttatcccagaaatgaaaacgtatattcacacaaaaacctatacgcaagtgtcacagcagctttatctgtagtagccaaaacaggaaacagcccagatgtccttccacgggtggctggctgggcaagccgtgcacactcacgcagaggagtctcaccacgggaaacaagctactgacacacaattacctgaagaattctgcacttccccttacactgcatccttcgaatgacaaaatcacagacagagcaaagactagaggtttccagagggtaaggaaatggcgtggctgagaggtggcatgagggctccctacggggatggagacttccacagcctcacctgcaccagggttagcatcccgaccgtcaccactggggaaaccaggcaagggtctaaaatagaaaagatctccatcttttctcacagccgcgtgggaacctacaatgaactcaaaataatacagtttatttaaaaataatagtaacgtataagacattaaagaatggcatgtcgggtacctccaagaccctgttatatacattttacagcacacactctgccaattaaggaacaggcacaggccaggcacagtggctgacacctgcaatcccagcactttgggaggccgaggtgggagaatcacttgagcccaggagttctgagaacagcctacaggcaacataacaagactccatctctaccagaaataaattaaaaattagccaggcgtggtggtgcgtgcctgtggtcccagctacctgggaggctgaggtgggaggatcgcttgagtccgggagttcaagactgtggtgagctgtgatcatgccactgcactccagcctgggcaacaaagcaagacctcatctcaagggcagggagtggaggggtggggagtggaggcacagagacatcaaatgctcaagccaggtcaaatctcaaggcccaggttccctgaggcagcctggcctgggacagcagagtgaccacagctaaggcttgccttctctttctcacataaattatataaatatataaacataagacctgtatccagagtaagcagaaactccctgcccaataaaaaatggacaaaaaggccaggcgccgtggctcatgcctgtaatcccagcactttgggaggccaaggccggcgggtgacctgaggtcaggagtttgagaccagcctgaccaacatagtgacaccccatttctactaaaaaatacaaaattagctgggcatggtggtgcatgcctttaatcccagctagttgggaggctgaggcaggagaattgtttgaacctgggaggtggagcttgccgtgagccaagatggagccactgcactccagcctgggcaagactccctctcaaaaaaaaaaaaaaaaaaaaattgctgaacatcatcatcagggaaattccaatgaaatcacaatgagatcgacaccactgcacactcacaagaatggatgtaatcaaaatgagagaccacaagaaatgctggtgaggaagtggagagccaggaactctccactgcagctggtggaaatgtaaaatggtgcagctaccgtggaaggaggtttggttgtttcatgtgaagttcaacctaaatccaacctgtaaatcagcaatcctactccttggtattttttacccaagacaaagaaaaacacacgtccacaaaaagacttgaaaaaaaatgttctcggcacctttattcataacagcggatacggtttggatctttattcataacagcggacacggtttggatctttattcataacagcacatacggtttggatctgcgtccccatgcaaatctcatgttcacttgtgaccctcaatgttggaggaggggcctggtgggaggtgaccggattatggggcggagttccccatggcgtggctgctctcaggatagtgagatctgactgggccatgggtgtggagttcctcccggggctgctctcaggatagtgagtgctctcctgtgagatctgattgggtcgtgggggtggagttcccccggggggctgctctcaggatagtgagtgctctcctgtgagatctgattgggttgtggtggtggagttcccccaggggctgctctcaggatagtgagtgctctcctgtgagatctgattgggtcatgggggtggagttctgcccgggggctgctctcaggaggaggttgccaggatctgagatcacacccctgtactacagcctgggcaacacaacaagactctatctcaaaaaaataagaataaaaaaataacaggcacaggatatgaatgtgcaatgccagaaggggaggctgagcagcaaataagcattaccaaactcgctactcagaaaggcacaaatcaaagcttgacactttttaaacccatcaaaatgtccaaataaaacaaacccccaggggacactctgaggacttgggacactagagtctggtgcccccgagcagcctgcaggccccatgagcagagctgggcaaccttcccccacacagcccaccagcgtccatgcaaagggctgaggacacctctcaccaggatgcgtgtaggatgcacggagcacgctggggacgggacagagtgccgggggacagtgaggtcagtacaggaccactacaggcagatctgagtatcttttttaatcaactcggcctcttttaagaaacagacacttttctaacgtaaaataccacataccaacattttcaatacacacataattcacaacactacagaatgaatctgtgtcccctccaaaattcctgtgtgaaatcctaatacccaaggtgatggtgttaggaggtggggcctccttgggggtgactaggccatgaaggtggagccctcaggactgggattactgccccagagagcactccctcaccccttctgccctgtgaggacacagcgagaaggtgctggacctcaccagacaccagatctgccggcgccttgcgcctggacttccagcctgcagagccgtgaggaataaacaaacgtctgtggtttataggcccccagtgtacgacgttctgttacagcagcacagacggactgggacacggggatgcgcacccacacagacaaccatgagcaattcaccaggagtccacggagtggaggaggaggaaaggggagtggcccagcccaactgtcacctcccccagtggtgagcccacccgggggtcgtccccaacagtgacctccccgaacgtctaattcaccccaagggggtcctcccccgacagtgacctccccaaacgtctaattcaccccagggggtcctccctggacagtgacctccccgaacgtctaattcaccccagggggtcctccctcgacagtgacctcccccaatggtgagcccacccatggggtcctccccaagagtgacctccctgtatgttaacagacagaaaccacagaagtaacacaggcttgttcctgccaagggtcagccgcagctgagcatgaagtggtgttggcctgtcactctccgccccaacagcctctactaccttatatgctcagacatctcctccagggcacaatgcgcagagcaacgggggccaggacaggggccctaaggacacctccctggggctcccagcccccactccaccactcgacctctggcaagcaactaatctctgcaaacgtcacttttctcttctgcgagatggaagtaattatagtacccactttccagggctactgtgaggaccacacaatccacataaagtactactgaccatgctcggcaaatacgaagagcccctaagggttgctgtggtggttctgaccatttttacttcacgctgggaactagccaaagtggacaaatgttgatgatcaagctgtcaacttggaagtgaaggcggttggtaccaggagagccgccagggggcagctactctgtggcagaatctgggcctcacaggcctgatgacctagaaccaactaaccaagccccagagaccctgcttacctgcgctccgcactgccccgcacccctcccagctcacctgcgctccgcactgccccgcaaccccccccaccccgctcacctgcgctccgcactgccccgcacccctcccggctcaccagcgctccgcactgccccgcacccctccccgctcacctgcgctccgcactgccccgcacccctcccggctcaccagcgctccgcactgccccgcacccctccccgctcacctgcgctccgcactgccccgcaccccttcccgctcacctgcagtccgcactgccccgcacccctccccgctcacctgcagtccgcactgccccacacccctcccggctcacctgcgctccgcactgccccgcacccctcccggctcacctgcagtccgcactgccccgcacccctcccggctcacctgccctccgcactgccccacacccctcccggctcacctgcgctccgcactgccccgcacccctccccgctcacctgcagtccgcactgccccgcacccctcccggctcacctgcagtccgcactgccccgcacccctccccgctcacctgcagtccgcactgccccgcacccctcccggctcacctgcagtccgcactgccccgcacccctccccgctcacctgcagtccgcactgccccgcacccctcccggctcacctgcagtccgcacccctccccgctcacctgcggtccgcactgccccgcacccctcccggctcacctgcagtccgcactgccccgcacccctcccggctcacctgcagtccgcactgccccgcacccctcccggctcacctgcagtccgcactgccccgcacccctccccgctcacctgtagtccgcactgccccgcacccctccccgctcacctgccctccgcactgccccgcacccctccctgcttacctgcgctctgcactgccccgcacccctccctgcttacctgcgctctgcactgccccgcacccctccctgggtgagcgcaggccccgcacccctccctgggtgagcgcagccaccgcacttcaggctctgggtccaggagaggtacaaagaagcaaggatgacagaaccctggtggctaagagaacagcacagagctgcagaggctggtgccctcagtcacatggccaagagaacagcacggagcttcagaggctggtgccctcagtcacaagtcctatgtgggaagagggtcggctacaaggctggctcgccacagcaacctaagggtctacttttttttgagatagagtctcgctctgtcgtccaggctggagtgcagtggtgcaatcttagctcactgcagcctccacctcccaggttcaagtgattctcctgcctcagcctcctgagcagctgggattacaggcacgcgccaccatgcccagctagtttttgtattttcagtagagatggggttttgccatgttggtcaggctggtttcgaactcctgacttcgggtgatctgcccacctcggcctcccaaagtgctgggattacaggcgtgagccgtcgtgcccggcccggtctacttttaagatcagtctaaggctgggcacattatctcatgcctgtcgtcccagcactctgggaggcctaggccagggggatcacgtaggcccaggagttcaaggctgcagtgagtcgtgatcgctccactgcactcaacatgggcgacagagccagactcttttcaataaaagaaaatgatctcaagtgtaccctgcggaggacacatggggccagcatgcggcctcccctgccactgagcccaccttggagacatggggccttcctgccactgagcccacctgggagggtttctgaaacttgcaaccaagagtcttgcttgtaccacatgattctgcaactgtcagtcagtaccaaatattcacagtgccctcacccagtccagaacattcttttttcttttcttttttttttggtgagacggagatttactcttgttgcccaggctggagtgcaatggcgtgatcttggctcaccgcatcctccacctcccaggttcaagcgattctcctgcctcagcctcctgagtagctgggactacaggcatgtgtcaccacacccggctaattttgtatttttagtagagacgggtttccccgtgttgcccaggctgatctcgaactcccgatctcaggtaatccacccgcctcggcctcccaaagtgctgggatcacaggcgtgagccactgcgcccggcccagaacattctaagtaagtgaagggaggaagcctccaaaagccatgtcaaggaggaagaagggtggagagtcaggaccacacacaagtggccctgggggtgggagtaggctgtgccctccccattccttaggccagagcttgacccccaaggctcctgagcgggcccagccactcagctaacactgcgcatggcacacaagggctgcgggctggctcaaattacatacaacacccaaccaaacgcacgaggcgggttacgcttaaaccatacgacggctgtgcggcatcgttttcttttctgcctcaatttatctcactagcagtaaccccgagttcaagtcagccacacagggaaggtggatttccctgcagtcagggcaccacaggctccacttcagaagcaacggcacgcagaacccaaaacaaagaacacacagcatacacctgccctgggcatctctgacatggttggtgctcctgataatctgccttttaaaaaagtgaagactagctaggtgcagcagcacatgcctgtaagcccagctactcgggaggccgaggcaggaagatccagagcccagttcaaatccatcctgagtaacagcaagacctcgtctcttaaattaaaaaaaaaaaaaggaagatgacagaacaaatttgaagaaattagaaagctatctggttccacagttctacctaaaaacccattcacaccacaagtccaaattcctaaaagctatgaaaaccattttttcctaactcacttgacagcaaatcctggtctatcataataacctcatttgggataaaacctgacatgaactgatatggggttaattacagactttaattatcccacagtgagaatatttattcatttaattacagaaatattaatgtattcaattacagaatactttcccaagtcttctgggagtatcccacgatatacaggttatatgctgcaatgaccattctgaaacctgaaaaattctggaagtgtaaacatctgtactcaagggttcagattaccagccatcaccatgtttacacaagacagcctaaactcccatagcctatgttctaaggttgctgttcagacaaaacttaattaagtatgtttatataaaatacttaattcagctttcacactctgtttcagttcaaagaggcttcaaagtacttaggaggctgcaggccacctattaagtttacaaggaggaaatctacagctcctaattgcattggttatttttatctcctgacttgcctagatagcaaagggaaacaagttcttttgcacaacctcagcagctgcccacatttccttgttcttcttcctgggtgctaagtgacccacaagcttctttctttatacgaatcttcctctccgggccccagtgagggtgcattctccatccctcccaccaagatccgtgccatcttctgcttggccccttcccaaagctcacactgtctgtaccacccctaaggatctgtccctgtgctgcctctgtctctccaccccttgagcacaagtctgaagttccagaaagcaagtcctgtccacaataaacttcttaaagaatgaagataaccacctagtattttcagaataaatgatttgatctgagagaaatcttccaactgatgtgaaagaatatcacacttcagcccccacttctgaaagaagagcttagactttctgaccaaatcatacccaaaatctgtttggttttgaccacaatggagacaaagtgtgtgataatgctacagtcaaaatgtctccgcaggccttttgtgataatcagaattctgggatagtctcctgtctggtcacagagcaggcacctggacaggctaaccctccagccctgagaggtaccagggagctggtgagggtgagggcttttgtgtcgcttcactccctctccctgtgccaatacagcagaatagagttacgcttccgcacccaagtcaactgtgtttagcccataaacttcacagccagtgaaatatgacacacctccaggcaccactggacaaaaaatgtaaggaaaatccacaagagagaatgggacccactggcactggtgatcgattccgtgtgaacggagaggacatccagggagctagaaatagcatgcagagacaaaactgactcaagactgactcaagaggacttaagccgagtgacctgtccactctgcaagttctatataggtcacaaccactggctctgcttcctgtactacacacggaatcacacgagtagatgttcaccgggaagagaaacactgaggtgttgaaagacgaagggggatcacgagacacagcccagtctaccctcggccaacccccccaccccccaggctacaaccgcaactacctgcaacacgtgtgcacccaccaactctcaagttccctggactgtagaagaaccagccctaacctccaaagtccagtcctgtccctgcctgctcaataaccccagatgtccggcaaaaggccaaggcttaaacccacctcctgcaccgctcacctcctgactccagctgtcggccttctaggcaccgtccctcagtctccgctgtgggtccccacccaagctccctgcctgccaccatcccccacctcaccgtaacatcttcccccacccaccctgagggggttccccaagccccaggccttgctccgacttgaccctactcttatgacaagaaagtaccccgacccggtcccagcctcgccctccgcaatcaccgccagcaggcactcacctacgcccgcgctatgaccttcgcctggccctgacccacgccctcggcagagaccctcccctggccgaccctgacccacgatcccgctgggaccctccccagccctaacccacgcccttccactccgggctgacgctgcccccagcgtcccggagacaacactccgcggccgcacccgcgctgccgacccggggcctcaccttcggccaggacccgccgcacccgcagccgcagctcgcccagttccaccgtctgccccacgaagtcactctggtcgcggccggaagcaccgcccagggagcctggacccgccaagaagtcgagcgccgactgcagcagcgacatggcggtggctgcgccgcaccccgcggcagccggagtggtcgggctcgggctcccgctccctcgccgtccgggtcagctcagcaaccgccggcccggaggtgcaccatcttccgcctcgacgccgtgacgtaggcgcccgtgaggacgcgtcgcgtcaggcggcgacccggcctagccccgtcccctccgccgcggcctcacttcctggctgcgcgcgcaggcgcggaggtctgacggagacagcgcgtgcgcggcgtcgccgggcttgcgatgaacttccggctgtcaagctcccggccgggctgactcaagcggaggcgcgcggaacagtcgccgaggcgattcccgcccaggtagttcagcgccccagtccagctcccggtaccgttccccacatggtctgttttgtgggaggctccttctcaggtgtctccggtttaagcgcttcgccatcctctgggtggagtcagcctcccgtttgctgttagcgccgcgtttgcgaatgggttcgcgaatttttctctcagttggctaaggagcaaggagttagcgtgcgttaagctttcagtaaatacttggttttcgtctcatggaggtcggagtttcctgtgacgcttagtgagtaaggttggcagccccctcccagcagccaggcaggcagtttgcaggggaaacgctgctgcattgctctgtcttccgaggagagggccagggtctggcctggggcagtgaccagtagtgggagccgtgggctagaaaaaccttcgtcctgggcaaccacaacactgcagagactgccctgtgaccctcaaggttcgttctcaccctgacattttccaaggcaaaagcaaatcctcatgaaccacttggaagggttcgtaatgcccaactatttggagatgaaatggtgactttccttataggataataaggaaatggctcacagacaatgcatttttagtttttggcccacacagtatttgggggttgggagtgggtagcaggaggtgaattagttgctatcatttaaagactgatgccaggcgcggtggcttacacctgtaatcccagtgctttgggaggccgaggcaggcggatcacctgaggtcaggagttccagaccagcctggtcaacatggtgaaaccccgtctctactaaaaatacaaaaattagccgagcgtggtggcgggtgcctgtaatcccagctactcgggaggctgaggcaggagaatcgcttgaacccgggaggcgggcgccactgtaccctagcctgagactccgcctcaaaaaataaataataataataataataattgaaaggcctaaatgttaaaaacctagttttccagcttctgtggaaaaatcaaacctgtcaatattggacccaaaatgatgtgtgttaccaattacctagagtggtcccttgaggtaagacacagtcatttgcctgaccagatgggctcatgtatgttacctgcctggttcctatagtcatttaaggttgcaaccccttcaacagagttatttgttctccaactcaaaaatggattctaaagctcacatcagcctcttagccgtcccagaagctaacatctgttatctttatcattaaaagataatagcctcagctcgttggaacacttatctatgttatggaatgaagtattgcatgaagccaaatgacatctttaaaaatat

SEQ ID NO: 215 - DNA, 177026 bp, Homo sapiens
  source 1..177026: mol_type = genomic DNA
cactgcctacaactggcttgcacaaactaaaatgtaaggtagaaaccataactattagcgaaactacatttaactttaaaaattataaaaatctctactatgactttcaaataatagcgagaatttcctttctcccttttgcaaagtgtgccttattttaaaatgcaaaaaactgaaaatatatacgaaaaagttatagactaattcaaaacaatgtattaatattttgacaatctctggcacttaaaatgagtcagacgtcccaaaacatctatttcgtaactttatgataatgcagcatcaccataaaagaaccatatgaaacacccccaaaataaagaaacacagcaaaattgacgttaattctggatcaagataattttctgagtttccacacgatgtttttgaatagcaaacgttattcaaacttgcaaatccattaataaatgaagctttgaatctttaaaaatctccattcggtcagaaaaattcgtttatttctatgctgttgctgttttaaactttgtatactgggaaatttctaagggaaaagccatgggttcaattatctttcacccgtcctccaaaaacaccacaagcaaaacctcctccccagcttttctttataaagaactgaaaaagtggttcgactacctttttttcagttatctttgctctgaactctcccctacacacttacctcggaccaaaactggccctggcaagactatttaagctatgtctccaggagactcacaagttgcgtttcgcagtcaggcctgggagcagtaaggacacccccgttttctgacttctcctagcatttcgcacccgctcagttccagtgtgaagaagtgggggcccggaacgctgggcccgaaagggcaaagccagggcctacaccgcagcatggtcaccgaggcggctagcgcggtggggaggcagaagacagagaaccgaacgcctgggaccaggggcatccgtgtaaaccgaagaggcgctcagactcggagggcaaggcccggggcccccttcgctgcctcctttgccctcccttcccccatgctggagaagcagggcccgggcccggtgcgggaacggggaggaggtaaaccagtcctgtcaccgcactgagagaggctgtaaacggcacatgctctacggggagaggccgcgggcgccccggcccggaccccgaaaacaagacacatcaccaccctcagagttccattccctgcgcctcaccaggtcgtagtcctcctcatcatcgcacatgaaatcatcctccatgtcagacatcttggccgggagggggaggagaaattggagacaacctcctcccacaatcctccgcggctcagaggcgtcactctcagcttctttccgccttccagtccctcttagaggagctgtttcctgccggaactaattatctcgacttgtagctgattcgctacgactccaaaagagactgcaccaccccccgtttcctccgaagtggttggtgccttagcaactaaagctggcaactgggacatcgtccggtgctgcaggtctcagccgaagggcgtcggaaactgcgctcgcatcgagcagtttccagcctcctgggtaaaggagcagtctcctcccttgcttgggactctggacgcatctcattccggtgaaagtaagggacagcttaggaccagaagcctttcgcggagaaaaggctgacatgcccgtcctatatgacaggtattatttctgctatcattgtacgtgtgcatttagcccacacattgcggtgggtgttcctaagatacttggagtacttttcagcaacacagtttacacttaatgcttgttatatttgtagttgacaaaacaattctatggatatcctaaattaggtatgcagctatcagttgagttgccttaaatcttactcagttgttcaacgagttgtaaactgacctttacagcccttgggaccaaattaaggtaacaacgactggtttttaaaaaatacattactgtgaacctgagggcatcatgttgtaaggagatgggggctgcggtgactcgcgggatcaggaatttcaagagaaccgagcggaaagggaaatccgcaacatgaagccctctctcgctcccaggcacccctctaccagcagcctcctgccagagcagattagtctctatccagaaattaagggagagattgctcgtaaagatgacaagctgctgtcatttctaaaatatgtgtgtgttgattccaaagatcctgtgtcttccgtgcagctgaaagctgctgaaacacgtcaggagccaaagaaattcagattgccgaaaggccatcactttgatatgataaatattaagagcattcccaaaggcaaaatttccactgtagaagcattgacacttttcaataatcataaactttatccagaaacatgaactgctgagaaaatagcgcaagaatatcatttagaacagaaagatgtgaattcccttcttaaatattttgttacttttgaagtcaaaatcttccctcctgaagacaagaaagcaatacaatcaaaatgaagaaaatcacaaaaatttcctatgtgtactcctcatccctcatcctgtatattttcttatttttgcatattaaattatgttaattaccaagtgtttaatgctctcattgtgagagcatcctcttaatatttattgagctccctgaattttcaagattgccatagactgtattttgttttcttttaatttggtttaggcatatttcatatgtacatgttagcatgactaatcagcacatctgtacctttattataagtaaaagagttaatttgttattttagacacatcataccaacttttaaattggtcatatgaccccttgggaagtgtcctgaatccctcatttaagttttcctatccaatttaggtgtttagttcattcttcatatgtgatagtgaaagtaaaagctttcctgactcttaagactgacattttcttgctagggaaagagactcgatagtaaggtagactaacagtatttcccaaataaaggcacataggagaaaataaagaatcaataaaatctaattaaaattactaccccagggaataagaagtattgaggatttattttattttgaattggttttaagtatggaataattgtctttacagttataaaaagtaattagtggtgtttacgaaatgttgggaatttctgctttgacaaatagttaagtcccatggccttcagagagagaggcagtagtagaaactttcgaaaaagtaacatttctctggatttaacatggaactagaaaaatttaaagaataattaaaaaaccatggtaaatgaaatttggtgattatatatagttttggatgttaatgctagttgagagaagagagaaaaaatagcaagtagaagcagagaacaggatcattggaagggacctgagaaattgctgctttatccattttagcaaacttattagcacggcatgtaccagtactaggatcttgagtaagagtgtgtgagtttagctctgcctaatatattactacttgtgggatctttgggagactatgtcctctttgagattgaatttcttctataaaatgagcataatgctaccttacttaaatttaagggttatcatgaagataagtgaaatagtaaaggactacaaaagaccaagggaataatgaattttttttttgtagtggagaaacgcctggggagaatatatgacctaaggtttctgtagtttatgacctaaccaggcccagaacttagtttttcaaatcctagtagtgtgttttttctgatgtgccaaaaagcagcacacctcagagaagggaataagtgtgaattgtgggtatattggggttatcagtgtgcttctgagggaagataggcatcactacttcccagagatgcccctggaaatgatacagaagatgctaaagaattcaacaagatgacggaatgaggcatttgtagtaatgctgagaacagaaaaatgaactaagtggaaaatttgtaagcatgtctttgaatgtagattggttaggtgaacaaactacctagtttatttttagttcagtacaataattgttttaagaaaacatgaaataactactcaatataaaatgcattttaaaactcctgtaaatcagtcaaaactttattccatttgtcataatggtaactagttgagtcactaatactagtacactcttatttctgagccatctttattcatatctacattgtgtggttaggcagctgttatgtggtatcacatgataaaagatttcttcccataccattaaaaaaatactattacacaaaatcattggcagaattcaaaataaagaaaaaaatgaaataaaggggaaaaactgcttttcaaataggtagcattttccacgtaaacttccagatctgtccacgtgactccacaaatggttatgtagttaagcatatagatttggattatttttgcatctatgtagcagcataggtcaatatttggttgtttatatttagagacaagatcttgctctgtcacccaggctggagtgcagtggcaccatcatagcttactgcagcctcgaactccttggtttaagtgaccttcccatctcagcctcctcagtggctaggacttcaggtacatgccaccattcctgactaatttaaaatattttttttgtagagacaggggtctcaccatgttgcccagactggtcttgcaatcctcccacctcaaccttccaaagcactggtattacaggtgtgaaccacattgcccagtcttaaaatatattcctaataataattattttagtggctgtgtaataatccctcgttgaatgtacccgtgcaccataattcatgccattattgttatacattcagagtattgcagaaataacactattttaagcaattctgcagtgaatatctttgaaattttattctttaaaaaataattccggctggcgcgctggctcacgcctgtaatcccagcactttgggaagccgaggcagacggaccacctgaggtcaggagtttgagaccagcctggccagcatggcaaaaccctgtctctgctaaaaatacaaaaaaaaaattatccaggcatggtggcgggtgcctgtaattccagctggaggctgaggcaggagaatcttttgaaccagggaggcagaggttgcagtgagccgagatcgcaccattgcactccagcctgggcgacagaacaagactctgtctcaaaaaaaaaaaaaaaaataaaataaaataaataattccaagaagagaaattacaggcttgattcttttttagtaattacttgaattgacacctttttggtcatagttcttttaagttatatttgtgacaataatgtgttctcacctatacatacaaatgtttttccctaacagtcttcttctcaatattttattatgataaatttcaagcatacataaaattgaaagaatagtatagtggacatgtatatacccattatcagctttgattgtatgtatgtgtgtgttccctgtatcagttgaaaggattcggatatcatgacacatcactcctaaatgcagctgtgtctgtttcctaaaaataagaacattctcctatgtaatcacatcattattacatataagattaataatactggccaggcacggtggctcgtgcttgtaaacccagcactttgggaggctgaggtaggtggatcacctgaggttaggagtttgagaccagcctggccaacatggagaaatcctgtctctactaaaaatacaaaaattatccaggcatggtggcacatgcctgtaatctcagatactcaggaaaccttaggcaggagaattgcttgcatctgggaggtcggggttgcagtgagccaagattgcgccactgtactccagcctgggcgacagagtgagagtttgtctcaaaaaagaaaaaaaaagattaataataattccctatcattcaatatccagtctatattcaaaattaccatattaaatgtataacttagaattggaagagcctttaatgatatcactttacagtataaggcttcccaaatcccacagtagagattctgattcagtagttctgagtggcattcagaaacctatacttgtaactttacaacaaaacaaacctccctgtacctgggatgactatacatcccagttttcctgggactgatctcgtttactactgttgacccatcataatagtaatagtacccaggccgggtgcggtggctcacacctggaatcctagcactttgggaggccgaggtgggtggatcacgaggtcaagagatcgagaccatcctggcgaacatggtgaaaccccgtctctactaaaaatacaaaatacaaaaattagctgggcgtggtggtgtgcgcctgtagtcccagctacctgatgctgaggcaggagaatcgcttgaaccggggaggtggaggcggaggttgcagtgagctgagatcgtgccactgcactctagcctggtgatagagcgagactccatctcaaaaaaaaaaaaaattaatagcacccatcactttcagaagttagacagtaaatcacatggttactctacttttaattgttcaaaagagaaaataggatcccgaggtagttaagaggtttatttgctcagagtaatcaaagtttcatagttttactttgtactcaagatagcagttgcaaaatggataatatgcttaacaaatgcatactgatcacatatatgaaactgcatgttgatttacatttaaatatattgcataatttgctgcttttaaatgtaatgccttattcctacaatgggaaaataagtatgcaaataagctggtaagtaggaagactgggtgaacggcagctaaattttgagtataatttccttggccatgaccaaatttattaagtctagtctggaaatttactaacagcagttgaaaaggtcttcactgtgctgagcatgctgcttgagtacacaggtgctaataagtgctagttggataaataaaaatgttaatagattaatctttctgtatcacacatcaaaatatttttctgtccttaaaaatccatgtaaatgtgaccttattcacatagcctatcctgaatactttataccgttaagatactctcttttattttttcttgacattaattttattcaatggtaaataatagaaaattgtaattttaacagagtgtatttgtgtgacatgctgcccttgttgaaagtggatcctatgtttttaaaacatattttcataaaatggcattattgaggtattattcagtagcttcatttacctcaataaggtaaattaagctgcacatacttaaagtataaaatttatttatttattttattttattttttgagatggagtcttgctttgttgcccagtctagagtgcagtggcatgatctcggctcactacaacctccgcctcctgggttcaagcgattctcctgcctcagcctccctagaagctggaattacaggtactcaccaccacgcccagctaatttttgtatttgtagtagtgatgaggtttcgccatgttggccaggctggtctcgaactcctgacctcaggtgatccactcgccttggcctcccaaagtgctgggactacaggcatgagccaccactcccagccttaaagtataaaatttaatgaactttgacatatgtatacacctgtgaaactatcacgacacaagataatgaacatattatcactgcaaaatttcctctcagattccttgcagaaatttctctcctccccccttaacttttcccaggtaactgctgatctactttttgtcactatagattagtttacattttcaggaattttatataaatggaatcatgcaatatgtactctcattttcctggtttctttcacttagtataattatgttgagatttgtccaggttgttgcatgtatcagttggttgtttctttttattgctgaatattcattacatggatatattacaattcatcttacccatttatctgttgatagatattttaagtttttttcagtttgtggctaatataaatgaagctgctaagaacatttgtgcacaagtttttgtgtggacatatgttttgtttctcttgggtaatttatggtagacagactctggtggctacccattatctatttccttgaataattctttgctttttgagcgtgagtgggatctgtgacttgcttctaactaaaatacagcaaaggtgatatacgtgattatatatacatgattacattatacaagattgttaagtcaatcctgataggaaagatgatctcctgtgctggctttgaggaaggcaagtgcccatgttgggaaggacaacacaacagggagctgatggtggcatctggttagcagccagccaaaaaataaaaaatatggtcttagtctgacagcccacaaggaactgaatgctgctaacagccatgtgctcttggaagtgaatccttccccagttgagcctcaaataagcctttgtgagaccttaaaacaggatggaaaattgtgagataataaatgtgtatttatttatactactacatttgtagtaatattgttacgcagaatagatgtgaatgcagttagtaaatatcttgtagtgaaatggttgggtcatatggtaggtatatatttaactttttaagaaactctcaaattgttttcctaagtggttttaccattttgcatatccaacagcagtgcataagagttctagttgctccacatccttgccaacatttagtgtggtcaatctttttaactttagctactctagcaggaatgtagcagtatactattgtagttttaatttgcatttacttaataactaatgttgaacattttttgtgtgcttatttgtcatctatgtatcttctttggtgaaatgtttttaaatatattttgcctattttttaaactgggttgtttatcttattactgttgagttgtaagagttctttatgctttttgtgttgtattcatctttgtcatacctaagggcgctgagattttcacttatgtttttttctggaagttttatatagttttacctcttccatttaggtctgcgatccatttcaaatttaattttcgtgtatagtgtgaatgaatgtggaggttcattagtttgcatatggatgtcaaattgttccagcatcatttgttgaaaagatacgctttttcaattgagttgtcttggcacctttgtcaaaaatccaatgacagtttaattgtcagcataatttgatccttttaaaatatatttttcataattgtatgctaccttgtattacaattatttccatttattcattattaaacagaaagctccttgaggacacaactgtctttcttacttctgaattctctgaaatgcagcatatgccttgcttatagaagattctcaatgaaaatgtgatgtgtttaagtaaactttagcattcatgactcttcacaggccttggctgagtcataccaaacaggtttatgatttggcatcctttcagaccaatcatctttaaaatttttttttactatattaatttggggagactgaacactgtgtgttagaagagcagaaaaagaggactccttttgtattagtaaagttctggaaagaaaactcgtggcatactcagggaagttaactgaaaatttaattaagggactatttatagagatggaggcagggttaagggaatcaacaactacttatactaagccttcagaatgctccagactgcaattatatctttcatctctatagttgacataggaggaatatgctaatacagtatgattaagcattgaaggggttcagaatatgccaccccaaaatatgctactttggcctaagtattattttgagccgaagccaattgacaaccagtagatgcagttatgtcagtcactggagagcattagcaaatgtattccaaaaaaaaaaaaaattgcttaagataataaccacaatcagctcctcattgaggtgggcaacattggatggttatgacaaggtgaggaaagaattgtctagtttgaagattcttggtactatatttagtttctaggtgaagaaataaaaaggaaggctgggcatggtggctcatacctgtaatcgcagcactttgggaggccaaggcaggtggatcacctgaggtcaggagttcaagatcagcctggccaacatggtaaaaccccatctctactaatcatacaaaaattagccgagcgtggtggcgcatgcctgtaatcccagatgctccggaggctgaggcaggagaatcgcttgaacccagcaggcggaggttgcagtgagccgagatcatgccattgcactcagcctggatgacaaaagcaaaactccgtctcaaaaaaaaaaaaaaaaaaaaaaaaaagaaataaaaaggaaaaaacaaaatatagttttaaattggggcaatttatctgtagtttggtcaggctaatgtacactgtaagcttgaaatgcaaatttctaatttcagagtctaaatatttgtttctcagatttcattttgatgatggaatgtatactagatgcagagtttgcatcaatttttgtaatatattcatttatttacttaactaattttaatttgccataatagcaggagctttttgtttatgtttattgttgtatccccagtgcctagaatagtgcttagaacatagtagcacagagaaacatttgttaaatgaatgaatgaatgatagaataatggatgaaacatggaatatgaattttagtggaggtgacaggtaataagtataaaaatcaataaataatgtaatttcagatggccttaaagacagcaaaccagatttaggtgatagagaataactggagagaatgttgggatggtttttaaaatcttcataataaccctatgaagtaggtatttttatctcccttttttagaagaggaatttcagacttgcctagggtcacaaagtagtggaaccacgctaatctgatttcattaatttattccttcattaaacattccttgagtgcctgctcaacactgagccagagtctataaaatcagagtaaaacagtctttgccttcagggagcttataatctagctctgtgctgtctaatatagcagccacttgtttctcatcataattgagatatgctgtaattgagatatgctggattttggagacttatttaaaaaagtaaaatgtcaataatttaaaatattatatttaaaatgatattttggtgtattagataaaatatattattaaatttaacatttctttttattgttttgaaagtggcttctagaaaatttaaaatggcatgtttgacttgcattgtagattctgattcagtaggtctgggcccaagataatgtatttctttttttttttttttttattgagacggagtcttgctctgtcacccaggctggagtgcagtggtgccatctccgctcactgcaagctccgcctcccaggttcacgccattctcctgccttagcctcccgagtagctgggactacaggcgcccaccaccacgcccagctaattttttgtatttttagtagagatggggtttcactgtgttagccaggatggtctcgatctcccgaccttgtgatctgcccgcctcggcctcccaaagtgctggaattacactgcgcccggcccaagataatgtatttctaaaaactttcaagtgacgctgatgctgctgttctgaggaccacactttgagtagaaaaacttagactagacagaaaacaagtaattagagtactgatgtgatgctttgtatgactgggcaagcagagggtgcttagagtcttcgttttgttttgctttgtttttcactctgcaaaacaatctatgttcggttaaagcatttttgcacaatttttatttcctccataactacataaatatagatttctctgattcatgagtttatcttttgccatttaatgattatatacactagagagcagtatctattttatgaacagaagaataaggggccgggtgcagtagctcacgcctgtaatctcagcactttgggaggccgaggcaggtggatggcctcagttcaggagtttgagaccagcctggccaacatgttgaaaccccatctctactaaaaatacaaaaattaagtggcaggcacctgtaatcccagctactcgggaggctgaggcaggagaatcacttgaacccggaaggcggaggttgcagtgagccgagatcgcgccattgcactccagcctgggcaacaagagcgagacttggtctcaacaacaacaacaaaaaagaaggaatgtaacatcattataaagaagacataaacaagtattacatattatttactataatgagaaaatatccaaaataggtcactgaagtagattctcccaattgtgaacaatagtttttattgtaagtcaaaataggaaatattttccagaggttgcacaaacagattaaaccacagaaataacattatttcagataaatggtcaatccctctgtggtcttagacatttagttttgggtagagaacatggaaaacttcctgaaggaagtgatttctaagctgagaaacatcaataggcactagccaggtctgtaagtctctaacacccatgctttaactcatattttggatcaagtttttgtattctttcattttagtgtttgttttgtttttgtttagtttgctataatattttatctgaatggagactaatatcctttgaggagaaacaatttcaagtttattaattaggtttctgtttaagactccatcataatataccatttattagtttataattcagattctaaacctattgtaagagtgcctacttgcaaaaagcaaagaaccagaggttcaggatttgtgaaaataaaaatactgtaaaatataaatgtttaaatattttcttttctttttttttgagatggagtttcgctcttggttgcccaggctggagtgcagtggcgtgattttggcttactcaatctccatctcctgggttcaagcgattctcccgcctcagcctcccaagctgctgggattacaggcgcccgccaccacacctggctatatttttgtagttttagtagagatggggtttcaccatgttggccaggccgttctcgaactcctgacctcaggtgatctgcccaccttggcctcccaaagtgctgggattataggcatgagccactgtgcccagccaaatgtttaaatgttttcactattagatatgtctaataagaactaaaggaatatcttcttgaaattgaaaaggaaataatatttttctatcccataaggattgttggaaaggtttaaagagacaataatatacgcaaagtgcttacttagcaagatgcctagtataaggaaggtagtataagaaagtaatgttttgtttttggtgtccatttggggttctctagtagtttggacaggttattttaagagtaatcctttatgaaaattataatgtacacattttattttgggacaaggattctaatcatttcaataatttatttttaagcacagtttactggggtctcaacaaaagtcacatattcagaagtagtatggcctctaggctaggagtctagagacctaggttttagttctagctctgttaatcctgttttactttgtgccaatcatttcaaaaaaggatgctttactaattgctctgtaaggtgctttctagtctgcatcggttttgttgagactgcaatagcaatgtatccaaggtccaaactaatgatttgccatctggtttcatttagcaaagttaatgttcggtcatcaagtacatattcagtaggaagtattctttttcgaaacagtttctacagtcatttttttttaaccctgtataaaatgagtttattttggactgttaaaaaaattcaaaactttaaaatttgttatttttcaactaatgcaaaagaatatattagaaacatctgaataaaaaatgattctgggctgggcacggtggctcacacctttaatcccagaattttggaaggccgaggtgggctgatcacctgaggtcaggagctcgagaccagcctgcccagcatggtgaaaccccgtctttactaaaaatacaaaaattagctggtgtggtggcggctgcctgtattcccagctacttgggaggctgagacgggagaatcgtttgaacctgggaggtggaggttgtagtgaacagagatcatgccattgcactccagcctgggcaacaaagagcgaaactccatctaaaaaaaaaaaaaaagattctgttcttttctgtatttactgatgtccctaaacattttacatttttttttaaaatttaggttatctccctattaaaactatttacaagtgacagtgatgactcctgttactcaaaattaaaccaaaatgaacatcaaactgggatttattggggcccagaaacaagaagatataattcattcatttgaaaatgataaagagggactgaaataatagtgagaaagctgccctgagaccagagtaactttgtttctttgatgtatcatttacagtaataacccaacggggtgccaaggggctgccactctttggctatgctttattgtccattcacactttgtctccatgtttccttcccccttcctcctgtatacatgtatacagaagggggaaggaaacatggagacaaagtatgcatatacatatagaaattctggagcagtaacttactgatgtatacaacttatcgaatctctctgagttatgctactacccctagtgtgttgggcatgttggctcaaacttccttaatcaggaaactttggaatgggtttattgctagctgtctttgcttgggtttaatctcaatatttctgaggtgcaaagtgcactagattgagagttaatagatctgaattttaattccagttttgttcccaatgatcactgtgacctcaggcacatcatttcacctttcgtcgttcattcagtttatcttacctattcattaaaaaccaatctgcctgcccccagttgctttctagtggtagtgatgatggaggtggtgagagacacaataaatacataagcaaataggagaactatgaaggaaggaaaagttagtgatgtactagggatagtgtacttttgatagggcatctaggatttctctagataagtgaaaaatgaagaggtttaactggatgctaaggggtcttgcacattaaaaggcatgtgtttccgtcttttcactactgtgttctaggaaggcccaccaatgcctctaacctgtaaataaatgcaaatctatttaaatcaagtgatacatcaattttatgttgcttgatttggaagtaatccgcaaagaagcaatagctaaacattttagtgttgtttggggagtagctgctgaacaataaagaccaaaaccataactaaaaaacaaacaaacaaacaaaaaaacgcagcccgagacagatcagaaactaggtgtatgtagggcgccaggttatgacactgttctctgacatccacagggcgcaaaaagaaaacctcactagtcagcttcgcacgtgctctgcgcaggggctcctgcgaggccctagtccctccctgggagctaagagcaggacggaggctgtacctgactgctgcttggagggaaccctggctgagtccagggaggaggagccagaggaggggccgattggaagcagccacctcagcgaagctgcaggatttccgcagggcgggagctgtttatctcccggaagaaaacggctcctgtcacagaagtctcgtgattgctctgggagctttgcttagacacttgaaactacaggagaaagaaggatctagcgaaatatggctacagagagccctgctacgcgtcgggtccaggtggcagaacatcctaggtgggggagaggagacgccgggctttgggatctgctgggttggctacgtgtagatcgggtccacagcacttggctcctcccttggggcgctgcttttggtcccggggagcaagtggaacccttgggattctataaggacacgtggctgggcttgcaaaaaagatcacgccgcaaacacattctaccttgactactacgaagggttgtatgtttttttcttcatccatgcagattcttcttttccttttcttgttgtaattagtgtactctttctactgggcttcagcagaaatgcccatatccacactgaactcctctctttgtctcgcatgccagttgatactgctttttaaaagtcttctttctaaatattaattgaaaacaaacacaaaaaccttcttggtgtctgcatcctctttaaaacaaaacaaaacaaaaacacgagaatctctgaactgtcacttagggaattaatttgctggcagtccctagctacacagtaactaatagtttagtgatgtctcggggaggatcttttcagttacaggtactttgtagaaatacttcgttctgactaatggggctgaggtctcataaaatgaagtctgtcacctgctacattagcgaagggctttcctgactctctgcttttgctgtttttcttttcttttctttcttccttcctttcttttttctttttctttttctttttttttttttttttgagacggagttttgctcttgttgcccaggctggagtgcagtggcgccatcttggctcaccgcaacctccgcctcccaggttcaagcgattctcctgtctcagcctcctgagtaggtgggattacaggcaggcgtcaccacacccggctaattttgtattttcatcagagatggggtttctctatgttggtcaggctggtctcgagctcctgagctcaagtgatccgctcaccctggcctcccaaagtgctgggattacagacgtgagccatcgcgcccggccctctgcctttgctgttttcagtttttttctgttagtttttttctctggcatcaagtccttaagctcttcctacttggtggtttattaccaccgtgtgtcagttgatgatattatactttactacaacttgaaaatgttctttcatccttaaaccagcaaacagtgtgtctttagttaccagaaagaagcatgatttcttattatagagtccagcacagctttggactacttctcaatgtctttgaatgttttaatatactctagaggttcttgtatagcactgttgcccttatatatttgaattaattaagacacactgttaaaggcatgcttccaataagattaatgagaaatttgttacatgaaaataacttgatctcttgtagtttagtcttattttttttttttgagacagagtcttgttctgttgcccaggctggagtatagtggcgcagtctccgctcactgcaacctccacctcccaggttcaatccattctcctgccttagcctccagagtagctgggattacaagtgcccgccaccacgccccgttatttttttgtgtttttggtagagacggagtttcgccatgttggccaggctggtctccaacttgtgacctcaagtgatccgcccgtctcagcctcccaaattgctgggattacaggcgtgagccaccgtgccacgtctatagtttaatcttctacataaaacatacccatgtgtaaattcctaatgtgtttccattttatgtgattgtaataataaagatcaacatttctatctatatttaccctgtttgggggaggatggtggtaacaagtataggtacatgtactaaaagtgaagaattgtttactgaatttccttagtgttcttcttgcttttcatgatttttatattattcatgtaacaaatatttattgttaatatttattctgtgttatccacagaagagatcatagtagataagctctgccgttttcttgtttttcatttgtgcacaaaatgcaattattagcttcaagcaatgttttatttgcaggaatgttttgcagccacttactcattctaggagggatgtattttattaaatctaaatagtataatctataaattcacctaaccggtcaagtattgcaatatgctgagaaggaaaaaaaatgaatgaatggtcagcctgctttcttgtggaactcttattctttttccaggatgcctcttcaacctcacaaggcacatgatcctttgagtaaaggcactggtcaaccatatcatacattttagtaaaacttaattttatttttattatttttatgtaaaaatcaaatagaaattgaagttctaatattttctttctgtgtcccactcttgcatggtaccggtaccgtaagactctgaatttcactgttctggctttctttgcattcttagcagttgtatctcttatctttactttctcttttggattaagttttaaaacttgttggattattgctatttttgtagcagttttattgacattcacgtatcatataactaattcatttaaagtttgcaattaaatgggtttaatgtattcatagagctatgcaaccatcaccataatcaaatttagaacgttttcttagaaagaacccagccatcccttagattatcacaccccagaactccattccctttcccctcacctagccttaaacaactactgctctgttttctgtatttatagatttagtcactttgggcatttcaaatgaatggaatcatataaaatgtgtgtttttttggtgactggcttcttccatgtggcataatgttctgaaggttcatgtatcagtacatcatttaacatgtatcagtatatcattcctttttatggttaaataatattctagcttatggatatacattttgtttatacattcaacaattgatggacatttgggttgcttctatcttttggctcttatgaataatgctgctgtatgaacacattcttgagtctctattctaccagttgagctagcagggtgacactgaatacatttttaatattaaaaatttggattatttaaaagtatattcagtaaagcctgaaaatcccacagtttctttcctgattgtctctgatttctacccttggctgccaatttctacttctcttcttagaagttattcatttggtttgtatccttgtaatattattgtgtccttatatcattgttactatattttataaaaatgatatattcacataagtccaataattatatttgtttttttttacttactttttttcacttaatctttctcagatatctggtatatcagttcatacagatatatttcactatttttacttatttcattttattttttgagacagagtctcgctctgttggctggagtgcagtggcactatcttggctcactgcagcctccgctcttgggttcaagagattctccttgtctcagccttccaagtagttgggatcacaggaatgtgccaccatgtctggctaatttttgtatttttagtagagacaggatttcaccatattggccaggctggtcttgaactcctgacctcaagtgatccacccgccttggtctccctgggattacaggctgagccgctgtgccccggactatttcactgtttttaagggctgagagtattttgtagtatgaataccattatttaaccactcaacatttagtacacttagatttctaatttttctctcttgtaaacaatgctgcaacaaacatccttgtgtacatatacatatgtacatatatgtatatatattctctgagcattcttgtgaattttttaaagctcatttatgaaaatggaagcagagccaaaggtaataaacatttaaaatgttgatagctcctgtcaaatggccctgcaaaaaagatgttattggattgcctatttcttgcttttttgtttgtttgttttgtttttaagagacagtctcactctgttgcccaggctggagtgcagtgtcatgaactcggctcaccacaaccaccacttgccgggttcaagcagttttcctgcctcagcctcccaagtagctgggactacaggtgctcaccaccacgccaggctaatttttgtatttttagtagagacagggtttcactatgttggccgggctggtttcgaactcctgacctcgtgatctgcctgccttggtctcccaaagtgctgggattacaggcatgagccacagcacttggcctatttcttgttatttttagaaactctttttatatgtgtgtatttttgtatttgtatgtatttttaatagaaaccatttattctatatatattataaatatagtttctagtttaactttatgacatcttatgtagacattttataatttatgcattgtagtatgttgaataataatgatgatagcatctttgtcttcacccttattttaatatgtcatccaaatgaccaccagaatggtgagatagtagaaagaagagctttattggcactatcagtttgtagaccagaagagagagtctgcagtgtggactgaaggtgttctaacttcgagtagggaagaggaagtttgggttttaggccccacagagtctgtcttatacaatagagtcatacatattcagtaggttttggggaaaagctatacatatttatgaggggagccaagcacatgcgcagtgggtaaacatatatgtaacatacatcccatgttcccttcgtggcaggttttagcattaaaatgaggtggaatttggctcacataacaaggtgagctataggacacaaagacagttagtgcacagcctttataggctggctgaaactagcttaaggtctgcagttgtttatcagaaaagaatgtttgtaaggctggtcctctgtccaatcagagttgtagtggcctggatcataagtcagagttaggaggtgtccaatagctgctattgctagggggtttagcaagagagtggttttacttgtagccatgagaatttaggaagttgttacacctcgacctgtaacttttgttaccttaactttagagtcccccttacctgataaagggacatctacttaagtttctcagatcacaaatgggaatgcttctaatattttgccatcaaatatgatgtttgctgtttctggtaaacatcctttattaaattaaggacatgcccttttctagtaggtgagaaaagaaaaatagctctgagccatctgaggtatgttaagggaggcgaccacctctcatattgtcttatgcccaatttctgcctccaaaaaaagaagtaaaaactaaaaggcagaaatgaaatccacaagcagacagcccagtgccacaccctgggcctggtagttaaagatcaacccctgaccttatcagttacttgcataaaaaagcactgtgaagatccctgtcctgttctgttcccttctaattaccagtgtatgcatcccccagtcaagtaccccctgcttgctcaatcgatcatgaccctctcatgtggacccccttagagttgtgatcccttaaaagggacaggaattgctcactcggggagctcggctcttgagacaggagtcttgctgatgctcccggctgaataaaccccttccttctttaacttggtgtctgaggggttttgtctgtggcttgtcctgctacaatgtgagatatgcaaagatttatcaggcccagagagacatgaatatggcactttagtcacatccctcgccctccttgcacccatgtgccagggggcaatcatttaaagaccttttgttcctgacttcccctgttcctgcttcccctgttatcttgatgttcctgtaatctgtgatacaaagtacagccaatcaataggttatgctattttaatgtaaattcttggtaaacaagttaggaaccaccccatttttttcctttaaaaaccactagtaactactgctaatcagagggtatattcatgttaacttgaatctatgttcctgggttgcaatcttcaaacttggcccaaataaactctgtattaagtttgcctcactttttttgtctttagatcaacgcatgacagagatttaaaaaattttatattttatttttaaaaataaggaatggctatgaaaatacatttgtttcttatttggattttttgagaggatcatgaagtcatagaattttcttctttttattctgttagcatagttcatttaatcaacagatttctggtgctgattaccttcatattcctggaatgaactctgcttggtcacataggttattttaggtaattactgcattaaatttaccgacattttatttagggtttttctatctatttccacaagtgagattagcctatagtttgcttttgagggccattcttgtcaaatgtaagcatctgggttagaccagcctcctaaaatgagatgggaaactttccacagcttctattatttagaaccatttataaaaagaaaataccactttttccttgaaggtccaaccaacttgttgtaacactttttgggctttgtttctgacaacttttctatttctttatttttaaactcttgtgtcaattttagaaatttgtattttttctagaaaaatcagccatttaaaaatttttaaatctttttaaaatttatgtttgtctattatttctagtattgattatgtttaatgacactcaaagttctttttctatatatttttttaaattgaagaaccaccttgtaatttttttatccaatctgctattttcccctggttcaataaattttgcttttatctgttaatttgcttcttctaatttatttaactactttttgctaggttcctatgttatatgcatactttatttattttcattatttattttctttttttcttttaaataatttatgttaaacctattgtatcacacagtatgttttaaacactgccagataactccctaatcagataaagcaaagacaaaaaagtttatcttactagaaacaagagacatcatcacttatagttttcaaacattattgcactttaactgtcataatttgacaaagaattcatgaaataatctacagactagttttaacagacaaataatacttgtaagcagacatgactgtcctaaattgttttttaggtatcaactttacaaacattacttacattagtggtaacggtggagttggagagtattgtgccttttccaagatgcacagtgagaatcaccaggagtgtggtggaacttatgaccctaccaaggccacggatctttcggcctgcagatgtcagcccatgcatcaccctttgcttgtggactggtttggtgatccactgggtggcaggattttttctgacagcattatggagtggatgaatgaggataacttcaaacattttgtatgttgaatcttcaccgaagtgagaactcaggactcttagccgggcatggtggctcacacctgtaatcccagcactttgggaggccaagttgggtggatcacttgaggccaggagttcgagaccagcctggccaacatggtgaaaccgcgtttctactaaacaaaaattacaaaattacaaaaattagctgggtgtggtggcgcacacctataatcccagctacttgggaggctgaggcatgagaattagttgaacccaggaggcagaggttgcagtgagtgagattgtgccactgcactccagcctgggtgacagagcaagactctgtttcaaaaaaaaaaaaaaaaaaaaagaaatactatatatatatatatatatatatatatatatagaaataaaatgtataaatatgtctatatgtataaataaaaatatatgtacatgtatatcatatatacatgtacatatatgtatgcacatatatgtatgtacatatatacatgatgtacatgtatatcatgtatacatgtatatatatgtacatatatatatatatgtgaattcaggactcttagaaccccacagtggcgtccagctttctcgtcttcaatggacttcaagcatactttagctggttaacaccacagtggacaggcttgccataagctgcacccttaggaactgggcattttcggccaccatggtgcacacgaatcctatatataacgtaaacttgcttggccttgtagccctgtcggtgcacttttttgggctgggtgggatgtggagccctgtggtagagcagagagctgtcagtactgctagcagggactctccgaagaaagtgcatggtatcagactgctgcttcctccacagctcctgaatgtacttgtatgcagttatcttggcttacctgatggctgttgccagacggaaaggaaagagcctttctcccccattatttattttcttatatgaatagaaggctagaaaattttctgagtgctattacggttgtgcctcatgggttttgatatgtagacctctcattattattttcaaaatagctatagctgtggccttaatttccactttccttcagcttcttgctcattaatttgctctttaactcttttcattcttctattcaacctatctactatttttattttcaccatcataacctcgttttctaagatctctaatataattttaattttgtttttatgtttaatttttgatcttggagaaatttattgtgatgaaaggaacaaaacagagattcaaattcaccctcctttcccaatggtaattaccaatctttgaaattccatctctaacatatattaaattctcaaatataacagtaataatagtaataactaataattattttatacttataaaaccctcaaacaaacctttgcagtgagttctagtattagcctcagtttgtagatgaggaaaattgaggcatggagcaactcatacaaattaacataaaaattcatgttataaccaattgttcttaaattagtattaaaaattaacattttctataatgccatgactcgatatcctgatattgaagagaaaacaagcacagacaggatgggggacttgcccaaggtcacagtggaagactgaaaatacatgtcatagctcctgaaattttaattcattcatttctgcagttagccacacggtctgagagaatcagtccttttattaaagtccatttcattcacaacagtcatagctttgtttctcaagttctgttactaatactgctgttcttttttctttgtttctttcttttttttttttttttttaagattttaagtcaaaagagcattcagagcaccagagtcagcaatttgtgctgcaatactttggccaattccccatttaacagtatgatctttgtaggagctcttattttcatattgaaatgctcattgtattttttggggggcatactttcagtgactgcattaagacacaaggtcttgttggtagctcacctagaggtaaaatacagctacttcccccaattacagccctaccattcattattagagggttaggtatgaagtttagaaaaacactgtacacttcagttctttctgttcttagagaaaaatgccttccttgtttccttttatagcctccatgcatttgaatttctaaggtaggaatgttgtatagtaagcctcttggtactgaagcagttataagccatgaacagactgccttcccaaggaagtctaggaaaatgacaaagttttataattcaaaataatttcattaagacacattttaggagacttattctaactctgctgttagcacttcatgttatttgtgtttgcagtccttataaaaacaaattaataaggattcaagttcaggaaaacttgaatttcatctgtatatgattttcacaggcagaaacattaacccctattaaggctagcaggattatctaaaccagcaaagtgggagttgtacttattgctctttttcccacatttaattgtaccaattcctttggatttgacatttcaaatatcaccttaatttcacccttctctacctatagctttgaagtactttcagcatttctctctagatatattacaatgaactgctattagatctctttatttctacaatccgaattccacacactacccagtgagctttttcaaatgcaaaattgatgatttacttcatttttaaacatctgttcacatccattgcctgtatgttaaaagccaggtttctcaatatggcataaggccctttaagatctgagacttgatatcctccaacctcctcccctccttttctcttctgatgtttttagatacctaattgtagttttctgaatgctgtatgcttgggccttttcatgtcaattgcctagaatgcttcaccgtaccccacctgtctgacatcatcctttaaaatttatttcaaacattacctctttggggatcctttaatgtaccttccctctttttgatttatcttacggctcatatcatattctgtcatagcagggactaaatgatgtttctctgtgctcccaaaggactgtatttggccgacttatcactctgtattgtccccctgtattgtgaattttggcttacctattttcctcttttgctagaccaatccttccttccttccttccttccttccttccctccctccctccctttccttccttttctttccttcctcttccctcccccctcccctcatctcctcttctttcttttgagacagggtctcactctgttgcccagaatgaagtgcagtggcacaattatggctcactgcagctttgactttctggtgattctcccacttcagcctcctgagtagctaggactacaggcatgcatgtgccatggtgcccagctaattttttgtattttttgtagagatggggttttgccttgttgcccaggctggtctggaattcctgagcttaagtgatctgccttggcctcccaaagtgctgggattacatacatgagccactgcacctggccaacttttaaatttcttaaggccaaggattcttattcatctcctttcaaagagtacttagtaaagcatcagtaaatgtttcttttttaaaaaaaagacttttttttttttttttttttggaacagagtctcactctgttgcccaggctggagtgcagtggtgccgtggcacgatctcggctcactgcagcctccacctcctgggttcaagcgattcttgtgcctcagcctcccgagtagctgggattacaggagcccgccaccatgcctggctaatttttgtatttaaaaaaaatagttttttattttgaaatatttttagacttatagaaaaatcaaataataattgaaaaaagtactgtatattcctctcccaaattccccaaacttaacattttaccacatttgctttatcattctctatctctgttttaattttttttaatttttattttttatgggtacataatatagatgtatatatttatggggtacatgagatattttgatacaggcatacaatgtataataatcccatcagggtaaatagggtatgcatcacctcaagcatttatcatttctttgtgttataaactttccaatgataatcttttagttattataaaatgtaaaataaatttttgttgactataataactgttatgctgtcaaatagtagatcttattcattctatctaacttcatttttgtacctattaaccatccccactccctcatctctgctacccttcgcaacctctggtaaccatcattctactctctttctccatgagttcaattgttttaatttttagctcctgcagatgagtgagaacgtatgaagtttgtatttctgtgcatgacttgtttcacttaacataatgtcccccagatccatccatgttgctgcaaatgacaggatctcattcttttttacggctgagtagtactccattgtgtgtatatgccacatttctttattcatttatctgttgctggacacttaggttgcctccaaatcttggctattgtaaatggtactgcaataaacatggagtgcaggtgtcttttcaatacaccgatttccttttggatatatgcctagcagtgggattcctggatcataaggtagttctatttttaattttttgaagaacctctcaactgttctcggtagtggttgtactaatttacatttccaccaacagtgtatgagggttctcttttctccacatccttaccagcatttgctattatcttttttttggataaaagccattgtagcttgggtgagatgttatcttattgcagttttaatttgcatttctctgactatcagtgatgttaatcactttttcatatacctgtttgccatttttatgtcttttgaaaaatgtttattcagatcttttgcccatttttgaattgaattattacattttttcctattacattgtttaagctcattacattttctggtttttaatcccagtcagatagtttgcaaatattttttctcattctgtaggttgtctcttcactgcattgatttttttcctttgctgtgcagaagctttttaacttgatgtgatctgatttgtccatttttgctttggtagcctttacttttaggacattagacaaaaaaaatctttgctcaaaccaatgtcctggatgtttccccaatgttttttgtttatcttttcaaaatactaacttttccttttgtttatcttctgtattttttgctttaatttcatttatttctgctctcatctttattatttcttttcttatactaatttcgggtttggctttctcttgtctttccatgtttagatgcatcattaggtcatttatttggtgtttttctacttttttgacatgggcatttatttctataaacttttctcttagcattccatcactgtaacccaaaggttttgctgtgttgtgtttccatttttatttgtctcaagaaatttttaaattttcttcttaacttattcattgacctactggtcattcaggaacatattgtttaattgtgtttgtatagtttctaaagttcctcttattgatttctagttttattccattgttttcagaaaagatacatgatatgatttcatttttttgaatttttaaagactagttttggctgggcgtggtggctcacgcctgtaatcccagcactttgggaggccaaggcgggcggatcacttgaggtcgggagtttgagaccagcctgaccaacgtggagaaaccctgactttactaaaaatacaaaattagccaggcgtggtggcacatgcctgtaatcccagctacttgggaggctgaggcaggagaatggcttgaacccgggaggcagaggttgtggtgagccaagatcacaccattgcactccagcctgggcaacaagaatgaaactttgtctcagaaaaaaaaaaaaaaaaaaggactagttttgtggcctaacatatggtctgtttttgagaatgaaccatgtgctgaggagaggaatgtgtattctgccaccgttggatgaaatgttctgtaaataactattattaggtccatttgttatagtgcagattacgtctcatgtttctttgttgattttctgtctggatgatctgtccaatgctgaaagtggagtgttgaagtctccagctattattgttttggggcctatctctctttttagctctgataatatttgttttatatatttggatgctccagtataaggtgcatatatatttacaattgttacattctcttgctgaattgaccccttttatcattatataatgaccttctttttctcttcttatagttttttttttggaaatctattttgtgtgatataagtatagctacacctgctcttttttggtttccattggcatggaatatcttttttcatctgttttctttttcagtctatgtgtgtctttagaggtgaagtttgttgcttgtaggcaacagatcattggattttgttttgtttttaatccattcagccattctatgtcctttgactggagagctgagtccatttacgttcaatgttattgttgataagtaaggacttttctgccattttattatggtgttcttgttgttttgtagtcttctcttccttccttcctgtcttgctgtttgtgaaggtgattttctctggtttctaatttctagctttttattttttgtgtatctgttttgtgttttttatttgaggttaccatgaggcttgcaaataacatcttatcacccattgttttaaactgatattaacaccaattacaaaaagaaacaaacgagaaaagagaaaactaataacacttcaacttcatctaccttcttttttaagtttttgttgtttttattcatatcttattgtctatgtcttgagaagttattgtagttattattttagatgggttcatgttttagtctttctactcaagatataagtagtatacatgccacaattatagtgttacaatgttctgtgtttgtgtccttcttattaccagtgaattttctatcttcagatgatttcttttttaaaaaaattaacttctactgttgatatgtgggtacatgtgcacctttgttatatgggaatattgtgtgatgctggggtttggggcctgtatcctgtcattcaggtaataagcatagtacctgatagtttttcaacccataccccactcctcctttcctctctctagtagtctggagtgtcttttgtttccatgtttatgttcatgtgtgctcaatgtttagctcttactcataagtaagaacatgtgatattttgttttctgtttatgtgtttatttgcttaggataatggctttccactgcaaccattttactgcaaagaatatggtattactcttttttatggctgtgtagtattacagggtgtttatgtgccacattttctttatccagtctaccattgataggcacctgggtttgattccatgtctttcttattgtgaatagcacagcaatgaacatatgagtacatttgtctttttggtagaatgatttattttcctttggatgtatacccagtaatgggattgttgggtcaaatggtaggtctgttttaagttctttgaagaaactccagacactggctaatttacatttccatcaacagtgtataaatgtcccctttttctctgcagcctcatcagcatctgttagtttttgacacattttggtaacagccattctgactagtgtaaggtgggtatctcattgtggttttggttttgatttgcatttcttcagatgatttcttattgcttattaacaaccttttctctcagtttgaagtttcttcagcgtttcttgtaggatatgtctgctgtcagtgatagcagtttttgtctgtctcagaaaatctttgtttctttttcatgtttgaaggatatttttgctggatatactattctagggtaaacatttttttctttcagcactttaagtatgtcttgccattctctcctagcctgtaaggtttccactgagaagtgtgctgacagttgtaatggagctcctttatatgttactggtttctcttctcttcctgcttttaggatcctttctttatccttgacctttgggagtttgattattaaatgtcttgaggtagtcttatttgtgttaaatctgcttggtgttccataaccttcttgtacttgaatattgatatatttctctaggtttataaagttctcttttattatccctttgaataaacgtcctatcccagtctctctcactctctatgctttttcaggccaataaatcttagacttgccctttacaggctattttctgtaacttgtcggcatgctatattcttttttattcttttttcttttgtgtcctctcactgtgtattttcaaataccctgtcttcaagctcactaattctttcttctacttgatcaattctgctattgagtgactctgatgcattcttcagtatttcaattgagtgtttcactctagaatttctgtttgattcttttaaattattttaatgtatttgttaaatttatctgataagattctgaattttttctctgtattgtcctgaatttttttcttttttttttttttttgagatggagtctcactctgtcgtcaggctggagtgcagtggtgcaatctcagctcactgcaacctccgcctcccgggttcaaatgattctcctgcctcaacctccgagtagctgggactacaggtgtgcactaccacacccagctaatttttgtatttttagtagagacagggtttcaccatgttggccaggatggtctcaatctcttgacctcatgatccgcccaccttggcctcccaaagtgctgggattacaggtgtgagccactgcgcctggtctgttatcctgaattttgttgagcttcctcaaaacagttattttgaattctctgtataaaaggtcacttgtccctgccactctgggaatggccactggtgcctcatttagttgatttggtgatgtcatattttccttgatggtcttgatgcttgtggatgttcactgatgtctggacattgaagactcaagtattatggtagtctttgcagtctggatttatttgtatccttttggggcaggctttctaggtatttgaagggaattgagtattacgatctaagtctttggtcactgcagctatatctttattagggggtaccccacacccagtaacactgtgtctcttgccttcttgtagaggtactgccttggtggtgttgggtaagatctgggagaattccctggattaccaggcagagtctttaaatctttaccatcattttcccccaaagagaatttctttctccatactgattttcctggagttaggggatgggagacacaagtagacttgtggccactgtcagtgggactgcactgggtcagacccaaagttcacacagcactgggtcttgcctgaggcctgcagaaaccatgtcatggttaccactgatgctccctcaaggcccaagcaggtggcaaacccagccagacttgtggctttctctttagggtgatgagctccccctaagcccaggattggtccagaaatgctgtctaggagtcagggcatagagtaaggaaccttaggaatctacttggtgctctattccactgtggctgagctggcacccaagctgcaagagaaagtctttcccactcttccctcctcttttcttaagcagaagtatttccctgtagccacctcccccagcctgtagtgagtaatgcctggttattgctgatgtttactgcctggctcccactgtttacccaagggctcttctgtcagcttgtagtacatgctcctgggcctgggatgctcccttcagggtagtgagctcctctctggtccagcatgagtccaaaaatgccatccaggagccaagtcctagaattgtggaccccaggagtccttgggtggtctgcatcacagtaaccaggctggtacccatgcttcaggacaaagttcccgttaatcttccttctttcctcaagcagaacgagtctctttccatggccaacacactgggaatgcacagggtcacccaaggcctatgacaagtactgcctggcaaccactgatggttattcaaggtctgacagctctttagtcagcaggtgatgaattctcccaggactagttctttctcttcaaggcagtagattcccctctggtccaggatgtgtagaaatgttgtcagggtttacagccttataaaggcttagagtgcctttcagatttgtttaggaacctgttgtgctttagcccatggtggttgggctagccagaacttactttcaggctgctgggatgggcaatttccctctagctagggctggtctaaatgctgcttccatgggcactggctgatttctgcactgtgttactttctactgttacaagacagcactgaattccaaagcaaagccccataatcactgtactcctccatgtgcacagcttctctctccatgctacatggccaccaccattgctgggggttaagagagtggtggtgtcaatgattcaagactatctttccaaccgtcttcagtatctctttccttgacatgattttaaaaccagatgttgtgattactcacctgattttgggttcttaagaaggtgctttcttctgtggatagatagttgttcaacttggtatttctgcaggaggatgatccctagagggttctatttggttatcttgctcctatccccttataatttttttcctgaacagtttgagattaagttgaggacctgattcctggtagaagacaaaatctcaactaatttaattaaatgctgtaatcagcttttattattattttcaattcctgaattgggcagcatgtaaaaatagagaggtgctaggctaggcatggcagaacagttggttttcacaaaatagcttgaagaagcacaaggaaacagcataataaaaagcagattattatgttaacatcaggttacttaaggttctttttcttgtaagggttaaaacagaggggacttccttaccatgcaggctaaaactggcctgtttaggaatttggctaccatgtatcccctgcttttttatagatcagataaataatttagttttggtttggtgatgtggaactttagcatgaatgactccattttggtttggcttactggggcctagtggaggaactcagcccaaaacaatggtcttccataaattttatttaacatgctcttttaaccttaaatacttgaatgcgtatttcctaaacacaaggacattcttttatataatcgtagcataatgattaaaattaggaaattaacattgatagaacagtattctctaattacagacctgaagtgttaccagttatcctactaatgttctttatagcaaaatacagcatacgttggtggatacatcccaagacccctcagtagatgcctgaaaccacagatagtaccgaatcctatatatgctatttgcttttttcctatatataaatacctatgataaagtttaatttataaattaggcatagcaagagattaacaataataactagaaataaaatagaacaattttaacagtatgccaacatcactactcataggctttggggtcattattacataacattatggttacttgaacacaagcactgcaatatagagacaatacagagtcaagctgataatgagatgactaccaagtgactagtgggtgggtagcatatatagtgtggatatgctggacaaagggaagactcatgacctgggcagggcaaaatgggacagtgtgagattttattatgctactcagaatagtgtgcaatttaaaacttaggagttgtttatttctgtatttttccatttaatattttcagaccatggttgacagcagataaccgaagccacagaaaacaaaaccacaaataagggtggactgctatattttttcgtgtttcaagatccaatctaggatgtatactatacttacttattgcctctttaatcttttttattgtggaatacttcctcagcctttctatgtgttttatgagcagctattttatagaatattcctcagtttgagttttagggaaaattgtgaaaaacttcgaaatggaccaaaagattatcaggtatcttcaaaggaaaactagaagttttctagtataccctttcaaattatccgatttctatgtgagttctgaggctttcattgtattcatggattcatggtattttacaactctataggtcatataaaactgatagcaatgcaaatgattttttttttccatagaaatcgcaaattgcgtctggtggaatgcaactgattgccccctggctgttaatgttttcaattttttttgtatatatttctaaatgcatattggccattccttattttactgtatatgggtgagactttggattcttttttctgattggttataacatcttaccagttctgtcattaattactgagataaataaaatctttaacatatgttcattttatatgtcatgatgatatttgtcaaaagacaaaagcacaacaaatttagttttgttaaagcaaattaaatatggcctgaggaggcctctctacttctatatttgagtccttgtggatgaactgcaacctaacttaaaaggtagacaagactgaaaacctaacttaagaggatgctcctgtaacagtagttgattcttggccaatcccagcagccgtacttcaaccagtcatacactcctgagtgttcaaactgtgttcgaataaggcaaatgtggaactgtaaggaattcagttgtttctgtatgtcacttctgatttctgtgttacttccctttttttgtctataaatttgttctgaccatgaggcatccctggagtctctctgaatctactgtgattctgggggctgtccaattcatgaattgttcattgctcagttaaacccctttaaatttaacttgactgaagtttttcttttaacagtttaaagaccttacttggtgttatttgcagttctagaattgggcagcacttcattctataaaatagaataagtgttccaatgggctaaacggaggttggttttatagacaaagggctgaaaaaagcagaaaaaagaacaaaaagtggatcggtcattttaatgttaatttcctattaagggaggaatagggaaaaaaataatacaaaaataactggttggtcaacatcaggctacttaggttactttttgttgttaaaggcagagggaactttattgttacgctgactgagactggtctgtttgggaaatttggctattgtctctctctctctctcctgatttcttggaaagtcagataacaacttagttttggtttgctgatgtggaactttagtaccagtactacattttggtttggtctgttgggtctagtgcaacagcttagtctaaaacaatggcctcctataattttcatttaacatactttaaagaaatttctcccttaatgagtttgtgtaatatttcttcatggttagattcagcttatgtatttttaggaggaatacaacaaaagtgattttgtttctttagtacatcatatcaaaaggcacatgatgtatatgtcccatcaccaattctgttaacctaaatcacttaaggaggtgtctgctggtttttccactgtacagttactgttttctcttctgtaacttataagtatcttttggtgaaaaactttgagaatatattggtatcctatttcttaccaaattttcatttactgattttagcatccattgttgattcttgcctgaatcacttattactacaatgatctctaagtggtgattttctgtgttttttttttccatacttttaatttattaattggcattctactgtaaggaaatgcttttccttttcttccttttatatcactatggactcgggtttttattttattctatggattctaatgtttccattatttttgtatttattttgatgctcaattgtttcagggtcagatttgggcaatgggaacctcttcaggtgggtttctgtgtcattgcgacatgtcactatcattgagcacttccttactttctggtatagaaagatgtttcagatttatattgtgttgtttctttccagttctggaatcagccatttctttaaggaactgtaatttcttttgaaataaagatctgggcattagagatgcttattgctaatatgatagtaattatcccaggccatctcagcagataaagcactttgcttttttcttttaacatagtatttctggaagtcgctagatcaacatttctagaaatgatattcttttaaacagtttcattgcacttcattttggaaacaagtcagaatttattcaaacattctcctatgtaagagtgtttagattgtttccagtattttgcgattataaactattctgcaatgaatattatatatatatgtatatatatatatatatatatatatatatatatatatatagttggaggtgtatcttcagggcaaattcttagatagtggattgctaggtaaaaattaatgactatgtatttttgttagacaatgcccagttcccctctgaaagtgttgtaccaaatttgtattcccaaaacagtatataatagaagagtgcctgtttacccagaacctcaacatcagaatgcattgttactttttaattttaaccatctgatagtatctcagtgtagttttaatttgtatttctatctaaaagttaaggctgaacatcttttcatatgtttaagggccttttaaaaattttttcttttagagacaggtcaccctatgtggcctaagctagtctctaactcctggcctcaagcaatccttctgccttggcatccccaagtactgggattacaggtgtgggccactgtgcctggcctagggtcattatgaaactatcttttgttatgaattttctgtttataccttttttttttttttttttttgatggaatctcgctctgttgcccaggctggagtgcagtggtacaatcttggctcactgtaacctccacctccggggttcaagcaattctcctgcttcagcctcccaagtagctgggactgcaggcatgtgccaccactcctggctaatttttgtatttttagtagagacagggtttcaccatgttagccaggctggtctcgaactcctgacctcaggcagtccactcgccttggcctcccaaagtgctgggattacaggcgtgagccaccatgcccgacctgtttataccttttacacatttttctatcaaggctttggtctttttcacatggtttttaagaggctttttttttttaatgtaagggatattatctctttatctacaatatatgttattttctgtgcgttgttttttaaattttgtagtgtttttgccataaatgttttaaaacatttttatatagtcaactctatcaaattaaaaaaatttgcctctattttgagtcatattagaaaacctttcccttaagcctgcattatattgaaattcacttgtgttttcttctagttttctgtagtttcttttttacatttagactcctgatccatttggagattattattgtgtatggtgtaagatatggatctaattttaccttttcccagaagtctaaccaattgtactagcattctgtttttttatttttttatttttatttttttttttgagatggagtctcattctgttgcccaggctggagtgcagtggtgcaatctcagctcacggcaacctgtgccttctgggttcaagtgactcttctggcttagcctcccaagtagctgggattacaggcacgtgccaacacgcccggctaattttttgtatttttagtagagacggggtttcactgtgttagccagatggtctcgatctcttgacctcgtgatccgcccacgtcagcctccaaatgtgctgggattacaggtgtgatgtactagcattctttattaaaaatttacctttgtgggctgggtgcagaggctcatgcctgtaatcccagcactttgggaggccgagtgggggagatcacgtggtcaggagttcgagaccagcctggccaatatggtgaaaccccatctctactaaaaatacaaaaattatccaggcgtggtggcatgcacctgtagtcgcagctactcgggaggccgaggcagaagaattgcttgaaccagggaggcggaggttggagtgagtcgagatccgccactgcactccagcctaggcaacagagcgagactacgtctcaaaaaaaaaaaatttacctttgtgtcatgatttgagatgccaccatcatcatatattaaatttctatttgaatctgtttctggacatgatattattccactgaagtctgctagtctatttatgcactgatatctcactgttttcattacggaggccatatagtatgttttaatgtttggtaaggttactcctctctcaaaacagggtttttttgtttttgttttttctttttttagtgttttgcccactattgttacatatttgtttttcttttctttttttttttttgagatggagtttcactgttattgcctgggctggagtgcaatggtgcaatcttggctcaccgcaacctctgcttcccaagtttaagtgattctcctgcctcagcctcccgagtagctaggattacaagcacgtgccaccatgcccagctaattttgtatttatactagatacagggtttctccatgtcggtcaggctggtcttgaacttcctccctcaggtgatccgcctgccttggcttcccaaaatgcttggattacaggcataagccaccgtgcctggctacatatttgtttttcgtaaggtctttttagctaacttgtctatctccataagaaaagcttattggtattttttgggagatttagttgaatttgtaaattaactttgggagaactacatctttatgatgttgtatcatcttatccaaaacagggatatcttttcatttcttatttttttattttatttgagatggagtctcgctctgtcacctgtgctggaggctagagtgcaagtggcacgatcttggctcactgcaacctccgcctcctgggttgaagtgattctcctgcctccgcctccggagtagctgggattacaggtgcgtgccaccatgctgggctaattttttgtatttttagtagagatggtgtttcactatgttggcaaggctggtctggaactcctgacctcatgatccacccgcctcggcctcccaaagtgctgggattacaggcatgagccacagtgcccagcccgtttctttaagtctatttgtctttcaagaatgtttaaaaacttttcttaaatagattttgcacgtttattaagtttgtttgtaagcatttagtgttttttggtgctaacattaattatattttctttaccattctagtctctaattggtttttgttttcgcatatgaagtctactgatttctgtatattaatcttacatcctgttaccttagtgaattcttttattattcaagttggttttatcattacttctctgtggttttccagaaatttattactgacattataaggctttctgggggagcatggcaggttgcctaagctggtccaaaactggtttgaaagagcagggaaaggagactgacttggggtttttatgatggttagagggtagagccagggagaggatttctacatgtggtttggctggtggcaaaagagaggggctttttttttttatccctttgcttaatgttaggtagaaaggggaaagagggagagttaaggtctaaaagctggcagtagtcaaacatcaaaaatggaatcagactattatagtttctgatatatttggatagaggtctgcaaagtcatttcttatttaaaaaaaagtcttctgtttagtagtattttccctttgttatttttttattttgtacatttgtgctttatcccccatattattaattcattagctaatggcttattttgttaacttttttcctaaaaccgcaggctttgaatttttaggtctgctgtttttctactccccatatcattactttctgttcttatcttttttgtgtcattctttttgtttattttctagcttatggagctgagaatttagtttcctattatcatttttcatttttactgctaaagtgtttagagctatggagttttctgactgctttaaatgtatcccatatattttttatgagtagagcttttaatgttatcattatttttagattctatctttcacttcatttcccctttcacccaagagttgtttaaaagacacttaagaaatttgcaggtaggaagacctttttgttatttttcttgttaataatttctagttctattgcattgagtgttgtttgtattatttctactttatggaatttactaatgtttcattgtaaccaaatatatgatcagtatttgtgaatgttccatgtactcttgagaagttttattgcctattatcagggtaaaatgtttgatatatgtatacatccataaaatttactttatcaagtttattgagtcttttctctgtgtttttggactcattgatctactaaggtgtcttataatctcttattattaatgtatttctacctttatttccttacattgccttatagttttgccttatacaagtaattactgtttcatttgggatatttcttaactgccatgtcttcattttgatttgtggctctcagcattaagaaatatccttctggtaggctgaggcaggaggatcacttgaagccagaagtttgagaccagcctgggcaacatagtgagactatgcctctacaaaaaattaaaaaatattttagctaggcatggcagcatgcctctgtagttctgctgaggctgagaccacaggattgcctgagcccaggagttctaggctgcagcgagccgtgatcatgccactgcccattgaactttagcctgggcaacagagcgagtccctgtctctcactctctaaagaaaggtatccttctatgcacatttaatgtgtaagcttaaattctacaattttgatcaggattactacttgttttcttattgttttcatttgcctataatacctttgcccatttcttgatatttagtctttcggaatcaccttgttttagttatgtgtctagtattcagcataatacattcagtcctattttaggagcaaaattgcacatctttatgttttaatagttgaggctcattcacatttattaatgtgactaatatgtttgatttcagttctgtcatattattttatacaggttgagtatcccttatccaaaatgtttgagactagaagtttttcagatttcagatttattggattttggaatatttaaagatacataatgagatatcttggggatagcacccaaatctaaacatgaaatttatttgtttcatatacgctttattcacatagcatgaaggtagttttatacaatattttaaataattttatttatgaaagtttgtgttaaatacttaaatgtggaattttccacttataacgtcatgtctgtgcttaaaaagcttcaaattttggaatgatttggattttgaaattttgaattaggaatgctcaacctgtaattatatactatggtacattttatgtttttctttatctaccagatatttttcttttctcctttagttttgaaatttctgtggtatttaagaagatttatatttttgttttattggttacctttgtacttatattttaaaacacccttagaaaataggggaatattttcttatttaacttctactatctgctttgtcagtttttttttcccagtggtggctgttgaaaagcactaatattttatgtcattctatctcaaatccagacaaataacctcagttgtttcaacaaacttctctataaaatagaagaagctgggcagagagcagcaagatttatcaacagcatcattaaaattacccagtgcactaacattactaactatcctgacacaagctaaacacttaattacctaccatctctcattgcttgtgatgtattcttttttgttgttgttgttgagatggagttttgctcttgttgcccaggctggagtgcaatggcgcggcctctgctcactgcaacctccacctgggcctgtaatcccagcttgtgatgtattcttattcacctgcacagactggaaatgatattgaacccaggaactaagatacaatcataactaccatttattaaacacatacttcatgccagtgctgggctggacactgttccaaatgaccttattaatcttcccaacaaatctatgggatacatgtttctatcctatttaaaggagaatgagattaatgaatttcatcatgtgtagagaacagttttaagcccaggtctacctgactgcacaggccctgttctttgtttttgtttgtttgtttaataatatccttgtatatgcctgtactataacttaaaaaaaatcattgctttgtcagtttttttggtatcttttaacttttacctcttgcctatttagtaatcaatgagcttattctactttcctctttttctttcctacacttcacctttttttaataggtggactttttctttctagtagtagttttagattaatcttagttttggtggctcccttcttttctctttattttactcaattttcccttcctccccctcttcccctcccctctccctccctccctccctccctcccttccttccttcctctttcattctttcctttttttccaaagacaaggtctcatgttgcccaggctagagtgcagtggctactcgcaggcaggatcttgccgttgatcagtgcggcagttttgacctgctccatttccctcctaggttggtttacttctccttaggcaacgtgataatcccttggcccccacaggtcaccttattgaagcccaacttagtgcagacacctggacagcgtagcgcaccacagcccagaacttctaggctcaagcgatccttctgccttagcctccagagtagctggaactacaggcacacccagggcgtccggcttttttgcttaatttttgtttcactatgttttgtagttcactaatgttttgtagttcactatggtcttcttttctcccttcttcttttttccccctattatagataacttaaagtttggcatttcgtcttctagttatactgaagacaaagtttttgtatacttttatttgttcttgttttgttttttgaggatgtatagagaaagatttaggcagccgcatctaccaggtagtccagtagatgtattttgagtgatatgctagcgatatcagttattgtctccctgctgcaatcttttgttctcatccacagcctctgctgaaggagtaaacacaagtgaccatatttgtaactaaaacaagtgaccttatttttactaaatgacctcaccctttggccacagatgaatttatctttcctgtatggatacaggacctaaactctgccaagctgattatatcttttgagaatttgaacgaaaggacacagaaacgtaatcagttagtataggatgctggagctgttaagtcttgtagagtcaaggccacagtgtcatgaaaactgaaggtatggaggagcagaaactaagaggttcacagaagtaggtggaatgcagagtactcagcagagagaagtttataatggtgtctttggagcaacaagagaatgaggcaggaagagagccaaagaaactggtataaacagtttctgatgactattcaattcccaagagacgagcttgaataacttccaacaatattcaacatatttttctattattttattacattttcttgaggttttttgggtgtgggtctctgtttcttaattaattaatttcctgaatatattaggctttaataaatgtttatcatcctggtgttattacccagatacaatatgatgtgggactacaaataatgagggctattcacagaattgacttgagataatttgagagtatcaagttattaaatatattacaagaattttggatctggaagggacctatgaggaatatctagttcaaattctcaaattttagggaagagaggccaagagaaaatgatttgccgaactttgacattgaattagaggtctcattagaattagaactgtggtttcctgatacccagtctagttttcatttgactacatgttctgagttagacagtataaccccccaaattcatatctacttgaaactgcagaatatgaccttatttggactagcatctttgcaaatgtaatgaattaagatgaggtcgtactcaattagagtggatggactttaatccaatatgactggtgtccttacaagaaggaaaaacagacagaatgccatgtgatgacacggcagagattagagtaataaagctgtaagccaaagaacaccaaggattgacggctgctaccagaaggtagaaagaggcagggaagaaatgattctcctctacagctttcagaggtactactgacctctggttttagacttctggctgcagaattgtgattataaatctctgttgtgttaagccatccagtttatagttcttcgttatgacagccttaggaaaccaaatatactaccgcatggtacacttttaatgtaaagagattcttccctgaatgtcaccaaaaaagtatacagaaactacattcttcaaaagggaagaaaatagctttttctgttgggtatatcaatcttaacttttaaattcttcagtgtgcttagctatacttttgtgccatttagagattacagtattgttcatcttgggattttcaaggaagtatgtcactaggaaattttgcttttattcttttaaggaataattaatggtggcaggcatatggagtgtgtgtgtgtgtgtgtgtgtgtgtgtgtgtgtatgtatgtgtgtgtatgttatgttacggattttctgttatatgatattctgaaatattgtacttttattttcaggttactgaagctaaaggagatgtttaactccaagtttggatctattcccaagttttatgttcgagcaccaggaagagtcaacataataggtatttcaaaagttccttctcttaatttttttcttcatcctttgataagatctaaatttttaaaaatatatttctttcttaatttttcccaaaatagaatatttcacatgtatctactaatagtaagatgtgcctttgcataaggaacacactttacttttatctttcccaatccatgttattagtattgttcatttgttttttaaatgtattaatttgttgaaaccaagttgttaatattgttttcataaaaaatgaaaatatttttctaggccacaggttaaaattttagactgtggtaagtagttttgatggttttatatttactcactgggttagaggagcacagggaaaccttaaaattccttgctactaaaagtgtggtccagaatttgcagcccttctagatgaatttatctttccttttgtttatcctgtgaagtactttgaattttactaccttttagtggtaaataacacaacctttcaacattttgtttactatcattttatcaatgtccctatatataataattgacatagttgtacttagactacataccatttgtatctttttttcatttaatatatcataaatatttccatgtatctatttccattttctgctggtataacagaattccacagatggggtaatttatcaacaatagaagtttatttggcttgtgattctggaggcagagaagttcaatatcatggtactcacatctggtgatggccttcttattgtgttattctcttttttttctgagatggagttttgctcttattgcccaggctggtgtgcaatggtgcagtctcggctcactgcaacctctgcctcccgggttcaagtgattctcctgcctcagcctcccgagtagctgggattacaggcatgtgccaccatgcctggctaattttttgtatttttagtagagacagggtttctccatgttggtcaggctggtctcgaactcccaatctcaggtgatccacctgccttggcctcccaaagtgctgagattacaggcgtgagcctccacacctggcctcttgtgtctgttaactgacctctccctacctgcccttcctgccctcactacatgttatccttcccagcctctagtaaccattaatttatcctctatttttatgagatcaactcttttagcctccatatatgagtgagaacatgaggtatgtatctttctgtgcctgacttatttcacttaacataatgtcctctaagctcatccatgttgctgtgaataacaggatttcactcttttaggtggctgaatagtattccattgcacacatacaccacattttaaaaatccattcatctgtgaatggacatttatgttgattctgtatcttgactattgtgaatagttttgcaataaacaagagagccacatatctctttgacatactgatgtccttttctttggatatatacctagtaatgggattgctggatcatatggtggttctatttttagttttttgaggagccttcatactgttttccatatggctatactaatttactttcccaccaacagtgtagaagaattcttatttctctgcattctctctaacacttattattttttgtctttttgataatagtcatcctaactgaagtgagataatatctcctggtggttttgatttgcattttcctgattattagtgatgttgagcatttgtctatgattgtaagtcatttgtatgtcttctttttagaaatgtctatttagatcatttgccaatttttattttattttattttattaatttatttattttgagacagagtctctctctgttgcccaggctggagtgcagtggcacgatctgggctcactgcaacctccacctcctgggttcgagcaattctcctgcctcggcctcccgagtagctgggactacaggcacgtgccaccatgcccaggtaatttttgtattgttagtagagatggggtttcaccatgttggccaggatggtcttgaactcctgacctcagatgatctgcccaccttggcctcccaaagtgctgggattacaggtgtgagccaccacaccgagaccatttgccaattttttaattggaatatttgttttactactgttgagttaagttttttatatattctggagattaattccttgttcggtgaatagtttacaaatattttatccctttcaacaggttgtctcttcactctattggaaggtttcctttgctgtgcagaagctttttagtttgatataatttcatttgtctatttttgtttctttgcctgtgcttttatagtcttattcataaaatctttgcctagaccaatgtcttgaagtgtttcctttatgttttcttctagtagtttcatagtttcagttctgatgtttaagtctttaatccattttaaattcatttttataaatggtgagatattggggcctatttttattcttttgcatatggatatctagtttttccatcaccatttattaaacagattgtccttttccctatgaatgaaagtaactttgttgaaaatcatttggccttggccaggcatggtggctcacacttgcaatcccagcactttaggaagccgaggagggtggatcacttgaggtcaggagtttgaaagcagcctggccaacatcatgaaacctcgtctctgctaaaaatacaaaaattagctgggtgtggtggcacacacctgtaatcccagctacgcagggggctgaggcacgagaatctcttgaatctgggaggcggaggctgcagtgagccgagatcaaaccactactgcactccagcaggattctgtctcaaaaaaaaaaaaaaaaagaaaatcagttggctgtaaatacatggatttagctctgggttctctattctgttctattggtctgtatgtctgtttttacgccaaaaccatagtattactgtagctttgtagtatatttgaagtcagatagtgtgatgcctccagcttttcttttcttcttcttcttcttcttttatttttttttttggctcaggattgctttggttttttggggtcttttgtgattccatacaaattttagaattaatttctgtgaagaatgtcattggtatcatacgaggaattgcattgaatctgtagtagtatggtcattttaacaatattaattcttccagtccaagaatgtgggatgtcttcccacttttttgtatcctcttcaatttctttcatcagtgttttattgttttcattgtacaggtcttttatcaccttggttaaatttattcctagatattcattttttttagctatttcaaatgggattgcttgcttgatttctttttcaggtagtctgttattggtgtatagaaacactagtgattttaaaaattttttcaaagtacttttatttattattttaaaatcttatttttccataagttattggggtacaggtggtatttggttacatgaatacattttttagtggtgatttgtgagattttggtgtacccatcacccaagcagcatacactgcactgtatttgtagtcttctatcccgcgctcccctcccactcttcctcacaagtccccgatgtccattacctaattcttatgcttttgcatcctcatagcttagcccccacatatcagtgagaacatacaatgtttggttttccatttctgagttatttaacttagaataatagtctccagtctcatccaggtcactgcaaatactgttaattcattcctttttatggctgcatagtattccattgtatatataccacagtttctttatctacttgttgattgatgggcatttgggttggttccgcgattgggttggttccataataccaatgacatatagtggcaattgtgaattgtgccactataaacatgcgcgtgcacatatctttttcaaataatgacttcttttcctctgagtagatacccattagtgggattgctggatcaaatggtagttctacttttagttctttaaggaatctccacactgttttccatagcagctgtactactttacattcccaacagcagtgtagaagtgttccctgttcaccacatccacaccaacatctactcttttttgatttttagattatggccattcttgcaggagtgaggtggtatcacattgtggttttgatttgcatttccctgatcattagtgatgttgagcatttttccatatgtttgttggccatttctatatcttcctttgagaattgtctattcgtgtccttagcccactctttgaatgggatggtttgtttttttcttactgatttgtttgagttcattgtagattctggacattagtcctttgtcagatgtatagactgtgaagattttctccaactctgtaggttgtctttttactctgctgactgttccttttgccatgcaaaagctctttagtttaattaggtcccagctgtttatctttgcttttattgcatttgcttttgggttcttggtcatgaaatccttgcctaagccaatgtctagaagggtttatccaatgttatctgctagaatttttttagtttcatatcttaggtttaagtccttaatccattttgagttgatttttgtgtaaggtgagagatggggatccagtttcattctcccacatgtggctagccagttatccccgcacaatttgttgaaaagggtgtcctttccctactttttgattttgtttgctttgttgaagatcagttggctataagtatttgggtttatttgtgcgttctctattttgttccattggtctacgtgcctatttttatactagtaccacgctgttttggttgactatggcctaatggtatagtttgaaatcaggtagtgtggtgcctccagatttgtttctttttgcttagtcttgtttttgctatgcaggctcttttttggttccatatgaatttttatttatttatttattattattatactttttttagggtacatgtgcacaatgtgcaggttagttacatatgtatggttccatatgaattttataattgttttttctaagtctgtgaagaatgatggtggtattttgatggggactgcattgaatttgtagattgcttttggcagtatggtcattttcacaatattgattctacccatccatgagcatgggatgtgtttccatttgtttgtgttgtctatgatttctttcagcagtgtttcgtagttttccttgtagaggtcttttgactcctttgttaggtatattcctgagtattttattttattttttatttatttattttttgcagctattgtaaaaggggttgagttcttcatttgattctctggtcgctgttggtatatagaagagctatatttgtgtacattaatcttgtatctggaaactttgctgaattcttttatcagttccaggagctttctgaaggagtccatagggttttcaaggtaaacgatcgtatcatcagcaaacagtgacaatttgagttcctctttaccaatttgaatgccctatatttctttctcttgtctgattgctctggctaggacctccagtaccatgttgaaaaggagtggtgagagtgggcatcttagtcttgtcccagttctcagagggaatgctttcaactttacctcattcaatattatgttggctgtgggtctgtcatagatggcttttattacattgaggtatgtcccttttatgtcaattttgctgagagtcttaatcataaagcttgctggattttgtcgaatgctttttctgcatctattgagatgatcatgtgatttttgttttctattctgtttatgtggtgtatcacatttatagacttgcctatgttaaaccatccctgcatccctggtgtgaaacccacttgatcatggtagattaactttttgatatattgttggatttggttagctgggattttgttaaggattttagcatctatgttcatcaaggatattgaactgtagttttctttcttggttatgtcctttcctggttttgatattagggtgatgctggcttcataaaatgaattcgtaaaatgaattcggaaaggttccttctttctctatcttgtggaatactgtgaaaaggattggtttcaattcttctttgaatgtctgatagagttctgctgtgaatctgtctggtcctgtactttttttttgttggtaatttttaaattaccatttaaatctcactgcttgtgattggtctgttcagggtatctaattcttcctgatttaagctaggagggttgtatttttccaggaatttatccatctattctaggttttctagtttactcatgtaaaggtgttcatagtcgccttgaatgatcttttgtatttcagtggtatcaattgtaatatctcctcttttgtttcttagtgaggttatttggattttctctcttcttttcttgggttaatcttgctaatggtctatcaattttcttttctttttttgagacggagtctcgcttttgtcacccaggctggagtgcagtggtgtgatctcagctcactgcaatgtccaccacccaggttcaagcttctcctgcctcagcctgagtagctaggattacaggcacccaccaccatgcccagctaatttttgtacttttagtagagacgagatttcaccatgttggtcaggctggtcttgaactcctgacctcaggtggtccacccgcctcagcctcccaaagtgctgggattacaggcgtgagtcactgcgccggcccaattttatcttttcaaagacccatctttttgtttcatttaccttttgtattttgtttgtttgtttgtttcaatttcacttagttctgctctgatattggttatttcctttcttctgctgtgtttgggtttagtttgttcttgtttctttagtttgttgaggtgtgaccttagattgtctgtttgtgctctttcagactttttgatgtaggtgtttagggctatgaactttcctcttagcactgccttagctgtatcccagaggttttgataggttgtgtcattattgtcattcagttcaaagaagtttttaatttccatctggatctcatttttgactcaatgctcatttaggagcaggttatttaatttccatgtatttgcatggttttgaaggttccttttatagttgatttccagttttatttcattgtagtttgagagagtgcttgatataatttcaattttcttaaatttattaaggcttgttttgtggcccatcacgtggtctatcttggagaaagttccatgccctgttgaaaaggatgtgttttctgtggttgttggatgaaatgctctgtatatatgtgttaagtccatttgttccaaggtataggttcaatccattgtttctttgttgactttctgtcttgatgacctgtctagtgctgtcagtggagtattgaagtcccccactattattgtgttgctgtctatctcatttcttaggtctattagtaattgttttataaatttgggagctctagtgttaggtgcatatatctttaggattgtgatattttcctgttggacaaagcctttttaccattgtataatatccctctttgtctcttttaactgctcttgctttgaaatttgttttgtctaatataagaatggctacctctgctcgctttggtgtccatttgcatgaaatgcctttttctacccctttactttaagtttatgtgagtccttatgtattaggtgagtctcctgaaggcagcagatagttggttggttagtccttatcctttttgcggttctctatcttttaagtggagcatttgggccatttacattgaatgaaacactagctatttttaatactgattttgtatcttgcgactttactgaatttatcagctctaaaagctttttatggtttttaggtttttctacgtataagatcatgttgtgtacaagtagagaccatctgacttcctcctttccaatttggatgccctttacatttttctcttgcctgattgctctggctcagacttccagtactattttgaataagagtggtgaaattgggtatgcttgtcttgttctagtgcttagacaaaaagctttccatttttcctcatttggtatgacattagctatgggtttgtcatatatggcctttattgtgtattgagacatgttccttctgtacctagtatgttaagagtttttatcatgaaagaatgttgaattttatcaaatgctttttctgaattgattgtaaagattatatgggttttgtccttcattctgttgatgtgatatatcgtatttttggatttgtgtatgttgaaccccttccttgcatttctaggattaatcccacttgatcatggtatataatctttttatgggctcttgggttcattttgccaacattttattgaggatttttgattatatgttcaactgagatattgtcctgtagttttctttttctgttgtgtccttgttcagttttggtatcagaataatgctggcctcatagaatagtttcaaagaattccccgcctttcaatttttttgcaagtctgaaaagaattggtgttagttcttctttaaaggtttggtagaattcatgggtgaagccctctggtcctgagcatttcttcgttgggagactttttactgttgcttcaatcttgttacttgttattggtgcgttcaggttttctatttctacctggttcaatcttcttaggttttatgtgtccaggaacttatgcatgtcctttaggttttgcaatttgttggcataatagttgttcacaataggctttaatgatcctttgtattttgtggtgtcacttgtaatgtctccttttctgttttttttaattttatttatttgtgtgttctctttttctcagtctagctaaagatttgctattatgtttaccttttcatttcattaatttttgtctcaaatttacttctgctctgatctttattatttctttccttctactaattttggatttggattgtttttgctagagatgtaccattaggttgtttatatgcaaaatttctacctttttttttagtggctgatttattttattttattttattttattattattatttttttgagatggagttctgctcttgttgcccaagctggagtgcaatggtgcgatctcagctcactgcaatgtctgcctcccagattcaagtgattttcctgccttagcctcccaagtagctgggattacaggcacccaccaccatgcttggctaattttttgtatttttagtagagacagggtttcaccacgaaggccaggctggtcgcgaactcctgacctcaggtgatccacccgcctcggcctcccagagtgttaggattacaggcgtgagtcgccgtgcctggtctattttattttatttttaactttcgagatgtagtctcgccctgttgcccaggctggagtgtagtggcacgatcttggctcactgcaacctgcacttcctggactcaagtgattcttgtgcttcagcgtcctgagtagctgggattacaggcatgtgccaccatgcctggctaatttttgtatttttactagagacggggtttcccaatgttggctgtcacacacacacacactcacacacacacacacacacacacacacacacacggccttttcatttctaccacatggctgggcttcaatttttcaaacttgttcactctgcttcccttttaaatataaattccagtttcaggtcatttctttgcttatgcataagagcataggttgttagaagcagccagactacatcttgaatgctttgctgcttagaaatttttttcaccagatatcatcactctcaagttcaaagttccacaggtccccagagcaggggcacaatgcctccagactctttgctaaagcataacaaaagtgacctttactctagttctcaaaaagttttgtattttcatctgagacctctttagctgggacttcattgttcatattattatcagcattttggacacaaccattcaacaagtttcttggaagttccaaactttccctcatcgtcctatcttttttctgagccctccaaactgttccaacctctgccacttacctagttccaaaggtgctttcacattttcaggtatctttatagcaatgccccacttctgataccaattttctgtattaatctgctcttgcactgctataaagaagtatctgagactggataatttatttaaaaaaagaggtttaattggctcacaattttgcaggctgtacaggaagcatggctgggaaagcctcaggaaacttacaagcatggtggaagacaaaggggaaggaggcacgccgtacatggctagagcaggaggacgagagggaggggaagtgctatactcttttaaatgatcagatctcatgagaactctatcatgagaaccacactcaggagattgtgttaagccattagaaaccacctccatgattcaatcaacacccaccaggcttcacttccagcattaggtattacatttcaccatgagatttgggtggggacacagatccaagccatatcatatgggtctaggcattgatccctttcttcttggttttctaatttgttggtatatagttgctcataatagtctctaatgatgccttgactctctgctatcagttataatatctttaaaaaaaattatctgactttatttatttgaatcttctttattttttactttttcttttttgtttgaaatggagtctcgctctgttgcccaggctggagtgcagtggcgctatctcaactcactgcaacctccacctctcagattcaagtgattgtcctgcctcagcctcccgagtagctgggattacaggtgtccacgaccatgcctggataatttttgtatttttagtagagatggggtttcaccctgttggccaggctggtcttgaacgcctggccttgtgatctgcccaccttggcctcccctcccaaagtgctgggattacaggtgtgagccagtgcacctggcctcttttttacttagtgtggctaaaggttttttgatttagtttatgtttgcaaaacaccaacttttaatttcattgatttttttttgtagttttaaatttcaattttacttatttttgctctgatccgaattcttttcctctactaattctgcatttcatttgcttttgcctttctcatttgttaagattcatctttaggttgcttatttgacatatttctacctttttgatgtaggtgtttattgttttaaatgtgcttttttgtactgctctttctgtatcatggagattttgatctgttgtcttttcactcccaattgtttcatgaaatttaaaaatttcttaattttttcattggcccactggtcattcaggagcatattttttactttccaagtgtttgcttagtttccaaagtttttcttcatgtttatttctaattttatttcattatgatcagagaagttacttgatattattttaacttttttgaactttttgagacttgttttgtggtctaacttaagatctatcctggagaatattctgggcactgatgagaagaatgtgtattctggggctgttggatggaatgtttttataaatatccatttgttctatagtgcagattaagtctgatgtttctttgttgattttctccctggataaataccctagggctgaaagtgaggttttgaaatccccagctattattctataggcatctatccttctttttagttttaataatatttgttttacatatctgagtgctccagcattgggtgcacatatatttacaattgttatatcctgttgctgaactgactcctttgacattatataatgaccttcgtctctttttatagtttttatcttgaatcctgtttatttatgcataactactcttgctctcgtttggttttcatttgtatggagtatctttttcttttttaaaaaattttactttaagttctgggatataaatgcagaatgtgtaggtttgatacctaggtatacgtgtgccatggtggtttgctgcacctgtcaacccattgtctaggttttaagccccgcatgcattagctatttgtcctaatgctcttcctccccttcccctccaccccacaattggccctggtgtgtgttccggaatatctttttctattttattttattttttttggtctgcatgtctttattgatgaggttagcttattgtttttgtttttataatccattcatccactttgtcttttattgggaatttagtccatttatattcgatgttatagttataaggtacagacttactactgccattttgttatttattttctggttgttttgttggtcctctcttccttccttcttgtcttcctttgtgtaaaagtgactttttctgacaatgttttaatttattatttaaaactttttttgggctgggcatggtgcctcacgcctgtaatcccagcacgttggcaggtggaggcgggtggatcatggggtcaggagatcgagaccatcatggctaacacggtgaaaccccatctctactaaaaaataaaaaaagatttagctgggcatggtggcgggtgcctgtagtcccagctactcaggaggctgaggcaggagaatggcatgaacccgggaggtggagcgtgcagtgagctgagatcatgccactgcactccagcctgggcgaccgagcaagagtctgtctcaaaaacaaacaaacaaaaaaacccaactttttttgtatctgttacaggtttttgttttgtggttactgtgaggcttgcaaataacataaccaattattttaagcagatgacagcttaactctgattacaatgaaaataaaaaagaaatcagcaaaaagaaaacaaaaaaaccccccaaaactttaccttaaccccatttcttcactttgtcactttttttttttttttttgagatggagtctcactctgtcacccaggctggatacagtggcgtgatctcggctcacttcaacctctgcctcccgggttcaagcgattctcctgcctcagcctcccaagtagctgggactacaggcacctgccaccacacccggctatttttttttttttttttgtatttttagtagagatggggtttcaccatgttagccaggatagtcttgatctcctgacctcgtgatcttcctgccttgtcctcccaaagtgctaggattacaggcttgagccaccatgcccggctgctttgtcacttttgattgtctctgtttatatctttttatgctcagaaagctgtttcagttactatttttgataggtttgtcttttaatcttcctactaagatatgagtgttttaacactatagttacagtgttagagtattctgtattcattcatctgttcatttaccactaccagtgagttctgtaccaccatgtgatatatatttttttacattaatgtgcttttctttcagattgaataactctctttaacattttttgcaagacaggtctggtgttgttgaaacccctcagctgtgtttgtctgggaaagtatttctctttcatgtttgaaggataattttactggaaataatattctagttcaaaagttgtttttcttcaacactttgaatatgtcatccccctctctcttggcctctaagtttcctgcggagttgtctcctactagacatattggagcccctttatatgttctttgcttcttttctttttctgcttttaggatactttctttatccttgacctttgagagtttgattaatatattaactgagttagtcttatttgggttgaatccttttggtgttgtgtgatcttcttataccttaatatttatatcttttcttaggtttggaaagttttctatcagtatttcactgaataaactttctaccctgatctctctatctctacatcctctttaaagccaataactcttagatttgccccttttaggctattttctagatcttgtagagaggcttcattcttttaaaattatttctcttttctctcctctgactgtgtatttttatatagcctgtcttcaggttcactatttatttttcttgatcgattctgctgttgagagactctgagacatttttgagtttgccagttgaatttttcagctgcagaatttctgtttgaaatttcaaaaactattttaatctctttgttaaatttctctggtagaataatgaatttcttccctgtgttatctttaagtttgttgagcttcctcaagacagttcttttgaattctctgtctgaaaggacatacatctccatctttctgggattggtcactggtgtcttctgtagttcatttaatgaggtcatgttttcctggatactcttgatgcttgtggacattcatcacttatgggcattgacaaattagatatttatttgtctgtgtagtctgggcttgtttgtacccttcattcttgagaaggcttttcatgtattcaaatgggattgagtgtgttgtgctctaagcctgtggtccgtatgggcatatcggcacaaggaggtgctctaagcccaggaatgctgcaattcttcctgacatctagaggcactgccttgacgagtttgggtaaggtaaaggagaattccctgggttgtcaggcaaagtcctcttgatatcttccctttactcctcccagtcagaagtagtctgtctccatactgggctgcctagagcacttccatggcttccacagctggcactgtgctaggtcacacctgaagcctgtataatactggatcttgcctggttactgctgatgtttattcaaggcccaagggatctttagtgagcaggtgaatcctgccaagactgggttcttctcttcagggcagtggattccctctgaatgagagtgggtccaggaactaagtcctggaattgacagcttcaggaatctccttggtgctttacttcgactgagctggtacccaaattgcaagacagtcttctgtactcttcccacttctttccttaagctaaaggaatctctccccaaactgcacttcctggagttgggtgcagtgcgatcaggcactcccctggctgccacagctggtgtcacacttggtcacacatcacaagtctactgcctccaaggccggtgcagtaccagggcttgcccgaggactgcagtacttgtggcctgacagccacttaagcttattctgggcactaggccagtttagttagccagaggtgaggttggttgggactcaggttcctcctgctgagattgagaattctgtcttgcccagggctgatctaaatgccccctccttgggtgctagcagagttctgctgttttgtgtttttctgtaacatggctgcactaagttccagtgcaaagacccacactcacttcaccctccctcccccaaacacagtttctctgtccatgctggaagggatcctgtaggcaatgcaagactgtctttcctgtcctcttcaattcctctatccctgatgttatgttaaaaccaggtactgtgattttcaggtactcacctgaattttctgggttcttatgaaggtgtttattgcatagatagttgctcaatttggtgtaagatcatggaagggttctatttggccatcttgctctgcttccctttatttttatttactgttaaaacctggctcatggtcagttttttcctgtatgtaaactttcttgaggtgcttttgttttatatattagcaatgattaaaaaagctttctcttttttctaggagagcatatagattattgtggatattctgttcttcctatggctgtagaacaagatgtgctaatagctgtagaacctgtgaaaacgtacgctctccaactggccaatacaaatcccttgtatccgtgagtatttaaaattgttagtgtgtgtgtatgtatggttctgtttgtacccaaatgaactctttaggagacatcaaatttgtaacaggtcatttaacttattgatattttgtgtctgacattaaaaaaattctaaggccattatttattgttcattttgttcatttgtcaattcatttaaggaatatttatcaaagacttatcatgtgctagacatagtcttagataccaggtgatacaaagataaataactctgtccttgtccgataggtacttatcatctattgatctaattatctccagcaaagtcaggtctgatgttttcctatgttactatggcaccttctaagtatcttgtcatagcatattattatgctgtattattattatctgtttatttacctgtgtcacccagtagactgtaaactctgtgacttcaggcattgttgcctctcttcttcaatgccctagcatataaaacagagtctggtgcctaatagaggtaagtttctagtacatatgctttatcaagttaacaaagtctttaaaaaaaatcttagtttgctaagattaaaaaagtttactaatgggtattgaatttaattaaatgtctatttagaattgaagatcagtttttttaaaaatatggtgaattagtctgacgaattttctaatgttgagccctttttgcatttctgggataaactctacttgcttctaatgtattataatggatttgacttgataattacagaaaaagattttggcttgtatttggcatattatatgtttggcttgttcattggttagtttatctgcaataacattcatgtattcggaaaatatttttgataagactctataccagtttgtgcaagacgtagaagttttttacttttatatggaacttactgtagaagatctttttttccttttcatttcgcatgtttgataatatatcttgtgtgcattttggacccttgaaaagctcacattatgtcaagcatattttcgtgtcattgtgtatgaacatttaaaaatcggtgcatagtattttgtcatcttgatttagtaaaatttacttaatcattcccacaataatgaatatgtggtttcagtttcgtttttcacaaaagtagatcctgagacagacctggatgaaggtagtatatttgagaaatggtcccaggagcagtaggaaagagcatgaagaatgagttgggcaattagaggtgaattatcaagacatatagtccctgctagaggcaggaggcttgattctaccaggacccctaggaagcatgcagtatgcctcctagaattgtccatttgttttagcattcattgtgtaagtatatcttaatttgtttgtttaccaataatggacatttagatcattcccagtttttgcctgtatgaataatactgctacaaatatttatgtacgaatatatgtgtggacatatgtttcatttctgttgggtaaatacctatgattggagtgtctggtttgccatttatttatttattgagacagggtctcaccctgttgctcagcctggagtgtagtggggcgatctcagctcaactcaacctctgcctcccaggttcaagagattctcccacttcagtctccggagtagctgggactacaggcacatgccgtcacacctggctaatttttgtattttttggtagagatgggatttcaccatgttgaccaggctggtcttaagctactgacctcaagtgatccacctgcatcagcctcccaaagtgctgggattgcaggtttgagctactgcatccgtcctggtttgcctttgatatggtttggtggtgtccccacccaaatctcatcttgaattttaactcccacaattcccacgtgtcctgggaggaacctggtaggaggtaattgaatcatgggggcaagtctttcccatgctgttcttgtgataatgaataagtctcatgagatctgatggttttaaaaatgggagtttccctgcacaagctctctttttgcctgacaccattgatataagacgtgacttgctcctccttgccttctgccatgattgtgaggctcccgcagccatgtggaactgtaagttcattaaatctcttgcttttgtaaattgctcagtctcaagtatgtctttatcagcagcatgaaaatgaactaatatagccttttaaagaaattttctggctgggcacggtggttcacgcctgtaatcccagcattttgggaggctgaggtggatggatctcttgagcctgggagttcgagaccagcctgggcagcatggcaaaagcttgtctccactaagaatacaaaaaaattagttgggtattgtggcatgcacctgtaatcccagctactcaggaggctgaggcaggagaatcacttgaacctcggaggtggaggttgcagtgagccaagattgcgccactgcgctccagccagggtgacagagcgagactctgtctcaaaaaaaaagatattttctgcttgccaaagttgtataattttacattttcaccagtggtgttactaacatgtcttaaaattttagctattctcataaatgtgtagtagcatatttcaagtttttaaatttctctgattaatgatgttgaacatcttttcatctacttatttgctacctagatatattctttgttgaagcgtcttctcaaatcatttccctatttttgagtttcttatagatacaagtcttttttttttttttttttttgagacagagtcttgttctgtcatttctgtgttgggacattacaggtcctttcttctaggtattttgaaatatacaatacatggttgataactatagtccccctactctgctatagaccattagaacttattccttctatctaaccgtatgtttttacctatttgccaacctctttttatcccccgttcactgaccattcctcacctctattatctattattctaccctgtaccttcatgagatcagttttttaagttcccacatatgagtgagaatatctgatgtttgtttttctgtacctggcttattccatccacattgctgcaaatgacatgattttattttttttatggctgagtagtattccattgtgtatatatacattttctttatttattcatctgttggtgggcacttaggttgattccctatctttgctattgtgaatggtactggaataaatatggagtgcaggtatccccttgatatactgatttcttttcctttggataaatacgcagtattagggttgctggatcatatggtagttgtgtttttagtgctctgagaaatctccctactgttttgtataatggctgcactaattacattctcaccaacagtgtataagtgtttccttttttctgtgtccttaccagcatctgttttctttagtcttattagtaatagccattctaacttgggtaagatgatgtctcattgtggttttgatttccattttgctgatgattagtgatggtaagcagttttcatatacctatctgccatttgtatgtatgtctttggaaaaatgtctcttcatgttatttgtccacttttaaatgggattattactagtttttactatcgagtgttttgagttccttgtatattttggatattagttccttgttggatgaatagtttgcaaatattttctcccattcaacaggttgtctccccactctgttgattgcttcctatgtgggcagaagctttttagtttaaaatagttttatttatctatttttgttttatttttctgtacttttgagatcttagtcataaaatctttggctatatcctaaagtgtttcccctatatttctttctagtagttttatagttgtgggtgttatgtttaagtctttaacctatcttggattgaattttgtatatggtgagaaataggggttcaattcattcttctgcatatgggtattgagttttcccagcaccatttattcaagagggtgtttgttcctgaatgtattttcttggtacctttgttgaaaatgagtttgctggccgagcgtggtggctcatgcctataatccctgcactttgggaggctgaggcaggcagatcacctgaggtcaggagtttgagaccagcctggccaacatgatgaagccctgtctctattaaaaatacaaaaaattagctgggtgtggtggtgcgtgcctataatcccagctactcaggaggctgaggcaggagaattgcttgagcccaggaggtggaggttgcagtgagccgagatcgtgacactgcactccagcctgggcaacaagagcaaaatctctgtcttgaaaaaaataaaaaaattaaaaaaaaaagaaaatgagtttgctgtacatacatggatgtatttctgggttctcccttctgtcccattattacttgtgtctgttttgataccaataccttgctgtttgggtttttatagccttataatatattttgaggtcagatagcgtgacccctcttgctttgttctttttcctcaggagtgctttggctatttgggctcttttttttggttttatacatattttaggatatttttctatttttgtgaaaatgacagtagtattttcatagggattgcattgaatttgtagactgctttgggcagtatgttcattttaacaatattaattttttccaatccatgaacatgggatgtcttttcatttgtttgtgtcctcttcaatttcattcatcagtgttttctagttttccttagagatctttcatctccttggttaaatttattcttaggtatttttttttgtagctattataaacagcatttctggcttaatttctttctcagctagttcattattgatgtattgaaatgctgcaaatttttgtatgttggttttttatactgcaactttactgaatttatttattaggtgtaagagttttttttagagtctaggtttttctggatataaaatcatgtcacctgtgaaacaggacaatttaacttcctccatttcaacttggatccttctatttttattcttgcctgattattctggctaaaatttctagtattatgttgactaggagtagtgatattggtcatcttttttgggttccaggttttacaggaaaggcttcaacttttctttatttgatatgatgttagctgtgggtttgtcatatgagacttttattgtgttgtggtatatttattctatgcctgataattgagagtttttatcgtgaaaggatgttgaattttattacatgctttctctatgtctattgagatgattatgtggtttctgtcctttattctactgatgcgatgtgtcacatttagtgatttgtgtttcttgaacaatccttgcatccctgggataaatcccgcttgatcatggtgttttatctttttgatgtgctgtgggattcagtttgcggcaattttgttgaagatttttacatatatgtaaatagggatcttggcctgcagttttggtttttgttacacctttctctaattttagcatcagagtgatgcttgccttttgggactaggttaattcccttctcttcaattcattggaattgtttgaagaggattggtatttgttctttgtaagtttggtagaatttttcagtgaagctgtccagtcttgggcttttctttgttggaagccttttcattttactgtttcaatcttggtacttgttactagtctgtttatgttttttgtttcttcctgatttaatcttggtatgttgtgtgtttaggaatttatcaatttcctttaggttttctggtttgtttgtgtatagtatagttgttcataacagtgtctgataagcttttgtatttccatggtatcagttgtaatgtccttttttgattctgattttgtttatttgggtcttctcactttttttcgtggttaatctggctagcagtttatcaattttgttcttcttttcaaataatcaactttccattttcttgattctttgtattttttcagtaaaataatttcaacttttattttagattcaggggttacatgtgcaggtttgttacttggatacattttgtaatggtgatgtttggggtacagatgatcccatcacccaggtagttagcatagcagccaataggcagtttttcagcccacacttcctgcctccctactgcccccgccattgcttactagtcctcagtgtctattgttcccatctttatgtccctgtgtactcatatttagctcccacttataagtgagaacatgcagcagtacttgattttcttcctgtgttaatttgcttaggactatagcctccagctgcatccatgttgtcgcaaaggatatgatttcatcctttttatggctgcatagtattccctggtgtatgtataccacagtttctttatccagcccaccattgatgggcacctgcgttgattccatgtgtttgctatggtaaatagtgcttcaatgaacatatgagtgcatgtgtctttttttttttagaataatttattttcctatgggtatatacccagtaatgggattgctgggttaaatggtagttctgttttaagttctgtgaggaaactccaaactgctttccacagtggctgaactaatttacactcccaccaagagtgtataagcattcctttttctacacagccttgccagcatctgtttcttgttgacatttacataatagccattctgactggagtgagatggtatctcattgtggttttgatttgcatttgtatgtcttcctttgagaagtgtttgttcatatactttgcccatttttaagtgggattatttgttttttgcttgtttatttgtttacaatgtttacagattctgatattagacctttgtcagatgcatagtttgtgaatattttctctcattttgtgagttatctgtttactctgttgatagtttctttcgctgtgcagaacctctttaattaggtctcacttgtcaatttttgtttttatcacagttgcttttggagatttagccataaaatcttggccaaattctaagcatttcctaggttttcttctaggattcatacagcttgaggtcttatatttaaatcttttatccatcttgaataaatttttatatatgctgaaagataggggtccagtttcattctactgcatacggctaaccagttataccagcaccatttattgaatagggagcccttccttcattgcttgtttttgttgactttgtggaagatcagatggatgtaggtgttcagctttatttctgggttttctattctgttctataagtctatgtctgtgtatctgtttttgtaccaatactatgctgttttggttactatagccttgtagtataatttgaagttgggtaatgtgataactccaatttttttccttttactttagttttttcactgattctcctctgagagaagtggtgttcttttaactgtggtttaaatggaggatagtcaattggcttcatttctggttgctttcagagggccaaggctctgtacaggatctttatttgtggctagattcttgcccctggtttcacaagtgatgtatattggcagattatttttggtgttttaatttgggatgtgatccagtaaatggtgcttaagagtggtggccagcagataggctcttaatcagcttcacagctttttttgtatttcagtgcatttgcagtagtggtctatagtggggtagggggagacagatgaccctctcagcaggtctgttcctgagctttgaggaagccgcctctgatcactggcactgatcctgtctttttctttaattaggtcttccgggctgcagggctccctcaggcagaggctatgacctgcagataggccacaccattcttggactggtcctgtagagcagggttccccaatccctgttactgcttcatggcctgttcagaagtgggccacacagcaggaggtgagtggtgggtgagtgagcattattaccacctgagctcggtctcccgtcagatcagcagtggcattagactgtcatggaagcatgaaccctattgtggactgcatgtgggagggatctaggttgcatgctccttatgataatccaatgcttgatgatctgaggtagaacagtttcaacctgaaaccatcccctcctccccaacatacaccatccatggaaaaattgtcttccacaaaactggtccctgtgctaaaaaggttggggactgctgctgtagagggagagatgcccttctctggtgctggcttacaagcctctgtgtttcactcctctctgtcttctgagggtgtgggctccttccctgctctagcactggctacagatcttggctcaagattcccaagctgcatgctgcagccctgagctgttgggactggcccacagctccatcttttggctccctttggcacagcaccaactgtgctgggggattccaactgcttccagacctctgagaaagtactcaggctggccttttgataaagcacccatactgggcagtggaggctgcactgtactcatgttcctgttagagcagctgggcagaggccttggaaggggctggtgggcaggagtgcctgcagaacagacatgccccattcccactggaaagtcagccctgttctcttgacccagtggtcaactggggttagagttactcagaggaagaaggggagcgttgggggatgggcacctatggctgtattctgcttgcggctgtcatgtgtgccaaacctccattccatataggctggagtacttttactgcctactctccaggcagatccccttgccagtttaaatgtttatgggcgtcataggatctcttgtacctaggattggagatctgcagcaagagtgggttgccccactatcccttcactaacccctccctcaggaggctttcagggctgagcatgagccctagcattcagcaaccccacacaaggttcccagcttcttctcttttcagcctcagtgtcagtgttgcttctctatctactcttggtgttttctgtctaagatttgctcaaagtttattagtttacttaatttttagtctcgttcagtgggagtggtgcttcctggctgtgtctagtcagccaccttatctgctatccctccaaaagctttaaccctttatgtttttttttagtagctactttatttacttctattctgatcttcattatttctttccttccactatttttgggttttgtttcttattgcttttctaattccctgagatgcataattaggttgcttatttgaactctttctttctagatgtaggcattcattgctatgatcttctctgttggcagtgtttttagtatattccatagattttggtatgttgtgtttcagttctcatttatttgaataaactttttgatttctatgttaatttcttccttgagctagtggtcattcagaataatgctgttaaatttccttgtatttatacagtatcacaagttcctctttttattactatctaattttaatccattgtatctaagaaggtatttgatacacactgtctagttttattctgttgtatctaagaagatatttgacatgatttccattttaagaaatttgttgaggcttgttatgtgtcctaacatatggtctatcctggagaatgtttcatctgctgatgagaagaatgtatattctgtagctgctggatgaaatgttttgtaaatttctgttaggtctatttggtcagtagtgcagtctaaatccagtgtttctttttaaattttctgttgtgatgatctctgtaatgttgagagtgggctgctgaagtccccaagtattattgtattgtgctgtctttctccctttagtcataataatatttgctttatatatctgggtgctttgttgttgagtgtatatgtgtttagagttgtcatatcctttgctaatttgatccctttgtcattatataatacccctctttgtctatttttacttttttttgacttaaagtctattttatctgatataagcatggctattcctgcttgcttttggtttctgtttgcatggaatatatttttttcattctcttactttcaatatatatgtgtttttttcagatgaaaagaggttttatttttgtagggggcttattatagggtcatgtttttaaatcagttatcctagtttgtatcttttaattggaaaatttaatctttttacattcaatgttattattgatatgggagggcttattcctgtcattttgttaattgacttctggttgttttatatatcttttttcttttttttatttctctcttgtttgttgtggtttggtggtgttctgtagtggtaacatttgagtcctttctctttcttattcatgagtttgctctaccagtgggctttatacttttatgtgttttcctgttggtgtatatattatccctttgcttccaggtatagtactcccttaagtattgcttgtaggttcagcccattcatgataaatgtgctcagcttttgtttttctaggaaagacttcagttctccttcatttatgaaggatgattttgttgagtatagtatccttggctgccagtctttttctatctacactttgaatatatcatcccattttctcagggcctgtatggtttctgctgagaaatccactgttgttttggtggggctcctttgtaagtgtctagatgcttttcttttgctgctttaagaattttcttgttgtctttgacttttgaccactttgctataatgtgccatggagaagaccttttaaagtcatatttgtttggggatctctgagcttcctgtatcagaatatgtaaatctgttactggactggggaagttttcagctattattttgttaagtaggttttctatccttttggttttctctgctttcttgaacaccaaaaattcaaatatttggttgctttatgatgcttcataagttacataaggttttttcattctctcttatcattttttccttatatttgtctgactgtgttatttcaaaagagctatctttaggtactgaaattctttcttctgcttgatctagtttattgttgaggctttcaaatgcatgttttatttcattcagtgaattgttctgttccaatatttttgtttattttatgatatccatttgttaaatttctttttcatattctagaatttttttccgatttctttgtatctgtgttctcttgtctttcactgatatatatatatatatatatatatatattttttttttttttttttttttttgcgatggagtctcaatctgttgcccaggctggagtgcagtggcatgatgttggttcactacagcctctgcatcctgggttcaagtgattctcatgtctcagcctcccgagtagctgaggattacaggcacccaccaccacacctggctgatttttgtatttttagtagagatggtgtttcaccatgttggatgggctggtctcaaactgctgacctcaagtgatctgcctgcttcagccttccaaagtgctgggattacaggtgtgaaccaccacacccagcttcactgagctttttaaatgtcattactttgaattctatttctggaatttaataaatttctttgtcattggaatctgttgctggtgaattgttttgcttcttccaagtttttgaatttgcttttatagacagtgactttttctcaaagatgtacctatgatattggttgggttggcatgttggcattgattcttggcacttgtagtattgtagtctctgtataattcctttggctataaacagtatcactggtctctgatttcctcagtgacttaggatatggttgttgttggagactgtggatcctggcagttgtagcagtgagctgggtgagtggctgggtccttggacccctgggtagttagtgtcacctgtgtgatggcagtagcagtagtagaacaaccctctggctccaaagcattctgcattgttgttggtggctgtattaggctgggtgagttggtcccctgtgccacaggtgttgcatgcaggtggaagctagctgtggtagtagtagtacgttgggtgggctcatctttaggtctctgggagagtattcaggtgccaatggtggtagattggtcacagccattcttagtaccctggattgtatgcttaggcataggggtggagtctggcagggcgggcctatcctcaggcctcctggtggtgtatgcaagtggtaggcagtagtagagtgaaccaagccacctagtggaatgcccaggtggtggtggcagtggctgtgatgtggcccagctgcgggggagagtggggttgcttttactggcagcagtcgtagacaattggctggggagcatgcactttggctccaggtagtggctgcaggtggggtagcgtttcctcggggcacttgaaaatccatggtggctctgctgctgtgaataccagggttctgccagtggctcatggtttggcctcagcagtgcaatggaagttgctgtgagtgagggagtctgtatttagggctcgtgaaaatacacagcagtcccactgctgggagtattgtagttattgccagtggcttacattttggctctgacaacagcagttagcactcgtggtgtctgtgggtaggggacatcagagaggttgcaaggatgtggagacaggagctgttgatccccatggcaggatgcggtctagtagagtctgggatctcaggatagtgatgtgcaagttgcttaagacttgggggtgtgtggaacccagcatgaatttcctctttggagcaatgccatcatgtgatttccaagtagttcctctgtcagtcgcatggtcctaaagggttgaggcgctctcctatggctaggattgcaggagtccttgatagtaatgtggaccacttggggtgtttctcttgccctttacccacgctgaagagcctctccaggctcccagctgattctggctgagcaggctgccctgatttcctctccttccttgccttaggtgttccttgtcacttcttgttgaattcagtgttctctcttacatgatctattctaactatgattgtcaacttgttattttggttcttctttatggaggaggcaagtaccagatgcctacaggcattcttctgtgcctccgacttcatattttttttgatgctactcttattataaatggtctaccccagatccagacacacacaggtgtcttataatggtctacctaccccaggtccagacacacacagggtagacactgggcagatgtttctttgaagaacaagtaaatgaataaaatatgtaagtggaaagtattaatgtaataatgggtcatgtctgctcattttcaggattcttttctcagaattctacaaacatggaagtgggggtagagaaagcaaatggataatgtaatgcagggttgagaattggtgggaaaatgagtggttttgaacctcaggaaaaggctaggtagagaggtgagatagggatgtgggaaagagcaaagatcaataactaatcaaaaagcagtttttttttgtttttttctgacagacttgagccatacttctaattctgtgggagctggcacttttcagtttgtattagtccattcttacactgctataaagaaatacctgagactgggtaatttataaataaaagaggtataaatggctcatgattctctacaggatatacaggaagcatggctgcggaggcctcaggcaaattacaaacatggtggaaagcaaaggagaagcaggcatgtcttacatgagtggagcaggaggcagagggctgggggcagctacacactttttacacaaccaagtcaagtgagaactgtatcacgagaagagtaccaaagggggaaatccacctctgtgatccaatcactttccaccagaccccacttccaaaactggggattataatttgacatgagatttgggcagagacacaaatccaaaccatattattctgtccctggcccctcccaagtctcaggtactcacattccaaaattcagtcatccttctcaacagtcctcagagtcttaactcattccagcattaacttacaagtccacagtccaaaatctcatctgagacaaggcaagtcccttctgcctataagcctgtaaaataaaaaatgggttagttattacttccaacatacagtgagggtacaggcactgggtaaatacttcttttccaaaagggagaaattagccaaaagaaaggggctacaggccccatgtaagtttgaaacccagcaagggagtcattaaatcttaaagctccaaataatctcctttgattccacatctcacttccagggcacactggggcaaggggtgggctcctaaggttgggaagctgcacctctgaggctttgcaaagtaaagcccctgaggctgctttcatgggctagtgttcatgcacctgcggcttttacatgtgcatggtacaagctcctggttgatctaccattctgcagtctcgaagacaatggccctcttctcacagctccactaggtagtgccccagtggggctctgtgtgagggattcaaccccagatttcccttcagtactgccctagtagagattctccatgacggctctgctcctgcagcagggttctgcctagacatttaggcttttctacacatactctgaaatctaggcagaggctcccgaagccttaactcttgcactctgaacattggcaggctaaacacctcatagaaacaccaagttttatggcttgcacattctgaagcagcagcctgagctgtatctgaagtcctttcagccacccctggaggcagaggggtcaggatatggggagcagtgtcttgagcctgtgcagggaagtgggaccctggtccctgttcatgaaaccattcttccttcttagacctacatgcctgtgatggaaggaactgctgcaaaggtttctgaaatgctttgaaagtcttttcccctttgtcttggccatcagcatttgactattctttacttatgcaaatttctgtagctggcttgaactcctcctccaaaaaggccttttcttttctaccacatggccagccttcaaatttttcaaactcgtacactttgcttcccttttaaatataagtttcagtttcaggtcatttctttgctcacgcatatgaacataggttgttagaagcagcaggctatatcttgactgctttgctgcttagaaatttctcctgtcagtaacctaaaccatcactctcaagttcaaagttccacatacccctagatgcctccaggctctttgttaatgcataacaaaaatgacctttacactagttcccaagaagttcctcattttcatctgagaccttcttagctgggatttcattgtccatatcactatcaggattttcaaagcaaccgttcaacaagtctctaggaagttacaaattttcctcatcttcctgtctttttctcagccctccaaattggtccaacctctacctgttacccagttccaaatgcaaattcacattttcaggtatctttataccaatgcccctgtccttgttaccaattttccatattagttcattcttgcactgctataaagaaatacctgagactgagtgatttataaggaaaagaggtttaattgactcacaattctacaggtgtacaggaagcatggctagggaggcctcaggaaacttacaagcatggtggaaggcaaaggggaagcaggcatgtctacatggccagagccaggaggaagagagagaggtgggaagtgccacagactttttaaataaccagatctagtgagagctctatcatgaaaacaataccaaagggggaaatccacccccatgatccagtcacctcccaccaggtcccacctccaacactggggaatcacaacttggcatgagatttgggcagggatgcaaatccaaattatatcacagttctttctggaacgttgctcatgtagcttcctacatatgtgcaactatcctcctctttttctcctcatacctgcctaccccctctgttcatattcccctctcaaaatctctttctgtttttcttttcttagtgactttcaagatgtccttttaactaggaatagaacctgtcagatatgctaacataactgtatctgctttcaaattgtgtgacctcttgttgatggtgagcaacatattttcaacttctgtgagtgacagtagagtaaaattctgatgagctgaagtcagactacgcatttttggaaagcagctaaacctctttgagcctccaggaagacgtcctctctctatcaaatgcggacttttagaaataatactctctcagccacgtatgccacccagtattattatcacgtgccattactgtttggtagttatttatgttcatgtcatcttggctagattgtgaacttttaaaaggcaagccttctgccttttacctttatattcccatgcatgctttgtatgcttaagtggttagccacttaatatattttaaaagagataatgtatccatgttattgagttaaaataatccatggaaggcatctattacaatgattggcatatagtagatatttagtcagttatattagagcactcagtcaatatggggaattttgcttcatttcctcctctttaattgattctcccatttcacatacattgtccttcggctgattttaggagcctatttatttatctgcctatttttcattttgaagtattttttttgactttcaaagaagacacaagaatagcataaggaaatcccacattccatggatgtatgcttagtatattgtatcaaggaggcacaaaacatccctttactggtggtgttaattttgatcatttgattaaggtggcatctgtcagatctttctaccataaagatgctatatttcatgctgttaatagagaaaaaccctaggctgggtaattataaaggaaagaggtttaattgactcacagttccatatggcgggggaagcctcacaatcatggcagaaagcaaatgaggagcaaagtcacatcttacatggcagcgggcaaagagagcatgtgcaggggaactcccctttgtaaaaccagcggatcccatgagacttattcactatcatgacaaaagcacaagaaagatccaccccccatgattcagttacctaccatcaggtccctcccacaacgtgtgagaattatgggagctacaattcaagatgagatttgagtggggacacagccaaaccatatcagatacttttttttttttttgagacggaatcttgctctgtcgcccaggctggggtgcagtggcacgatctcagctcactgcaacctctacctcccgggttcaagcgattcttctgcctcagcctcctgagtagctgggactacaggctcccaccaccacacccagataatttttgtgtttttagtagagacagggtttcaccatattggccaggcttgtctcgaactcctgaacttgtgatccgcctgccttggcctcccaaagtgctgagattagaggtgtgagctgctgcgcctggcccagatactatgtttttccattgtagttcataagtgtctggtggggaaatactgtaaatatcttgcttctcatcacatttttactaagtttagcccagtttagccagtttattaagtttaacagtccattgatgattgtttcctgaaacaaattatcatacagtttaccatgtagtgacttttctattcacatcattccttctatatctattagttagcattttaccataataaagagtttttctttcctcttcatttagctttgtattcatttgttaacttacattagtatagactcatggaatcttattttgttaaattgattatgcatcaaaatcatcattttgtttatttgtttttttttcttaaattgtgcagatggtaaaattggatgggtggcagagatggctttgagtactcttgtttcagtttgggggtgtgccaaacagcaggcccagaggataagcattcatgtggtttacaccagtttaacaaggaccaacatgaaagagaaaatagttgtagattactctgaaatatattgtttcctctgtgtttcaggaaataaaaagggtcagttggaggtagtttagtcactaaggccactgcaacttcctctcttaactcttagcagctggagatgttttgctgtagacacacagtttgaacataaaaggtaaaggagagtcagtatcgctgtgttggcacaagatggcagcagtcatccattgattttgcagctcaaggcctacagattttaaattaatggtgtcttttgtcttcgcagggacttcagtactagtgctaataacatccagattgataaaaccaagcctttgtggcacaactatttcttatgtggacttaaaggaattcaggtaaattggtttataaggcacttactaccagttgagattatcatgtgtattctgtcagatttattttatttactacatctttttcatctccttacagtactaaccgatgcttctgttctattttgctagtttgtgtttcagagagtggggaagatatgactgttttggggtggtgttcacagggggcagtagtggtttttatacagctggctgttcataaataggtgcatctgacaaacatctgtctggttttaaaatctttgtttaaacatacttttgaggatatgttttaatactattatttacatttatacttgggatgtataggggtatactgtaataggatttagagtcagcccaggtttgaatctgggctcttctcagctgtggtaatttaacctcttaagtctcagatttatccataaaatgatgtcattgctatcctgacaaagagttgttaaaagaattacataaagcttgatggtagccatttaataaatggtagctagtattgttattgctacttcagatgggattaaaaaaagatataatgaaatgtattagtataagtattttccaagaaacattgaataattactttgaaaatctctaatgttacatacaagaacaagaaaataaaatgttttcactctcataattgaaaaagtatcaaggaccaaaagaaaattgatatttgctgtttttagagccacttttatattgcaataattattttagatgtagtgacttgcatagaatcatagtaggacaataagaagtaaattttgcctttgtgagctaaaagtaaacaaacaaactgacccatgttttagagagcttgtgttccttactgcctggcagtcctatctgaaactttgtaatgagcagctaggacttagtggcacatccattacagaaatacatcaaatttatttctaatgtgtagtcctatactgtaacagtggtggtttttgttcttaaagttaatgaattcatttctttctttcttttgtgttttcctttctctcagacacatggtaataacttacaggaaaagttattggcaggttttaaatcttcaaatcatctggcttatcatatgcattagtgggaattacagtatttggaagcatttgcctggcaaatgcaattttaatcttccttgtaacaacatgcctttttgcagcatatgggtaaagtggcctaaataatgcatgttgctttgtgttatttttgagcatttcaggttttaaagccttcctgtttggtttgacaatttatgtgcaaaagcaaacttatacaatgaacttttggcagaaaggtaatttaaatgctagcctgttcagaaactttcaaattcaaatactagaaagtttcagagaataattcacttatattacattgaacatgttatccttttggcatagagctattacagaatgtggcatatacccatttgcattttgaatttgttatacattttcatttaaacattgcataatacgttgttttttgtttttgtttttttgtttttgtttttgtttttgttttttgagacggagtcttgctctgtcgcccaggctggagtgtagtggcgtgatctcggctcactgcaacctctgcccccggggttcaagcgattctcctgcctcaccctccttagtagctgggattacaggtgcctgccaccgcgcctggctaatttttgtatttttagtagagacggggtttcactatattggccaggctggtcttgaactcctgacttcgtgacccacccgcctcggcctcccaaagtgctgggattgcaggtgtgagccactgcgcccggctgataagttcttaagtgtgattcccactcaagacacctgtgtttgatcagtttatattaaatatattgtattcttcaatttttttttttaaacaagctgtctgatattctgtatgaaagggcattggcaacagtagagtttcagtttatagtttgtttgtatatctggaaggaaatttttagatgacttgaaatcaggaagagaagtacacccagctaaatttcttcttattgtggtgcgagaattttgctagctaggacagacagacaaaaaattaaggaaaaaggtcttttatttgcagaattttgttgttattttagttattctagctagctgattgaaattctcccttgtataataggtatgatgaaatgcataattaggtaatagtatttcatatgttaatcttcagtcatttgagtaatttgcaaagactatggtactttttcttgagaaggaggtagacttgaatttatttgtaaacttaaaccacaaaggttatgatatgatatcatccaaagtgtcctagtgttagaaagtaatgtaagtatactagagctttccatatttaaatcagaatctgattatttctttgggctttcctatttgtagaaatagagtttcctcaacttgtttagggtctgtattctcatttgtggctgaattctaatttgactatctttaaagctaccatatggctaaactgtatctataaactgtagtaagcatctggattttctcatgtagctggcatattaaatcacaatgacggtttgctggctcaggtttctaactgcagtggaaaagttttcaaacaggattcagagacctgggccctactctcgtctccctatgtgtcatcttgggaaagtttcttcatctcttggtgcctaggttttttcataagtaaaacagaactgagaatgtttggaactcctttttttcagagaaccttctaaagtaaggcactccttagaaacaagtcactgcttgggggctggacttttataataacagaatgctggagttgtgctgcatggagatttaaattacctcacagataattgtatatttcttgtcctgctacttgacaaattggattataattgttttatattttttccatatttgttcaaatcaattaatactcaagaaaaagaacattcaaggcaattttatattttttccatattcaaatcaattaatattcaagaaaaagaacattcaaggcaagaaaattaaaggcatttaagggaattactctgtggctaagagtcattaaataaaatgtcacatatagtctcaactaaattgaattgcataagtagtttctataactattataagtctattgatagacttttgttctctggggaatgaaagaagctttcactactccttgaattcaatactgaattactgttgctgtttttccttatattcttaggaacactttggtcttagtaacctgactggaatgaactgcctggtagatggaaatatcccaccaagttctggcctctccagctccagtgctttggtctgttgtgctggcttggtgacgctcacagtgctgggaaggaatctatccaaggtaactacctttgataggaaacctcatagaaccctctcctaataatcattagcatccaaatctcaaatcagaatgccttccttgattgaaaaactgtcttctctaaaaggactgcacatgtgggcaagcattgtaacttaacaagtgataaatcactataaagtagcttataccctccaaacagtgagtgaatagatctgtgaataactgtataaaaatacattgtattaaatatgggatttgaatgtatggatatcattttagatcacctcattcacaagttaaatttagggcaagaaattcttcctctcatggttgagcctgcttattttcacccaaaaccttaaattaaaaatttgacaagtagtgggttacaagggtaaagactaggtaataaaggaactgaatatgccagcagattagtcacagaaataaactttaaaatattgcattacaagacgaaatgcttatttaaaggaaatataaattgtacaagaggtcagaaagcctcaagtttataagttcacataaatctctgactctgcagtttagagcaggtgtgctcagctttaattaatgctttagcattctggttcaaataaaatgttatcataggttctttttaccccatgtacatatactaccaggtttacggatggtttggacagatcaagagaaaggcagccacatgcttagtctcttttaagcatgtttaaactttcagtttgaaaattttatgtataggaggaaggcagaaatgaaggagaaagcaaaggttcagacagaatccttctttttagctgtcctgtgtaagtgtacattaattagcccttagtgagcaatgactggttgggagggaaagggggcttacatattattattattttttgagaagagaagaagcaagggacaggaagtccatgtgtaaaatgtgtttcccctggtacaattttcaatctgatttgtttatttattcatttgtttgttcatcattcaaccattatttatttaatggctattttgtgccagataatgttcaaggcattggagatataataagtatagtctcaactttcactatgcttatagtctaaaagggaaaagagacaagtaaataggcaactgcaatagaatatagtaagtggataagtagttttctatgggagcagatataacccagatttagagagcataggacatctaaatggagacaacaaagattaaaggagttgtagatattgatggcatgataacactgatgacatcagataagcatgtattgggtggagagaacatcatgtggaaatgtccagagtaaaagcaatcatggcttgttggagtaacaaaaaaaatgtctcaatatggttgaagcatacagcaatttggataacagagcaggagatcagttgctgggccttgtaaactttgttaaggaatttaggtatcatcttcatagcagtgggaaaccattgcagggttttaggaagaggtaaggtgatcatatctgtattttagaaagatctccctggctatattacaaagtctgcatttcagggttttagcagtagggaggtgatttggtttagagtagtggcaatgagaatggttagaattagatagattcaagatctcagaatcagtaggacttggtcattgattgggcatgggaatggggaacagcaaagactcaaagattatatcggtgtctggctggtatgattcattggaataagagatatgggggaaaaataggtttgagtggaagctgaaatgttgagtgtgaggaatctgtgggcatactgatggagttatttagtatttagttatgaaaaaaatatgaaggtcaggaggagatctggacttgagatggtacatttgagaatcattagtttatcattgtttttgaagccataggagtggatcaagatacctggtgttggaatataggtggaaagataaggaaaactaggacagagccccaagaaacatgaacatttgaggaatgggcataggaagggatgtccactgaagggattgaggagtagtccagtaagtatgagaaaaaccagaaaggtgaggcaacagcaaagacaaggaagataatgtttcatgaaaggagtggtagtgttgtcatatgcttctgagaggttaccacaagttctgagaagtatccattgaatatcacaacaaagaagttgtacaaaactttgacaagagcagttttagatggaaatgggttgaagggtctataaggggtaagaaagtggtaaagttcagtggatacaaaaagtctggtgatgcatagaaaaagataatttggtatttggaggagggtgtgaagtcaaggaattcatttcacttttaatgggaggattggtgaaacttagtttttctatttttctggtgttttgataatatacctatctaagaaataggaaggaaagaagataaagagaaacacttgaacccttagaattaattctgattgtctgttttcaaagtcggaaatagcaaatacatttttttatcggaactatcttactgcagtgcctaagcaaaaagggaacaatatgtatatcctggctttctcagctagtctaagttgtactaacaatatttacattttctaaggactgagcataattatttggagagtttttttttttctggagtgagacagaatcttgaatgaaaggaagtctgtaatttgttcagtctttaatttaaatgccatgtgattttactcttgtaaaaatcacagaatataagaattcaagggactttagagatgagctagttcaaaatgctccttttactgatgtattagtgttaccataggaaacaaatgacatgttaggtataactgaagagagtttaataaagagacttttacagagatgtgggtaaggtcaagggaactaactaggaagggttctcttgtgaagctggaagccattgtactttaggagctgtggatatagagtaatgttgccagaaatgcagcaaggcagagaaagaatgacacaggtgaaaatggcaatgagtgggaatagttgaggggaatttaccatagaggtcagccttttggggtaggggaagtgtgagaatagaggaacagagggacaaccgaaaataactagcctgtttgataaggacactaagtcccacaacagattggtgactaaagcctttcctattatttcatatccagtaaaccccattcagttgcagacaacaattactgcagatgggatataataagtagatgtggaacttgttaattcattaatatactaaatgttgcatatctgaaaccagaaaacaatatggctaatcacccagagaatctggaagccagaaattatgaatcagaatgttactggtacaagagagtatgatgtggcaaaagatctatgaaaaaggaaaatctagagacttctgatttcagcatgtcagaataagacttacctactctttttctgtgtccctaaattaatcttcttttctcaaaaatcatttccaaacaacagggaaaataagaaaaggaagcacaagctttatctttggtaagccaaggagacataaataaccataaaccacaaaatacaaagatggaaagtggatagaggaatgttacatgacttaggcgaatggagaaaggtcagagccaagtgcctgcggagggagttgcagatggaaaggcagctgactcatcccacagctctctggcaaggcttaggaagaaagcagggtaatatggtgggtggggatttatctgaaagcctttgtgaggactatttagaccctaaaaggcctctcttcacctggaccatttccccctatctttgcaggagtctctggagaaacaaccagagatcatttgtacttggggacactgagcactgagaaaggcaggacgagaaagacttgaaaactgggagattagaggacattctgcatctgaaaaatgaaattcttagctccattcttctggtcattactggcacactggcaacctcaccaccctacactccagcaggaatgttggaggatccttctcaaaggaaacttaaccatcccagagatggttcatacagatactgacatttggtgacccccttctccagctcctctatgaccttgttagaagcccatttacaaagcttctaataagctttttagtgactcactcttaaatatgatagggcatcaaagtatagtaagattttggaagaaaacctacaaaatgaaccaaacaaacaaaaaaaacagagaaaacaggaaactagaggaaacagagacaatgctgagagcagaagaatcaaagacatgatgtcctcagagagataaaagaaaatgttaagtccttgaaaaataatagtgttacttttttaaaaaaggaaccaacggtaagatagagcttttgcatattaaaaatatgacaagacaaaatttagcaaaaagattggaaacagctgggcatggtggctcatgcctgcaatctcagcagtttgggaggctaaggcaggaggatcgcttgaggccaggagttcaagaccagcctgggcaacacagtgagaccttgtctcaaaaaaagagaacagactggaagaactctctgatatagtagggaataaaagagctggacaataagagagaaaaacaggaaaatttatggatcaattccagaaatccatccaactagtaaggaaaaacagaaaaaacagttattagaaattattattattattaaaaatagagttggggcctctctatgttgcccaggctggtctcaaactcctgacctcaagtgatcctccctcatcagcctctcaaagctctgggattataggtgtgagccactgtgtctgtccagaagattttttttttaaaataatatttctccaaagtgaaaatgtgaatttggattggaagggctcactgggtgtttggtataataaatgtaaaaggccaaaccaaagaatatcatctggaaattttgaaacttgagtgttatagaaaagacactaaaagctagttgacagagcaagagaaaagaacggaaagaaatcataatcaaaggatcagaaatgtaaattaatttctcaaaaacagtattggaagataaaggcagttgataaatgtctctaaaatattaataaattttagtttaggctatctgtttaaatgaattaatcaaatgtgagggtatagtaaaacattttcaacatgtaaagtgtaaaagtctagaggatgtaatccaccaaaactagggagtaaaccaagaaagaagatcgcatgggaactaggaaatgagaaatccaatatatgagagaggagttgggtatttatagaacattggtatttgtagaacataaggggaattccaacataacacccataatatccagcagcttagaaagcagtgcagattaaaatgaggagagggaaagatggaacttataatcttatcagtaaaacaaaaaaaaagccaaaaaaactggttaatctgatatgttcaaccatgtggaaaatggattcagagtaatttcacagagctgttgtaggatatgacaaagctcagctagatatacaaatctaagcaaatgaagaaatggggcaattattaaatataggaaaaacaaaaaagtttgtaacagaaatgaaatcaaccatttttttttgctcataagtgaacaataatctcagtaattaacacaacaaatatgaatttaagcaaaattttgggcataactttattgagaaaggtggaggagggtaaaggaaaggtggatgtaagagagctaaaatcctcacttatcataataggaaagcaataaataatgtttaaaatgaaacaacaggcaataacatttaccaatgttatttggaattggaagcaaaagcaaagagccaaaagtatttgccgttgtacacattgcattggggatagggatgacagagtgagctaggggctgcctttgttgttgttataagccttttacctctatttaatcttttagattatatgcaaatatcactttggcgaaagtaaaataaaagatagaagaactgaatagaatgaaaaataagaatggaaatagaatgaaaagtaagatgacctgtatgaccacacctgggggaacctgaaagatgaagagatgagaagggattcaatgagtcaaggctagagattgagaacagatgagctgttggaatgtgaccaaatcaatggcctagggtgaggtctgttgatgggttttgggtggaagaatccaagaaaatacaggcatcttccatttagtggcagtagtccattccaacaaatcagatgttctgcacaaaattattcagcgagggcctatttttttaaaataggaaaaagtataatgcattattcctcaactcaaaacctctaactaatttcctacaatgttacaaaaatacagtaaagctttctttatataagtcacacagaagtagcatgaaaaatgtttaaaccaattttcttgaacattaaacaattaatatggttgttaacaagcagttactttatatagtgataccggtatgtcttctgtattgacacctggtatttcagtactctgcatactattttgttaacaatgttgtgtttaggttttagggtgtaaatatgtatgttttcctatataaacacctttcagaaagtgttgttttgagagatatgaacattctatgaagtttgggtatcaaaaatctttcgccaagaaaatgttagttgctgaggtgttctacaagatatgcctgtattttgtaagaatgggatttgggttgctctgatgtccagtttctgtctgttcttggagttgtccttggaggccaagaagaaaggaccaagtgcctcttaggaatcttagaatagaaatagctggcctacttgggaaacaggttgcaactctaaaagctagtcttgggtagtaaggtgtgttagactagcatctatccacaaattcctccctctgctggtgtggggttgggagtagattttgaattcatgaggttgtagactgagcaggtgatattcagaaaacccactttggaggatctgggaggtacagtagagaagtatagggttgagctgcatcccccatactgaagtctaaggaagagaaaacccatattatcttggttgatgaagactgaaagagccagctgggaatagtggggtaggggagaattcttgtatgtggatatctctggcattttgtcaaaaacacaatttacatgattctgagttacccagaatatgaattggacataaaaccttcctttgagagttatagttcactggggaacctggggaatctcttagatggcatcaagaatcctgtattgggaagcccagaataacatgtataatactggatttgtgaggagtgctttcaagagaagaagacagataaacttcctaacctaccacttgaaagcagtgattcagtggcatttgttgaatacctactatatgccatgcgttgttctaggcactggaaatacaactgtgaataaaaccagtgaagtgcccctgcttttatggagtttccatattggcagaagtgatggtatgagaaagataatgaagagctatacaaataaatatataatatcagctaggccgtagttaagggaaattgtatattttatctagggagttaggagaagttctctccgagaagaggacatttgaacagagaccttagggagtgagcagctgagaaagagtgtcagagggaacagcaagtgcaaaagccctaaggtgaaagagagtttgtcatgtctcaggaataagaggtccctgtggttggggtgtggtgagacagaagcggggagaggtgggaggtgagttgagagagttggtcaagggccatggtgtgtagcatcttctttggctttcattctaagcgtaatggaaaacctttggagggctgtgagctggggatggcaagatgtgatttacatggattaagttcttttacctgggagtattataccatacccctgacagtggcaagagaggaaacaataagaaagaaaagagaagagaaaaaagaaaagaaggaaggaagacaaatggtcaatgcccttatggaacttaaatgcatatagtggaatagtaacagaagatttattaactgaccatctatctcatacaaagtgtaaggtattttatatgtaaatgaataaagaggttgaaataatgtctccttggtgaagttaaacagggacagtttcaagtaattggtgagttctaagaaaatgttaaaggaaggaaaggctgggaaacaaagcactgggaggggcccaagggcatttcaggcagagtgaacccataagtgtattttaacagttctctgagccagacttaaaatatgtgtcagccaaggcctagaaattctcttgcagcctcatgaaattccttttaaaactttttgactacagggatgctttctagttgcttaagtccctgaacagatttacttaacttcatttcaggggcaaattagttatatagacaggggttgatactcttttcaggggagtgtttttgaagtttgaaacctgttctgtactggagacctctaaggttcataaacagagtaagtggaatgttcaaagttctgtgccaaatatgtccacattttcacttttctgagtttacaagtgctgtttccttgagaaagtacaaggctgtatttttcttcacatatagctgcatttcagtgaaatatttcttggccttcagaataagaccttgtgcctaaagaataaagacatgtctatgttataaaatgaaaaggatctcaaaattatataaactatgatttgaatgttttaatagtttgttacatggtataagaaaaatcagaaaccaatttgcactgtcactaattattatgcttagaagtccacataaggacattgtttcagtttgcttagaataacaaaacctcatccatataatggttaaggaaaatagtagtttaaaccattccagccagatgttgagtgctaatgaactgcagcagtatggcctctgaaaagatggtaaatccagaatacaagctttgaaaagaatctcttaattaggtgttgaacatggactgaagccatgtgctcactggtacaaaaaccaggaagctatagtgttagctctgggtggcctgtgtttaaatgtgttctaagttttaggttaataatgtaaatacaaaaccattcacgtagttttgtcaattaaaagagatcctctggttgtatccttttttaggagtaggattggagactgaatcatttctttaatgattttgagtagtttggattcacttgggtgatgtgacactaagctatttgtctttgcagacgttgtttgggtcacttctgggttttttttccgttttctttcctaggctaaatacttgtttacctttagcgtaaacgaaggcaaacaagcataattagggaacagcagatttgaggagtgtgtgtcactgtttgcaagtggtttcaaatgaaaccactgttgctacaaattaatatgtatgcctagttgtgttttgaacttttgttgtgatccttaaatcgttattactcagtgactgtgtttcaaggcctccagattttgacttgcaccctacaataagttaagtgttacacagtattcaaataattaactggaataatgcaagtgatattaagtactacacatatgtgcatagcctttacctactacatcagttgtgtgcattgaacataacttaaagatgaaaatacaaggatagataacccccctaccaaattcagaagtgtttctcatttattttcatgcatttctgtttcacagaggttatggtagccatcttggtcaagagttacctatgctgactcccagactaatatttgatagagtaaggaagacaatgaaagactgacttaactttgtcccctctgtggccaatttgctctgtaacttgtgataacttccctatgcctcagtttctgtttctaaaataagggtgagaatagttcttcctttaacttcacaaggatgactcagttaaactggcttaatacctacagttctctgaccttcctgataggagattttgatgaagttcagggaaagagtttagcaagaaaataggtaaggtaggaaaataaattagtagtcagggaagtttttgtaattgtatgaagttttgttgactgtattggtggtataaaaagtaaagtagaggttccttttcaaagagactctcctccctgtctaattaggaataaatagtacttctcttagaagcaaaatttattcaaagagctgtgctaacattcttaaatatctgctagctctaataaagaaatcaatgtactttatgttcttagctcccacaatttagcctaaatatttgccctggcatgcttatactggtccaagcgggcattaggttatagcctgttcctcttccttatttggaggtgtttttacctttctcagcattccacaagttacttcctccttcctttgttctcgtctgcccgtgcctcttttaaaaagttctaagttgctagccaattgggacaaatacagaatgtgaggtcccgtactagccaatggaaaccggacatagcagtagggtggacgcgtcaggttataaatgactctgtctcctttgtttggtgtactcttgtggtaaaactgctggcgagtgtaccctttctgcagaaagtaaaaatggccttgctgaggaaattaaatttatgttcaagtgctatttctttatggcaccggggaacaagcatttctaacagtggtcatgggaagagtaaggagccaaatcatattgtgtggagaagaaagtgattcaaagagaaaaggttaataaatgagactggttaaagcatgcactgcagtattggagacacaaagatttggaggttattactgcaaaatatgactttaaagttttatgttagaattttcatgagagtaaaagatgtctttttaaaaaaattactgttaagcacctagatgttttatgcacatcaactctaactttgtggtagtcttgtaaataagttttactactatttcaattttgcagaggaaaatatgaggctcagagaatttatataatgtcaccaaagacaaatcacatgtaactggagttgtctggattccagctcacatatttttgatccaaaatggatacttttctattcagccatgctgctacctatggtataatgtaattataccatattgtctgatataatcagtatcatagacatcggaaaaccctggagatgaggtccagccctaacattctgtgatccttctgatgtcctaaaagacagggaagtaaattatacattttcatgtatataattaatgtgaattggattttttaaataagttgacagattttatactctttgtcaaagttataatgatatttttttgaaatcctactatatccaaagcaaacggttggattctcaggatataggaaaacttagatacagtctttgggccttagaagtttataatttcagtagggagattagattaacataaaaatggaaatgtcatgcaaaagtagcatatacaaattcttccaaagaatacgaaaacaaagaacacttcccaacttgtattatgaggccagtaaaacctttctgccaaaccaaatgtgatagcttgataccaaacctgacaaggacatcacaagaaaagagaattacaggtcaatctctctcatgacattggatacaaaaaattctgaacaaaatgttcacaaatttaatctggtaatattataggctaatacattgtggccaagatgagtttattctaagaatttaaggttggtttatcatttaaaaatcagtgttatttaccatattaacagtaaaacatgtcatcttgatatataaaggaaagagtttgataagatttatcatgcattcatgataaaaactcttagcaaattagtagaattcagtataatgactgcctttgggaattagggaagagaaatgattaggtagagacatgaagagaccttctagagtgctggcagaggttcattactttttcttttattgtggcaagaccacttaacatgagatctaccctcttaacaaaattttaaatgtataatacattatcattgactataggtgcaatgttgtagagcagatctctagagcttgtccagcttgtttgactgaagctttatgccagttgattagtaactccccatccacctcaccctgcaccagcaaccatcattccactctgattctaagtgcttcatttcttaaccttgatggtggttacgaggatgtttcctttgtgacaaattattaagctttatttttatgctttatatacttttctctatgttctgtacttcctaaacataaaaaatagcaagactttcttcaaccctaggatcaaccactgttaaaagatttttaatgaatccttccagaaatactctatccaatgtaatatatacatatgtttgccctttttgtaaaacacccaggaaaattttatatataaatatatgtatatattggcccggtgcggtgcctcatgcctgtaatcccagcactttgggaggcaaaggcgggtggatcacttgaggtcaggagtttgagaccaccctggccaacatggtgaaactctgtctctcctaaaaatacaaaaaattagctgggtatgatggtgagcacctgtaatcccagctatcaggaggctgaggcaggaggattgcttgaacccgggaggcagaggttgcagtgaggcgagatcgcaccattgcactccagtctgggtgacagagtaagacttcgtctcaaaaaaaaaattatacacacacacacatacacacacatctttccccttgctttgctttttcacttaaaaccataaattgggaatcattccatgtcagcacatctacatatactgaattctctttaatggctgccttgttttctaatatacggtcatactataatgcccaattatagattttggtgtgatggtaatgttctaaaattggcctgactattggacatttcagttgtttccagggttttgtataatatcagttttaatacttaataatatttctttataaggatatgctatactttatttaactagacctctatgatggaaatgtaggttgttttcaagtttccactattataaagaaggctctgatgaatattcttgtagacaattattttcatacttattcacttttttatttaacataaatcccagaacataaagttactgggttaaaagatatgataactttacttttgaaatacactgcccaatccggaaagattttaccagcaatgcagcaacattgcatgagaggatctattttcctactactgaagttctatcaatcttttaaatctttcctaatctgaaagatgttgtcatggccatttctttaattattagatagtttaattagatagtttaaatgtttaatcttttccatgtcttttattgatcacttgcattttttgatttggctgtatatcaactcagctcattttctcctggagtatttatcaatcatcttattactttataagaactcttcatatgctaaccattcatctattatatgttgcaaatatttatccctgctcaaactaattttctgtttgacttcttttaaactaacaattgtgaagcaaaagtcactttagtcatatttaatcacatatagcataggatcattatatgtgcattcaattttatcttccttgagttgaaaatactctataatctctcatttcattttgaagtacttggacacagggagcctcatagactcagggattttacttagcatctctcaggagatctccactaaatggatcccagggttctcttgtctactacaggtgtgaccttttatctttagacgcttactcagaggaaccaaaactgtgactgatttgcattgtaagcaggaatattttttctttctttctttttttttgtggtgaaagcaagtttattaagcaactaaaggaataaaagaatcactacttcataggcagagcagccagcaggaatattttttccaatagcatttgtgcagtaagacatacacttttgaatcatgaataatgtaacttaccatctgtttagcacttggaaagtttcaaagaactgtaccatgatccatatgataggccatttaactctgttaagtaaggtacaactgccaacttcttagaccagagccctgcctctcagagacttcctggagcctagctataggagtgtttacttaggactctagactttatgttatatcaaagagatatggaagatttcacttttatagtatattaacattgtccccatttcatctttggaccttaaaacaccaagcatcatcatcatcatcatcatcaacaacaactacacaaaactgttgaggggcacagtcattgggtggataggcttaggttcattcagcccttctggatcttgggtcagccactggtattgacaatagggatgaattttcaatcttgaaggacatataaatttgttaagaataaaagaagtgcagttagtctggcaaattgtaaataaccttaaaacttttctccctaaagagagatgattgtatcactttcttatgagcatctttacagtgcctgacataaaggaggcaagtaattggattgggttgaattagtgaactaccttcatctgtaaagcagccattttcccctagtgttagtactatatttggatgaattaacaactggttgttaattttgactgtatttatataaattaaagtgaagcaagaccctgtggaatttatttgtgaccatcaaagaccataaatctcttacattttaagtaagttacagagaaagtaaaattggtgatgagtcctgtggttacaaaggcattcagagattatctgattatttcttcttctgataaaattatgttattgctttgtaaaatataagcaaaaatctaagcaatcaggactctttatgctgtcaagaccttttcattgtaatgaaagtgctcctttttatttttataatttaatttgtatttatatttattttcatgacaaaatattttaattctcatcaggttttataaatagttcttcaaatgtcactatggtttaaatttggtgataaagcagagaatttggataaaagaaaatttggtgataaaggaagaaatttattggaaaaatttaaaagatgtagattttttagggatagttcacagaaacctatgtgttaatgcagggtgcttttatatttagaagttttcattgattttcttcaattatttgggataatattgttacctattgacagcgatgttacatctctcacacacacatgattagatgtattgttaatgtaccacttaaaatttttttccaacttttaattatgagaaaatttcaaaaggatagaagaggcaagaataggcaatgaacatgtatgtctttcacatagatccttggaaacattttgccacatttgctttatctttctctctacttttttttctgagccatttgggaattaattgcggacatcacctctgagtacatcaatattcatcccctcaaagcaaggcattctttaatatgccacactatatcattggaacatttaacattgatataatattattatctaatatgcagttcatattcaaatttcccaattgtctcaatagtaatgtcctttagaacttctttttcttgttctttttctttctttcttttaattttttctgattgagaatttacttattcaagataattgaatacattctggatctgaaaaattaaaaagaaaggaattaaatactactcataataatactcagttttaccaataattggatttaattaatatcatcattgcatttagtttttttttcatttttttagtttactttattttagaacagttccccagcatttttttgtcttttatgacactgacaattttgaagcgtccaggccaaatttttttgttcaaatttcctgaatttggatttgtcagacggttgccttattattagattgagactaaggttttttgccccaagaatactgtataggtgatggatgtccttcttggtgaattgcatcacatggtttctgtttctccaattgtacttaacattatttaatacacagagataggtagagatctgctgtctatcaaaataatgccatagtttaggtatgtcatatgaattcccctttataaaggtggagtttttgttaataaaagttctttaaaagtgtattaaaagtgatgatagagactataacatagtcttctattacatgttttaattaataatgcatgtttgtcaaatgagtgaaaaatagcaatgacttaaaaatcacaaattctcaattttgtcaaggaatttcaattcattattgcactgctatttaagtctgttcatgttcttcattgttttgtttaggaaacaaaatgtactaagcttggaataaactgtttgagatgtctaacataaaaataaccaaagcagatgtaattttatactgccactgtgtatatagggttacattatttcacttgcagtcacttagggtttgtatatatcacatttcagtataatgacatgggcaggctccaaagaaaataccaagcaacgcgaatttggtttgactaacaaatatttacatgtctttgtgtctgtaattattgtaatcttttaaggggtttatgctacacaggcttaattctctagagctctgtgttagattaaaagaggctgatcagtagtatatataactgtaaaaatgatactgtagcccgtctagataaattggtataagccagagcttctgcagggaacaggtggacttaagagagccctgacatgggcagatagctgcctttcatgtgcatgctttcttatgtgttttagccttttctttctttccagatgggtggtgttgatggaaccatcatttgattgttatttgatcttttcaggtttctctagtcatgtagttagcacattggaagcaagaaaagataaacagtacagtcctttcctcatctataggaggcagacagatagttgtattgctggtactgaaccattcacgtatatttgcttactcagtaccatccgtgtcaatttgcaagctttagccagatgtaattggttaaatagattctcccctgttgcccccttgattaaagctccttggcctgtaagatgtcaatatcctattaacttttaacttcactatagcgcttcttagtttgtattgtaaagatgtttccctctagaccatcatggggttttcaagcatagagactatttattttttaaatgtttggatccccatagactcaaatcacaactgatttagatcaggcagtatggtgcctaactgaattaattaaaaaaatgtaatctcatttgcaacataatttcctggtgatgacataaataattatttgagttttaacttgagattctatcaattttacaatttggtttaatccagaggatttattcatttatccacattgactgaggagttattatgttccaggcagggttgatccactggtctctctcctgcctctcttatggctgatgtctattctgagttgttggtgtctctgccacactggctggtgactgtcattattagttttaggcatttgtgctagttgctgggttccgcctagttgctaataggctttgtctgttatatacagacataaatcccataaatttaagcatgtgaattagtaaagttgtcatagtaacagttctagtaaagactgttcctcttggatgtcacacttgaacccgctgaattttgtcacctgcctcttacattctcagatgaaggagttattacacagggaggtggtaaaggagcaacagaggcaaagaaatgggatgcactcatataatataattggctacccaaaatggagatgtttctaaaggcataaatatctctggatgcatgtggaaacctctcttttatccctgattgtattctcctttagtgtaaagaataggcattacatagctattataactagtaaagttagagtttttgtttatcagaaatttaagatcaattaaatattttctaattaaagtgttgtagttaaaaattataaatattgactgaacacaatggcagtgagaatacagttttcaagtgtgagttttagcactgagggctagttcatgagctgggtgttcccaaagccatgggtagaagtaggaaatacagcacaacatcttaaatgggtgaaactatatttcttaataaccctaggtttttcctgatctcattagaaatgattatatgttccttaaaatttttttaactgtaaaagcaatatattctattttataagattatggattattttatttaattttaattataattgtaataaaataacattttatttaattttaattataattataataaaataacattttatttaattagaaattaaagaaaattatccataatcttatacaaccaaatattggactcacagtcaccttaagtattgtgaggaaaataaaatctttgtatctttaaatattacaactcaaagagactacatttagctcatatgttgattcaattaacaatttttaataacatatctattttgtgtcaggcactattcctggcactggggtagagcaattactaaaatgcagtgcctgctctcatggagcttacaattaagtggggaaagaagggtgatggaaaagaaataagtgaaaagataacctaaagtgttaaaagccttgaagaaaaagcagggtttgagatggagagtggcagggggtattagtatattttaaggaagtaagggaagttctgtctgatgaggtaacgtttgagcagagattttgggataagggcattccagactgaaggaatggtggatataaagatcctgaggtggtgggatattgatgcactaactatatgctaggcttttaaaatcctaacagtgacacaatgaagtaggtaattattataatttgtattttgcagagaaggaaacttacatgctttaaccactgtgctatacacccacatgatgtaatagagcagagagttaaagtatgtaactcaggtcccaggaggccaggaaaagttccccagaggagttgctccttgaatttagttgtagtgaaaaagcaagtagaaaatgagaagggtttagaattctggtctgttttctcctgttactatatccccagaagcacatttatttggaagcatatatatatatatatatgtgtgtgtgtgtgtgtgtgtgtgtgtgtgtgtgtgagagagagagagagagagagagagatggtatctcattgtggttttgatttgcatttctctgatggccagtgatggtgagcattttttcatgtgttttttggctgcataaatgtcttcttttgagaagtgtcagttcatgtccttcacccattttttgatggggttgtttttttcttgtaaatttgtttgagttcactgtagattctggatattagccctttgtcagatgagtaggttgtgaaaattttctcctattttgtatacatatatatatatgtatactaaaaattgataagctatagaggagatgatcatagacctcagggaaggataaagtgagtagttccattatttattttattttattattattatactttaagttttagggtacatgtgcacaatgtgcaggttagttacatatgtatacatgtgccatgctgttgtgctgcacccattaactcctcatttagcattaggtatatctcctaaagctatccatcccccctccccccaccccacaacagttccccagagtgtgatgttccccttcctgtgtccatgtgttctcattgttcagttcccacctatgagtgagaatatgtggtgtttggttatttgttcttgtgatagtttactgagaatgatgatttccaatttcatccaggtccctacaaaggacatgaactcatcattttttatggctgcatagtattccatggtgtatatgtgccacattttcttttttttttttaattattattatactttaagttttagggtacatgtgcacaatgtgcaggttagttacatatgtatacatgtgccatgctggtgcgctgcacccactaacttgtcatctagcattaggtatatctcccaatgctatccctcccccctcccccaaccccaccacagtccccagagtgtgatgttccccttcctgtgtccatatgttctcattgttcaattcccacctatgagtgagaatatgtggtgtttggtttttttgttcttgcgatactttactgagaatgatgatttccagtttcatccacgtccctacaaaggatatgaactcatcattttttatggctgcatagtattccatggtgtatatgtgccacattttcttaatccagtctatcattgttggacatttgggttggttccaagtctttgctattgtgaatagtgccgcaataaacatacgtgtgcatgtgtctttatagcagcatgatttatagtcctttgggtatatacccagtaatgggatggctgggtgaaatggtatttctagttctagatccctgaggaatcgccacacagacttccacaaggtttgaactagtttacagtcccaccaacagtgtaaaagtgttcctatttctccacatcctctccagcacctgttgtttcctgactttttaatgatcgccattctaactggtgtgagatggtatctcattgtggttttgatttgcattcctctgatggccaatttcatgtgttttttggctgcataaatgtcttcttttgagaagtgtctgttcatgtccttcgcccactttttcatggggttgtttgtttttttcttgtaaatttgtttgagttcattgtagattctggatattagccctttgtcagacgagtaggttgtgaaaattttctcccattttgtaggttgcctgttcactctgatggtagtttcttttgctgtgcagaagctctttagtttaattagatcccatttgtcaattttggcttttgttgccattgcttttggtgttttagacatgaagtccttgcccatgcctatgtcctgaatggtaatgcctaggttttcttctagggtttttatggttttaggtctaacgtttaagtctttaatccatcttgaattgatttttgtatcaggtgtaaggaagggatcgagtttcagctttctacatatggctagccagttttcccagcaccatttattaaatagggaatcctttccccattgcttgtttttctcaggtttgtcaaatatcagatagttgtagatatgtggtgttatttctgagggctctgttctgttccattgatctatatctctgtttcggtaccagtaccatgctgttttggttactgtagccttgtagtatagtttgaagtcaggtagtgtgatgcctccagctttgtacttttggcttaggattggcttggcaatgcaggctcttttttggttccatatgaactttaaagtagttttttccaattctgtgaagaaagtcattggtagcttgatggggatggcattgaatctataaattaccttgggcagtatggccattttcatgatattgattcttcctacccatgagcatggaatgttcttccatttgtttgtatcctcttttatttccttgagcagtggtttgtagttctccttgaagaggtccttcacgtcccttgtaagttggattcctaggtattttattctctttgaagcaattgtgaatgggagttcactcatgatttagctgtctgtttgtctgttattggtgtataagaatgcttgtgatttttgtacattgattttgtatcctgagactttgctgaagttgcttatcagcttaaggagattttgggctgagacaatggggttttccagatatacaatcatgtcatccgcaaacagggacaatttgacttcctcttttcctgattgaataccctttatttccttctcctgcctaattgccctggccagaacttccaacactatgttgaataggagtggtgagagagggcatccctgtcttgtgccacttttcaaagggaatgcttccagtttttgcccattcagtatgatattggctgtgggtttgtcatagatagctcttattattttgaaatacatcccatcaatacctaatttattcagagtttttagcatgaagggttgttgaattttgtcaaaggctttttctgcatctattgagataatcatgtggtttttgtctttggttctgtttatatgctggattacatttattgatttgtgtatattgaaccagccttgcatcccagggatgaagcccacttgatcatggtgggtaagctttttgatgtgctgctggattcagtttgccagtattttattgaggatttttgcatcaatgttcttcaaggatattggtctaaaattctcttttttggttgtgtctctgcccggctttgacatcaggatgatgctggcctcataaaatgagttagggaggattccctctttttctattgattggaatattttcagaaggaatggtaccagttcctccttgtacctctggtagaattcggctgtgaatccatctggtcctggactctttttggttggtaagctattgattattgccacaatttcagagcctgttattggtcttttcagagattcaacttcttcctggtttagtcttgggagggtgtatgtgtcgaggaatttatccatttcttctggattttctagtttatttgcatagaggtgtttgtagtattctctgatggtagtttgtatttctgtgggatcggtggtgatatcccctttatcattttttattgcgtctattgattcttctctgttttcttctgtattagtcttgctagcggtctgtcaattttgttgatcctttcaaaaaaaccagctcctggattcattaattttttgaagggttttttgtgtctccatttccttcagttctgctctgattttagttatttcttgccctctgctagcttttgaatgtgtttgctcttgcttttctagttcttttaattgtgatgttagggtgtcaattttggatctttcctgctttctcttgtgggcatttagtgctataaatttccctctacacactgctttgaatgcatcccagagattctggtatgttgtgtctttgttctcgttggtttcaaagaacatctttatttctaccttcatttcattatgtacccagtagtcattcaggagcaggttgttcagtttccatgtagttgagcagttttgagtgagattcttaatcctgagttctagtttgattgcactgtggtctgagagatagtttgttataatttctgttcttttacatctgctgaggagagctttacttccaagtatgtggtcagttttggaataggtgtggtgtggtgctgaaaaaaatgtatattctgttgatttggggtggagagttctgtagatgtctattaggtccgcttggtgcagagctgagttcaattcctgggtatccttgttgactttctgtctcgttgatctgtctaatgttgacagtggggtgttaaagtctcccattattaatgtgtgggagtctaagtctctttgtaggtcactcaggacttgctttatgaatcttggtgctcctgtattgggtgcacatatatttaggatagttagctcttcttgttgaattgatccctttaccattatgtaatggccttctttgtctcttttgatctttgttggtttaaagtctgttgtatcagagactgggattgcaacccctgcctttttttgttttccattggcttggtagatcttcctccatccttttattttgagcctatgtgtgtctctgcacatgagatgggtttcctgaatacagcacactgatgggtcttgactctttatccaatttgccagtctgtgtcttttaattggagcatttagtccatttacatttaaagttaatattgttatatgtgaatttgatcctgtcattatgatgttagctggttattttgcttgttagttgatgcagtttcttcctagtctcgatggtctttacattttggcatgattttgcagcggctggtactggttgttcctttccatgtttagtgcttccttcaggagctcttgtaaggcaggcctgttggtgagaaaatctctcagcatttgcttgtctgtaaagtattttatttctccttcacttatgaagcttagtttggctggatatgaaattctgggttgaaaattcttttctttcagaatgttgaatattggcccccactctcttctggcttgtagggtttctgccaagagatccactgttagtctgatgggcttccctttgagggtaacccgacctttctctctagctgtccttaacattttttccttcatttcaactttggtgaatctgacaattatgtgtcttggagttgctcttctcgaggagtatctttgtggcgttctctggatttcctgaatctgaacgttggcctgccttgctagattggggaagttctcctggataatatcctgcagagtgttttccaacttggttccattctccccatcactttcaggtacaccaatcagacgtagatttggtcttttcacatagtcccatatttcttggaggctttgctcatttctttttattcttttttctctaaacctcccttctcgcttcatttcattcatttcatcttccatcactgataccctttcttccagttgatcgcatcggctcctgaggcttctgcattcttcacgtagttctcgagccttggctttcagctccatcagctcctttaagcgcttctctgtattgattattctagttatacattcgtctaaatttttttcaaagttttcaacttctttgcctttggtttgaatgtcctcccaacgtagctcagagtaatttgatcgtctgaagccttcttctctcagctcgtcaaagtcattctccatccagctttgttccattgctggtgaggaactgcgttcctttggaggaggagaggcgctctgctttttagagtttccagtttttctgttctgttttttccccatctttgtggttttatctacttttggtctttgatgatggtgatgtacagatgggtttttggtgtgtatgtcctttctgtttgttagttttccttctaacagacaggaccctcagctgcaggtctgttggagtttgctagaggtccactccagaccctgtttgcctgggtaccagcagtggtggctgtagtacagcggattttcgtgaaccgcgaatgctgctgtctgatcgttcctctggtagttttgtctcagaggagtacccagccgtgtgaggtgtcagtctgcccctactggggggtgcctcccagttaggctgcttgggggtcaggggtcagggacccacttgaggaggcagtctgcccattctcagatctccagctgcgtgctgggagaaccactgctctcttcaaagctgtcagacagggacatttaagtctgcagaggttactgctgtctttttgtctgtgcccttcccccagaggtggagcctacagaggcaggcaggcctccttgagctgtggtgggctccacccagttctaggttcctggctgctttatttacctaaggaagcctgggcaatggcgcgcgccctcccccagcctggctgccgccttgcagtttgatcttatactgctgtgctagcaatcagcgaggctccgtgggcataggaccctctgagccaggtgcaggatataatctcctggtgtgccgttttttaagcccgtcggaaaagcgcagtgttgggttgggagtgatgcgattttccaggtgctgtctgtcacccctttctttgactaggaaagggaactccctgacccgttgcgcttcccgagtgaggcaatgcctcgccctgttttggctcgcgcgcagtgcgctgcatccactatcctgtgcccactgtctggcactccctagggagatgaacccagtacctcagatggaaatgcagaaatcacccgtcttctgcgtcgctcacgctgggagctgtagagcggagctgttcctattcggccatctttgctcctgccccagtagttccatgtttttttaactgaatggaacaaaatgtttgaaattgtttgaatgtttgaatattctttgggcttctgtgaagataaaatattccaaaagcgcttgtgagtttttaagattcttgctagcaaggaaaaatagcccactcaagccagcttcattaaaaaaggagtgtttgctttaagtatgtgtcctaaaatgcgaaggagggtatgtcagttagcttttgctgtgtaacaatttttttcgaaatatagtggcttaagactaccaccacttggactgggttcagcttgacagtaattctgtctattttgtctggactcattaagacatctgatctcagctgctggtcaagttggcacttctgcttctggattggctggctgtcagccgacatgataggaggccttgggccacatgtttatcatcctccaggctagtccaggcttgtccaaatggagatctccagcttccaagagcaggtggagggcaagctccaatgtacaagtgcttttcaagtttctgtttatatctcatatgcctctacccaaattgagcaaagcaagttttatcccagatttaatgagtggagaaacagatttcatcttttgatgggtggaactgcaaagtcacattgcaagggaacggaaacagagaggggaagaatttgtggtcattttgcagtctaatataatggagctgggtttcaggaatgcacagaaacctaagtgtcgttaagactgcctctctcacttgtcttgctctctgttttgcttgtctgtttcattcttcttaatcttcagaccagcttcctctacttctctggtctccattttagaaaatatggctgctgacagcttctatgatcatatgagatagacatagatcgcttaaaactgactctttccccattgggaagatttttctgaagaaggaactctagaaggggaatctggttagtgtcttcagccaggtacccactcctggatctatgaatggtgataaagcattttgttgggtggatgggagattgggtgtgtgtgtgaatctggcaattatgagttatattgttataaccttgtggtattaatagttggaggtagagtgctaagaaggaggaaaaagagttcagtgtccccagaaaagtgtagagatgggaagagggtggctagacatctcacatgggtccattacgatgagttttataactactgtattaatttcaggggattgagagtagtggctgggacctgggaggaacgagatgatgaactaaaaaccagtatggaagggaggtacttgagccacgtaaaggggtaaagggtgttaaagaaaaaaatattcaatgatatttgttaaaacatggcaaagcaggctttcttaaggaccattgtgatgagattttgcaatgggagagagaaattgggctcaactctgaatacagcatggccaaatgggaagttatagccaaggagcagggtaggagccagtgaatgggaaattaaacatcaggagtaatgaggattccagctaacctgacctaaaaggattcttgctgaatgcaggccaaggtgatcagtcattacctggaggatgttggaagatgaggaaccttatcagatatcaagggtgatcagatattgagggtggggtgttctcactaaactgatttagcaaggtgaacagatgggcctagtagctggttcaggagcatgactgaagtttgggcaagcaaagaatcgttgtcaaggtcttctgtctccagagtctcagtccaatggggaataccaatcccttcaataatggcagcagtgtttctagtaacagactgggaaatctgtttgggtatgtcttggatggttttatcacttaaaccctttttcttctacacataatgccatttctgtgataacatgttatttctgttttactggaattttctagttctttatttcctccttttcatgttggtcatattatagatgttttgatagttattggcatatttttcttgaataaatcagaaaaatggaaagaagtaaaatccttacttctttcatatttttatcaaagaaggaagttggaaaatattgactataatgaattttctagattttttttctgtatctcagcacataaacatataaagaagaatgagataggtttttctgttataaaactctgaatgaagcaaaagaaagtgatatttcactctccaagatttgccagtgtcatataatgactgcatagttccaggattttaatttggtacatattcatttatcaggggaagatttttgtctctgaatatggtgggttagcagggaaatggggagttgacattgtatattcatttgttcattcattcatttattcagcattcatttatcaacaaatagtttaggtattagagatacaaggtgaacagaatgactcctcccctcatggagcttagactaatggaggaagactaatattaaacaaacatacacaaatatctgtacacagattgtgataaatgttatgaaggaaacagattatgagagagaacagggagaacccaatttaaatggggaagagtagttttgggaaaggctttgtggtgtcagttgagatgtaaaagctgagttgcaggtacaagccaaaaattactcattttttaaagtcactatgtcatatgtcaatgtaaaatgcagagtgttctagattgctttgcagagctaaaacttcagctatagaaattagtaatatatccactgaaagatgtggatagaaagaatcatgaagtaagagagaaagtgagcagagctgcagtctgaggcacaggtggtgtaatgtaaggacagtggctgatgttgcaggctgctgtttggtccagtagcagggagcccattatccaccttgcaaagcagccagccagggttctatccttactggtataccttagaaatgatcagaaatgatcatcttctttttctccccttcttctactgtctctctttagacaatgttagcatcttttgctccatggattggcagtgtgtaaaatggatttattttctagcaaattaccttaccaattgggtacatctcctggtctaggttagtttttgttccattagaaattacttccctctcctttgagcccttctaccaatagtgtgctaaactaaatgacatttttatatttacatccaagatagtgattatgcaacatcatctgcaatattgtttctatttttatctaagttttgttaagcattgtatttataacatttataatttgggggagtgtcaggagtaactatatgtaggtacttaaggaatgaaaatctggagaaagagattacaatcatttatttttcaaaggataggttttctaggtcagctttttgccttatggattagagtgtacttgggctgtgatttgtaattagattgttcatgaaagttattggttgtcagcacttcttttggttctcccatggtgtgtagcatagagccgcaaatatatatttaaaaagtgctgtacaagagatcaaatgaatctgcccctgaggtacttcttccatagggtatattgtgcagtgcaaggtcaggggcctggtagattgcatggagggtgaaggtgagctcttgtggtagtctcaactcagcataggcctcataaacatggggagtagagttgtgcccaagaacccacattttggaagacaggacaaaatggaaattctctactgtttcatgaagttttccttttacttccctctcctattttgcaaagagcaaggaatttaacccttttgtttcagcatttctacatacattttcatcttttgtagaacagaatatttataaatttttaaaatttggaggaggacaaggaagtatagtttttccctaggaattgaagttaagacgctgctgtctctgaaccccagaactcaggggccctctccctatgtgcatttttattccactcacctcccaacttgagatattaataggagatcattttctaccctctgttaccatagtgatctcactgcttcacaaattagcccttttcattcttggaccactctaatcattggaaagattttccttctatttaatcaaactctatcctttctatctatatatccccaattgtctcctccttttgatagtagaatcctttgaagtttgaaggaaccgcttgtgcgtcctcttattctttctctaagccacacatccactgttgtttcaactattccttatggaatatggctactggacctcctcaccattcttgctccctcttcttagaatgtactcttgtttatcatcgctcccctaacgtaactattcctcccatctgctatgtctcagttttttattctatttgtaccaagtgcctattttctttatgtttaaagtgtctaggaattatacaatccaaaatattcagtaaggttaataaattagaagtagaaaactaggacaaaagaaaagaataaaaacataccaactcttaattacttaatgtaattgttttgtttaatcttacttactaagattcctggaggccaaggtgaaagggcaatagtaagttatagaggtctcatgatcagaatagaggaatcattccagttcttcagaagaggcagtattttccctgggggtgctaaattctgaaatgcatttctcacatggattctttagagcacataaaatataatgaaaatcacctctgcaatgtctgaaaacaaatgcaagagtggtgttcacatgactctttcttataatgaccttcagtagatgctctgagcataacatttgagcacagtgcagtaaaatcaatttatttcatgtaacaactcttggaacaccctcagcatttcctgaccctaaagatgcttcccactacatgtcaaagtgtttgcgaattaactattgtatacataaaaccctttccccaaggcaaatgtgtacactgagatatgtatttggttgactcggattatgattcatagaggttctttctttctctttcgtttgcatctatatctgtatgatcagatccatattaggaaaattagcaagtattctcatagttattattatgctagggaaagaaatagtaactagtcatcgaatgcccctctcttcttgtcattctctaggagagtccagattggtttaccactagaaatcctgcagttaggacctcaagagtgggacaggactgttctgctcaaaacacagtataaggaacccttcctccagggaataggagggttcctctatccatgggaaggaacatgcaattccaggacacgcttgccaaaccacagagattgtaagcctgccgcccatccattattatcattatttagcatttttagaaggttagagccaaaataagtattctgccagccaaaggagtgacaccagcctttaccacaggcattggaggccccgctggtatttagtagctgtgacttgggtcatattattgtctgattccatcaggccggccaggctcctgcctcctgttggctttccccaacaacttttttttaggcagttttttctcccctcttctcctcttcccagtagtagttactttggtatgtgtttgctgactattccctccaactcccaccctgtgttttctaagaatttaaacaatgaaagggattcagtcaattgtgctagtgagagataagtatgcagggaaggctttgggggctcctgaattttgggatcctggtctactcctgaaacctttccctgagagataaagtatagtattatgcttaaaagcatagaaccaagactctgagctcaaattctggctttgccacttactagctgaatgatcttgggcagtttatttaacctctctatgcttcagtttcttcattataaaatggatttgaaactccctccctcacggatttgaaactagatagaacacaaaaagtgcttagaacagtgtctgaggcattgtgttagctggcattacaattattgggctacagaaatcataccaagctattagccctatattgagatcactctgggttgcgaaacaattaagaacattgggatctttgggaggaaactatttgggaattgtgtttggaaatggataatggcaaagccctccaagcctcaggccatccagcaacgtacacgttttttaacttgaagagaaaatggaggaacattttgatgaatcagaaatgtctgcctcctagaacttatggtcaacttaattgttcattctaatgaaaaggagtttcagttcagatatgcataaattgtgctccattggctcaccagggcccaattttgggcacagcctgtttcctgaagcagaatgacaaggtagcttggtggacttttgagccaggcctttctggctttgaatcttattttaggtcagcttattgacctttttgagcctcaatttccttctctatgaaatagagaagttacaattctataaaaagttataattctttttctgggttgttttgtaaattaaataagatgtacaaaataccctgcacagtgtctagccctagaagacatttggtatttgtcagctttcttcacttttttgttaatattctttcccaatttgtttaatttatcaagaaagccttgtcatgtaggaaatcatttaaagagctgtttcagatttaatatgcatgcagatcacctggggatcttgttaagttgcagattctgattcagtaggtctgggatggagcatgagattgtgcacgtttaaccagttcccgggtgacatcaatgctgcgtgtgaagactgcacttggagtagcagagtatactgtactcttttctccctttgcatctcattattaccttttagattcatgttaatattttaacagttttaccacacacatttgcacatccagagtcatcatctggagaaatatccaaggttgtacattgttaggtactaataagattcctcctcatgcagtacaggccgtgatggttgaggtctagaagaaacctatcatagacatttccccaggattcccatgggcctaggatcccaaagtgtttgaataaaatactttgctccagcctgattgttgaaggtcccttctcagaatctgggtccctctgtgacttggattgcagatcagttaggttaaggaagtggtctttgtctttctcttgtcgacaagtctggagggagccactggaagactgtgcttctgccctcactgagcacctgagatatttttagagccccatgtcccaactactagctttctccaggttcattagatcacgttctctccactgtacacagatagaagagtgtactgttgtccttttgtgatacacactttctgagcccattgagcttttataggaacatacgaatatccagccctaagaactaaaaacaagctatgtgtgaaaaaagcatgagtgcttaatgcaaactctgagtgcttaatgcaaactctgtggtgtttctacatttttgcagatttcttagattgactttggagaaacctcctcactgttgttgtttttttctagtttctgcttattttgatatttaaactccttcctttctttcctgtattatttacaggaacttttcagcctgaaccatcagggtcatttgcatctgctgtgcccagtttgggaattggctgtctttgtcctcaggcaacttttcttgaagtaaaaaatgcgaaagttgctaattcctttgcattacatctcttaagttagagatgtgaagaagaaataatagcctccttcttgaaaaaaaaatattagaacaggcttttttttttttcccttacaaagtgtctgtaagttagagcttgttcatcagccatgtttcaaaacaaagcaagtctgcttcagtctcttttagagttatcttggtgccatttcatggagaacttctctgtcctggatgggctctacctaatatgtttgccaacttggggaagaatttgaaaatagccccaggtaataacctagaaattttgaaagttagggtggagaaggattatagagggagaaaatagagaaaatatttgaggtaaagtcagaggagccattaatgtttttactttatctagatgaaacagtcagggttgtaacagaaaacagatggcacactcaatgctgaaggacagtttatttcactaggactgtttacaaagatgtgggtttaggggacacccaggactagttgtagctgtgctgttgctgcccttgggcctgaaggtaccctcgacagggagagacatcactttactctccctcccttccccatttcctgccagagtcctctgttagaagaacctgatgggaagcagagagcaccggagcctgttgatgcacaattatgcattgcttaacaatggggtaatggactgagaaatgtgctgttaggtgattttgtcattgtgtcaacatcatagagtgtactaacacaaacctagatggtgtagcctactacacacctagtctatatggtacagcctattgcttctaggctatagaaccagtacagcatattactgtactgaatactataggcagttgtaacacaatggtaagtatttgtgtagctaaacataaaaaaggtaaagtaaaaatatggtttaaaagaaaaaatcatacagttatattgggcatttattatgaatggaccttgcaggactggcagttgctctgggtgagtctgtgagtggtgagtgaatgtgaaggcgcaggacatgactgtacactactgtagactttatcaacactgtccatgtaggctacactaaatttatataaaaatgttttccttcagtaataaactaaccttagcttgctgtaactttcttactttataaacttaaaattaaaaaaaatttttgactcttgtaataacacttagcttgaaacacaaacacattgtatagctgtacaaagtgtttctttatatccttattctgtgagctcttttctatttttaaaattttttaattttttaacgttttaaacttttagtttttttgttaaaaactaaaacagagtcaggatcatcaatatcactgtgttccacctccacctcttgtcctactggaaggtcttcaggggcaataacatggatggagctgtcatctcctgtgataacagtgccttcttctggcatacctcccgaagacctgtcttgagactgttttacagttaacttttttttttaataagtagaagacatatgctctaaaataatgataaaaagtataataaatatgtacaccagtagcatagtcatttattaccaagtattatgtactgtgcataatcatacatactacacttttatatgactggcagtgcagtaggtttgtttacatcaacatcaccacaaatgtaatgtgatgttacaacagctctgagctatggtgtcactaggtgataggaattgttcagttccgttttactcttatgagaccactccaaaatgcttttgtgcagcacatgactgtagttcatcctgggcagccttctggggcagatagcaggatgaaggcaagtggacagatctggagaggcaaacagaagctgtcactccaggtttacattttcttttggaagacttgttcacctaaagacactatcaatattgtgagctccttgagggcagacactggcctattcacttatctgttaggtcactatttaaatgattgttgaatgaatgaatgggtctgtttatttccttcctttctcttgacttgcacttatggcagctgactataacagtataattttgtcttggttagagccttgtgttctgaatagttaggcttcccataggcatggttaactaactcagcgaaacattccttccagtgtaattcagcttttaacaatctcattattaaaactgctaaacaaaaacaggtcactgtattaatatcttgagtcttttgtattattattattgtttttttgtggatatccaggtttagcgaggcataacattcatgaatctttcgcccttctcagtgctaatcagttagatttaattagattctctattaaattgaaccctgttatttcatttctcctcttacctggagttccactggcatgcagatggataaactttaatttaggaagcccacaaggcttttgtttcctacccaggctgcttcaagagaaccacacaaagggctaaagtagcttcattaactatctttagtagctttaaaagaagatctgtaaataatgtcaggtgtctcctaactgtccagagggcagaagtctgaatagacaccagcttattggttacacactttggcaaagtttcccatgcagtcaaattgtcttccctaatgattctcagtcattagggttttgaaagaagggatagagagcaaaatgtcacaagtgactagtttggaagtccctgggtttcttgtggtgctcaagtgtaagagcaaaagaaaatacatggtagagacgggagtgaaccccttcttcattagagctttgctgatctagcttgagggttttcaggttgtgtgtttgtgtttgtggggtacagtggaaaagccttagaatcacttagccatcaggtagaaatatgcctttgtcctttgctaaagagaatggtgttcctgaattcattttgatctatccatgaagttagcttccagtatgcttcttttctttatgcttttgataatgttcttttgatagctactccttattctcatgaaatctattgagattttacataatttaagtaggtatggagtattgattcagtgtctttgcaagtcactctgtctgattataatccttggaggacattttatggttctattttcagtgtcccaaaggacagacagaaaaagcatgaatagactcactcacatgtctccctcacatcatccataatgacagcattctctgcttccttttacagtgtagtgctgttaaggcaccagatcccttcattaatggttctctgagttcaggtcatgctatctctggcttaggccatgggcctagctaatttatttattaattatttattatttctttgatttctgtgggcctaatttttgtttaccatcagaagaatgcaagcttttttcttaatagaatctgaggttttttttttttttttttggtttttgtttttttaaccttttgtttctagtttctttttttcttttctttttttttttttttttgagacagagtctcgctctgtcccgcctgcaggctggagtgcagtggcgcaatctcggctcactgcaagctccgcctcctgggttcacgccattctcctgcctcagccactcgagtagggcgcccgccaacacgcccggctaatttttgtatttttttttttttttttttttttttttttttttttttttttttttttttgagacggagtctcgctctgtcgcccaggctggagtgcagtggcgggatctcggctcactgcaagctccgcctcccgggttcacgccattctcctgcctcagcctcccaagtagctgggactacaggcgcccgccactacgcccggctaattttttgtatttttagtagagacggggtttcaccgttttagccgggatggtctcgatctcctgacctcgtgatccgcccgcctcggcctcccaaagtgctgggatgacaggcgtgagccaccgcacccagctgtttctagtttctttatatatcataaccatttaggatttgacctttctggccgggcgcggtggctcacgcctgttatcccagcactttgggaggccgaggcgggcggatcacgaggtcaggagattgagaccatcctggctaacacagtgaaaccccgtctctactaaaaatacaaaaattagccgggcgtgttggcgggcgcctgtagtcccagctactcgggtggctgaggcaggagaatggcgtgaacccgggaggcggagcttgcagtgagccgagattgagccactgcactccagcctgcggacagagtgagactccgtctcaaacaaacgaacaaacaaaaaaggatttgacctttctgcttatggtactggggtgaagaggtagggccgctggggaaaccagctggtgggcctgcagttgaatattttactacaggcatgttttattttgtgagtagagactccctgcccctgtaagtagacccaaatgctttaaatcgggcatagggctgggtgcggtggctcacgcctgtaatcccagcactttgggaggccgaggcgggcagatcacgaggtcaggagatcaagaccatcctggctaacacggtgaaaccccgtctctactaaaaatacaaaaattagcctggcgtggtggcgggcgcctgtagtcccagctactggggaggctgaggcaggagaatggcgtgaacccgggaggcggagcttgcagtgagccgagatcgcaccactgtactccagcccgggcgacagagctagacactgactcaaaaaaacaaaaacaaaaataaaacacaattggacatatattttcctgtttgcctcaggcttcattactccttaatgttgaattggctgttttagaggaatccagattctttaaattctctttccctgaacacttaaaaaatggtcttgtattctatagtaattataacttgtctttacatttggcttgggacttggctgcttttttatgtaaatcagatgattccttattcatcatgtaaagataacaccaactgtgtagtactttagagcactataaggtgcttttatttgaagttttaaactttagtttcttggatcattacaataatcctgtggctagggaggtgggtatttttctccttattatggataggaggtaatatatggtggtggttaagattatgggtgctggagtcagatcatttgagtttggattatatctttaataattactagcctagtctcagctaataaacccactcagtttcctaatctgtaagccacagagacctattttataggtgtattagtccgttatcacactgctgtgaagaaatacttgatactgggtaatttttaaaggaaagagatgtaattgactcacagttccacattgctggggcagcctcaggaaacttacaatcatggcagaaggcaaaggagaagcaggtactttcttcacagggcggcagggcggagtgagtgcaggcaggggaaatgccagacacttataaaatcatcagatctcccgagactcactcactatcatgagaacagcatgagggaaaccaaccctgtgatccaattacctccacctggtcctgcccttgacacgtagggattatggggattacaattcaagatgagcttttgggtggggacacagccaaaccatatcagtagggttgtgtgagaaataaataattcaggcaaagcaattagaacactacctagcacataataagtgctcaataaaccttaactactaaaactattagcattgttaatagaatatgaatacatggaaaaaataattaataagcataaatttctcaaacttctcaatgttctggttttttcctcttaagagggaggatacttaaattttggtgaatctcatttgtcttttcatatccctttgaggtagtgaaaaatagattacatcatctccattttgcagggactggttgaagtccagtgagaaaagaatacaggctttggagtcaggtgaggttcaaatcctggcacttccacttctggttatatatctctaaacctcatttttctcatgtctataatggggataagcagaactttgtttggaggtttgaaggagataatgcttacaaaagaaataatgcaaggtacttagtatacttaccacatactgtgactcagtaaatgtggctgttattgctgttgaggggaggggactttttacactggcccagggtcacagttagttgggcacccaggttccatcatctcttacataatgatgaatgtactgcttcatctgggtatgttgtttctctacattttaaatccaagtgttttgatcttttggttactaatttatttttaatgtacatattatggacactggctctgtgtgtcagcagactatgaacaatgcctattgcatcaaaatcctaagtttacctcatgtcacaagacaaaagttaatgttagtgaatccacatgaccaacaaggaatatgacacttgcagaatctgtcagatggtgtttgggcagctattctcagaaattgaaagcagcaggtgtttattaatatttactatgtgttcggcattatgtgaagtaggggacacaaaagaaacaccatactttattcatctctcacaagaaacagatgtgatagaaacatgaaacaattaacaattaaggagcaataataacactgtgattcacagacatgtagataaaaagacaagtagagccacacttaaagcatattcaatacatgataatagagttattaacagggagtgctgaggaggagttatgtggtatgtatgcatatgggtggtggtgcaggttccacggcaaggtgctgcttgaattgttgactagttgggaatgcggtggggagtattgagtgaagagaatggaaaatcatatttgtaaagacaatgagatgtgaaagagcctgcggtagtaaagaacagcatttgtttagtatccctcatggctggagcttaggatttacaggaggagtggtgggagagcaggctggagaagtgcactagggttaagtcattaaagaccttgtgtaccatgctgtagagtatgagcattaaggtgttggcaaccaagcaggcaagagatgattatatcagtttttcagaataattattctagaaacatcatatagtaaaacagaaataagggcccgaataaagtcttacaataaattaaactgaatagatgaatgaatgaatagtagtgtgagtattagacgatactaacttaaatgttttaggagtttagaaaaaggggacaccatgatgggaataatattcgaagaagactccatgatgaagaaagattttttatttttttatttttttttgagaaggggtcttactctgtcaccaggctggagtgcagtggtgcaacctcggctcactgcaacctccgctgcccaggttcaagagactctcctgcctcagcctcctgagtagctgtgactacgggcatgcaccacaatgcccagctaatttttgtatttttagtagagatggggtttcgccatgttggccaggatggtcttgatctcttgacctcgtgatccgcccacctcggcctcccaaagtgctgggattacaggcgtaagccacagtgctgggccatgaagaaagatttgagtggtcagcccagggatttatctatagtagctagccaataaactggatattggacaaaagtacaatttatacaggacagaagacaggaagtaataccaagttgcataaacatgtgtgaagtggtcaaagagacaaatctaactggataagaatggtaaatgatacaatttcgtatgcataatggtcccagattttggaagccttcgaaatgcctggttgaggcgtttagatttatttcttaatcaataggaagccattaaagattcttaaacagatatttcaagattttcagtttgggttagaacatcttggttggaggaagatgagcctgatgagatgacaccagttctgattcttacatttaatggaaatgccagagagacttcattacttttggacaggaaaataaagtttaatgaccccactttggttatgggtagactgtggaatagtagttcactgttgggagacaaaggaagctgaggcaaaaatgaatgattgcccatatgagattttcagtgataccagtctagggaaggatagagtaaatagaaagatggtagaaactgcttgctctgtggagactattagggatggcgaaaacatagtgtgcacggtcaatatcttattccatacccatagcagacattgttaattgattttggtatattttcctatagtctggagccctttttaatgcagtgctccaggcaggctactattagttgatcagagttggtgctggaattcaaacctgtttgtcatgcctgtagtaagaaatgaatgagaaatgggttatgactactcacagtacaaatcagtttttacctttccaggtggaacttgcagaaatctgtgccaagagtgagcgttacattggcactgaaggaggaggcatggaccagtctatatcatttcttgcagaagaaggaactgtaggtagcattccaagtaggaaccattcagaaattcctagtgggaaaatttacatggagaagaaggccctgagagccccaggatgcttggttatggacagcctactatattaggctctattgtaggatattatttcccaactgcttgtaactcaaggctgccaccagttaatctactctatttcatgttgattgcctttctcttacgcttccagaatgatactcaggtctgtttttctcatgtgtctagctttttcccctcttctatttttcttcattgttaagatgagctttctcaattccctagttattggaacctcatttcctgctcctatcctaaatcacttcatctcatgcatttttataatctcttgttggttttaaacccaaatcatagttctcttaccacatatattcacagtccctctttttataatttactctttggtatcatttttcctgtcaacatttttggggcttcagtggtgggaaaaagaatgttgccagtaagccaggaatgaattccttagctggataccgcttccccttggctatcaactcctttaggcagagcagaggttttagttgttgctcataagctgctcatttccaaaatagagcaaacatttctttaaaacattttcttagtttttcatcagattcctacaggcttggctattttccaagaacacctggattccttcttagtaagaatatttgttattgattcccctaagccaaagacatgaggcatgaggaaatttgttttaatactaagaaaatactttgggtgttttggatgagacgcaacaggcagacatgagggccagagtcctgatgttaatgtaagttagctatagagtctgaacacagtctaagttctttgggcttacaaaacacttcaccatctgacccctgctttacccttctatcctaacctctcaccacttctcacccctcaaactgtaagctctaaccaaatttccatgcccgtagctccattaacattccatgttgttttttgcccctggacttgcctaagttcttccctcttcttgacatgctttttgaggaaagaaaccctctgtctgccctacttttttcatcttttagaactcagtttagatttctctttttcaactgagtggaacctacagtaggctgtactgatgagatgcttcagctatgtatccatatagcatctgtgctttgctaccattgtaacacaacttggaaaggtatttgtctgtctactagactgtctttcccacttgattgcgggctctatgagaggaatgacagtgtctttcctgttcactgttgtatttccagtgcctagtacagcgcctggaggtcaataagtaatatttgaatgaatgaatgcatttttgacaaaacactttaagataaatacataaacacttgaacattttctgcattctaataaattatatttctcctttcatttttcttctaacaggccaagttgatagaatttagtcctctgagggcaaccgatgtaaaactcccaagtggagcagtgtttgtgattgccaacagttgtgtggagatgaataaggcagcaacttcccatttcaatatcagggtgatggagtgtcggctggctgcgaaggtatgaacttggcaggctagtgaaacttgaagtagggtttttcttgtctttattttcattgttctctattactttatctctttccccaaattttagggcaacattctgactgcacagcattccaactgaaggtctttgggtacagagaaatctgatttctaactcagaagacagatgaaccagttgagtcttctggggtggcactgggaagaaaagggcagcttatatatgtgaagcagaattataggttaggtctatgggtggagaaagatagttggggacaattgatgggaatgaccacagctggtcttgtttcctcaacaaaagtgatggcagcctcacccctcctggtcctctaagatgcagtttttttattgggttatcattcgttactccaaaaatacaggattggtgaagtccccccagaccccgtacccagaaagaagatttttacatgtctactagggaaacacaaaccagcagggagtcttggaagtctctctttagaaaactgccacagttaaaccttaaatctatttaggtagtattcattgactagctattgtagttctagcggcatgaagatatacaaagggacataggacatgggactagagagagtggacagtagagttaagagttcaagttaagggattatgaaacaggaaatggttaatatgtgatcagatagtaagtaatccagtgatccaacaagtgacacagtaattaaatattataaataatccagaatagctcataatacgactagaaagttggagagaggactgaggctggaggctaggaagtggattctgggtcaggagctccactgtgctttcttccactcttgctttgatctcctgatggatactgatggatatcacctaagacttatgatcaacctttaccaggtcttaaatacagcctgaaatctattttctcagtagtaataatttcataccttctttacttctctcaaatacccattacttgattcagcctaacttccaaaagtgattttctcccatatttcatgttggaaatagatgtggtcacatagactttggcttcctgtcatcatatctgtatgtctctctatatctgcatctcctgtcaaagccagcccttccatgtgtggctgcagggaactcactccatctttaacttgttcctcgcctctatttctctactaaatcctttctatcagactccacctattctagtattttgtattagaaaagtctaccctaagcctcacaactctctccatctactatttctatttctactttttcattctcttcacagctaaacttctcaaaaattgctttatatatgttatctttactcctctacctccctcttattccttaatttactaaaatctcacttctgcgttctccacaatgttgaatttgctctttcttaggccaccaaaggttttttcattggtaaatccagtggatgcttttcagtcttcatcttatttctcattgttatttcttatctttcaacagagttaaccagtctttccctcttgaaatattctcttccttaggtttccagtatacttcacttcctgttttttcttttcccccttatatttttgttgctatttctttttagttttagccattccctccaccgacccaccctgggcagggatgaagggatggcaggaattcactcctcctcccacagatgtttaaatgttggtgttcttcaaggccttggccttggtcgtcttcttctttctagtggtctttcttctgttggtctcatgccctcagcttcaacttccatctctatgatgatgacttcctaataaacatcttcaactaaggctttcttggttgagctccaaacctctatatcccatgccttattgaccatctttacttgaatgaatcatagacctctcaaactgagcatgttgaaattgaactcagtctttcacagaccttatatttttccatcggtcccatcatcacttattgactatcacattagccttctcactgttccttaaattcatgctcatctctttcccaatcattctttaaataacagcatgacggcttagaaatttaaatctgagcaatttaaattcccctgcttaatacctttcaaaagcttcctatttcgttggaataaagtaaaaggtccatatcacgacctggagagccaccatatctgagacctgtgcacctcatcctcttcatctcttagcatcacctgctttccttacactccagccatgagactcattctcatctcagagactttgcacctgcccaggacattcttccttcagccctctttgaagtcttagtctaaatgtccctcaaggaagccttccctgacttccttactcctagactaagttagagccccctttatattttgaagcacttcatttttcagttatggcacttatcacaatcatttatttaatgtctgtctcttctttcagattcagttttacctgagagctgaggctgtgtttgtcttgttaactcttatatccctaatgcttgatgtgatgcttaagctgaagagacacaggataaacatttgttcaatagatgaatgacaactccctgtatcacctgctctgtagtttattttgcacaatttcacagttttttacaagtacctattgtatgcttagcactggcctagatcctgtggaggtgtgtaaagtatagttttcccttgttactgacttagcacttctcctcttacttctatcctctgaggttgggaaattcaggaaattagagatatactgaacgaggaaaataaaagctttttgtttctggaatatttggggggcatacattttttgaaaaattatgatttaaatgttttgaatttttaatttacttattaagatagtgtctaaaaataatgtaatagaagtgctttaacattgaactcttcatagtatttgatcagtgcatatgtgcagagaaacagttctgtaaactttttaatatcaagggttcaatgaactttttttcttttacgacacacttcctttttcaggagatggaagaaattagtgtcttatttgtttgagggcttagtcttgttgaccttttatcttgaggttgatgagtaagtgttgccttcctaaggagacctcaaacatacacaacattgttttcaaagttttatcacgaaattagatatcctctaccagatccataggtgagctgaaacaagtattagacatgtaaaatcagttcatgttgtgactactctcccaaagatacaagaagaaaatgatggataaaattgtagtgctgagtctctgtagtaaaagttattgggatgtgggaatgttttttgagagttaactagaaaaagggcatctcctttggaagcagtagtagctgaagatcttaatccactgcagaacctcctgttcttgaggatgttttctcagtttaactgcgtaaccccatatgcattttagaggtactttggtcagcaaaattggcatctgaatttggctttttgctacacactcctcccaattgacgtagataaacacactgttttaaatactctgaatttttctcttttaaaatgtggaagaaagaaaaatgaaagactttatcaagatggaaaatgttttctaaatcatgttgctgcaaatcactaaaatcccaggttttatacaaaagggaaatgaagataaaactgctaatgtgcactttactcagagatattgatattaggaatatgcttttgcttaggaatataggctggaattctactaagcatattttctttgcaatatggttctattcttccatttttggcaacatgtgaatgaatataattattgtttgaagatggtctcattaaataaataacctctcatgtaaaaagtttaaaaaaaagcttatctcaatctgaccaaactttctgttttccaacaacaataatgaagtgtcagttgaagaatggctaatcaagatagttttgaaaatgagactgagactgatcagctagggctccacatggcaaagttgtaatgaagaacatttatttttcctttcttcctatttttctcagatccttttttgaaaatgagtacctttttttaatcaagttaacacagagaagtacactaaaccagtaaagacaatttttctttgttttgcattaatgctagcaatttcttctattctcaacttctttctcatcttgtttctctgtctctgtctctttctctccatcagctttcaaaagctaattcatgcaaattcataaaaagtcagagccttgtagagcatttgactaaaattaaaaatttttcaaagcaaactcgagatttataattactacttgtataaatgatatcttaatgaagcacatttttatgataaagtagccaaggatctttagtaggtacaacatttttcatattttacacacatttggggcttaaatgtttccagaagtgcttttcttatacagtatcccttagttatgttgaagaataaaatgtgtgatacccatgataagtattatgggaagtcaggtagggaagagaaattatactgttgctttttgcataccctgagctccttgtggcaacatgagaagcagtgaaagagagagtttcatatgttcctttgacacttcaaggaaaatttacagtgattctttacagggcctgtctggtcaggggccatcagtcacccagtttttcagctcctttcatttagtagttggtatgaaacttattctttgtctggtgatagaatgggaggagaagttggcataatagtctcagggttttggcagtttccttgaatttgagcagagaaaaaccaaatactcaagaatgtagccaatttcacgcagccagttgattcaatagtgcatactctgccaagactctggcatggagtattcaggcaatggtgagtccgagctgcatggcagaggacatacatactggggaataggggtaatgtgtttagtggaaccagattgtggcaggaccttcagtgctatgctcagccttacccaggcttggctttgaaagcagtggttgttagcaaggtattttagaaatattaatatgacagcaggagcttttgccttggttgaagagaagtaggtactagagtatcagtgaggatgggataaaaagggagagatgtgagagaagctctgactggacctagtaagggttgggtacaggctctctgtgattggatttttgttttccttctggcatatacttcattactttgaggaagttttccttgactacctcctgacctcagttaggtgaaacactcttttatgtgctcttaccatgtcctgtatttttctattatagcagtttatcataattggattaagttctttatgataaatgtagttttaatttaacctctgtcttttctggtgggctgtgagctgcacgtggtcaggagccatgtgtgccttactcactgctgtctgcctggagcctgggaagtaataggcactcagtagacactcactgtgagcagatgcacatgaatgaaggaaatgaagaaaaggtgttgagtcaataagggctgcagcttcaaggtgcaatggttggtgaaaagcatagtgctgccattgataggttttgagaaggcaggatggactagaagttgactaaaaagtaggagatgatgagaattcttcatgaatatcttaacactttctctaccataccctcttaccagaagacccagggagtctcagaccaagaacagagggcttagtatttttgtttgtgtctgggacaacctgaaagtgctagggagttaatatccttgagagccacctcaatcagtggtaactgggagttattgggtaaatactttggctttcttgcccatggtgggacatgactgagctttacacatacaggttcctgagaacctgtgatttgaagctcagcgggcccagactcacctgccaatatcagtacacctcatattggcgtcttttcctgtttcactttccattcctctcttaatgcttcttaggatcaccttcccctcaaattcttaccctcaaatttttgtcacagggcctgcgtctgagagaaaccaacctaaaacagagttttagcaccatttatcagtgcctctttccatgactgtggacaaagcacttgttgcctgcttttttgtccacagagcatggaacagagctcaggaacctctcagaagtggtatctgataggaatacttaatgtttgccatggtgaaaagaaagtggtgaatgtggacaaagaactgccttctcttatttccccaccctactactgagtgagaaagttgtgacaaaataacctatagccctgacttatagccctgcttcacaaatgtgaaggaggccagtcacctgggccacaagtgcctccatgaagctctgtctttgaacaatggtgatcttatccacccatttccttcatctgaaagtcatctttctgtttttcaagccaaatttcaaagggcttaagaggcttttctatttgactccctcaatgtagtgtaattcaacagctcacgggctgtgcagctgtcattgagggcatatggtagatttcatccttaattgaaatacacaccaaattggctgtgtggattctccagctgagggctcactggacaactggtgtcacagtaaagtgggatattgctggagtgaatgtgaactctatgttagtgcctcaatctgcagaagagcacatcaggaggctgcctttgaaaactgaatcttgtgggctgtagccatcccttgcagactttctccccacacatcactggcccagttttcttggatcaagtgcctggggcaatgtgactggttcaagagagaatgggaatgggaacttggagattactgtggactgaaagcttcttaggaagagcccactgtcatctcttgggggcagttctgtgatgtttttctttttttgtttggaaggaacccatttatcaaagtgtttttaaattactggaatgttcacttctagcacagatctaggtttgtgttttgaaatgcgtttctaagacttgatcggtgattttaattcatgtgggtaacatgatatagttatcatgcatacctcattgagaacgtggcctaggggcagcaagaaagagttataagacctggattcagtttccaactctgttattaactagttgagttactttgtttttttgttttgttttgtttttttgagaccgagtctcacttcatcacccaggccggagcacagtggcatgacttccgctcactgcaacctctgcctcctgggttcaagcaattttcattcctcagcctcctgagtagctgggatgtcaggcacatgccaccacgcccagctaatttttgtatttttagtagagacaaggtttcgccattttttttttttgctttttgttttttgttttaaatgacaccatgttccatgaaataattgaaccgaaaatcatagttctattgttttgtttcccagtttggccttaaaatcattaactcatttcaaatatacgagccagggttttaaaaagaggattaaattaatataagaacttctgttattaacattcttcagaagtcagtggctgtaaccagagtacaatagtcttttggtaaaccccgcttcctgtcaaaaagagaaaatcatcaacataatggaagagtaaatcagatgcacattttcttgaagactgatttccccttctcttgtttctttttgctgcttaaaatgcccctctgtcttcacacccaggcaatgaatattgtagacctcaggataagagaaatcctcactgttttgattgccacctactctgatattgcttggggagaatgacagaaatatattctggattggggttcccatgggtggttacagatttggtttgtacttaacccgcactgtcagattgaggaggtacctcaggatgcagttagaagccaaactctttttcttgagggtagaggaacatatagctctactaccaccagtgacctaatgaagtgcttcccataaagtcaccaatgaggttttcatttcaaatttaggactttaccccaaatgcccatataatgccattttcaaagagacatatagtaaacaggaagtaccctaattggatgtacagtatcctctcaggacccaggtcacatgagatttaagtagttttctcttgacttcctagggaggaatgcagtaggcatgaactgaataaggataaaagagtaaaattattcaaagaaacagccctgagggaaagtggtgacaggccaaaaaaaaaatcagtgagagattagttgtgtgtgtttgcgtgtgtgtgtgtgtgtttcaggacaaatacctacctagtctgtgagtgtaatacagacatgtttaattccaggcatctgaagccagtatgcatttccaagtaatggtgggaaagttggataggttgaaaggaaaacaacaacaaaacaaaaaacagcttaacgttgaatctggctaattaaaatagtacacatcaaattctgaatcaaaactgaccattatcttgatttgaatttgcagctcctggctaaatacaaaagcttgcaatgggacaaagtactgaggctggaggaggtgcaggctaaactagggattagtctagaagaaatgctgttggtcacagaagatgcccttcatcctgaaccctataaccctgaggagatctgcaggtgtctgggaattagcctggaggaactccgaacccaaatcctgagtccaaacactcaagatggtgagttggctggagaaagtatgatatatgttattccctcacttacagctggaaggtttcaatttctccactggttttagagaatacttgagggaatttggagactgtgttttggcaagcttaattatttagaatcttagcttcataaatgtattcattcattctttcattcaccactatgctgggtaggcaagggtgaatgagacatgattcctgtcttccaggggcttataattcagtaagcttctcttttttatcttttttttcccttatccatttttttctggttattatgctacttgtataaaaaatggactaagttagagaactgctctaactctgtgaaacaatactcggaacactataaagtgttcacgtcttaggttgaaacttgtggcctactttagtgtggaagcttatttctatttgtggtctgctttcaattaactttatttttataccaataacatcagaaactgagatgaagcccaggtaaatgttgcaggcacaggatggagtcttgggctggcttgttcctcttagactagaggttatctatttgtgacaaatcagtactgggggcaaggacatctagttaagatccagttgcccttagcggatggttatgggggatgagtaggagattaatacaaacatcagcctcagggacccatttctgtctcattcagttcagttctacaactggttgttgagttgctactgtagatttacccacaaagtaatgtcttaaaggctggaagtactgaaaactttgggatgagataagggaatcatttggaagtagggattgggttttagtttctaacactgtcgatccaatttaatttgatgaagcttgattgagtctttagaaccagaataagcaaactatggcctactggccaaatcaggcctgccatctgtttttataaaataaacttttactacaacacggccatgtattagctatggctgcctttgcactataagagttgagtagttgtgatagagattaaatagtccacaaaacctaaaatatttactatatggttctttgcagaaaatgtttgctggctctcgttccagaaaggcagtagactaaagtttaccttagttttgccatgaaaataggcgtaacaggaatgcctctaagaataatctgtataatgtgctaagaataatgcttggtagcagaggtactaatagagtgatgagtgtggtgatggagttgtacttgggtctagggagaccagaaaacaaagaagtcaaagccagcttaaggccgggtgcaggggctcatgcctgtaattccagcactttgggaagccgaggtgggtggatcacttgaggccaggagttcgagaccagcctggccaacatagtaaaaccctgcctctaccagaaacacaaaaataagccaggcatggtggcaagcacctgtaatcccagctagtcaggtggctgaggcatgagaattttttgaatccaggagacagaggttgcagtaagctgacattgtgccactgcactccagggggagaccctgtctcaaataaataaataaataaataaataaataaataaataaataagaccctgtctcaaataaataaataaataaataaataaataaataaataaataaataagcaagcaagcaagctagccagcttaactaaggagttagcaaccagccaaaagttaaataataaataggtatttcctaggtaggcaaacagtcagaaagaattccagtctgacaaaacagtagatacagaggcagaaagaagtgagagaagattatatgtccagggaactacagatagttgagtgtttcttgaaaataatgtacatagtagagaatgatacagtatcaggccaaggttgtggacagacccagatcaccaaaggccttattaaataatttgtgtgtgtgtgttgtataggtaatgtgggaggtaatcaatatttattgaatgaagaagttgggtaaggtattggatagggagaggttcaggggaattgcctttctcctttgacctgagatattgatttctttaacaaatcgtattgacttctgtggactggaaattgtgctagatgctgggatacaaagataatcaggacacagtctctactttatagtgacttagtgtctaattgggggagagtgccatacaacaatcacaataaataatacctgctataataaaggtatttatcaagaaccctaagagtatggagggaaaagtggctcaggtcctgtagatggtggttcaattttgagctggatccttagagaaagttatgaatttcctagacttagagagattaccagcctttccaggtggagagtagagcttgaatgaagacaaagtagcacaaggagtcgagtactggagaacatgcaccaagaggtattgtgtgcagtatgagttagaagacaaaaagactgcctaaaaggatgccaattaggaaactattgctctatactctatactgaatgagaagagcctgaagtaggatagatggctcaactggtagattctcaagactgtaaaatagaattcagttgcaattggcaattgctggtatctaggagtgaaggaaagaagaaagagaagaaggaggggaaggagggagaggaagaaggaagaaaggaagggaagaagaaaagaaatataaggtaaataaatccaaggtatggataactgggaaagttaggaaattatagtattgaagtgattttggcagtaagatgacaagctcatttctctctctctctctctctctatctatatatatatatagatagatagatagattcatctatctatcattgaatttgtctggtgtgatagcaagatatctaaatagagatgtaaaacaggtaaagatccaaatgatataataattagatttgggggttattgttgaaaaggtgagaaagtcttaatagacattgaaaatgttgactatgaaatgattttaaaagagtcatttcatggtgtcacttagttcagaagccttcagaggcttaccattacctaattgcctgagctcttctagtcctgtcttaactaagttctgtcctgtgtcccttttgagcccatacttgcctgtgtggacagtgttaccttggttggaccattccacttactaattggaagcttggtcttccctctgggcttttaatcctaaataccactgtgcttttataaatgaattttctcccttttctgaaatgcagtttctacctgtcttaaaagcttaatataattcttatcttctgcttatgcttcttaatccacaacctattctcttgctctgtatccatcttcctttctttctgcatctgcctgtcttcctttcttttagattttttttgaataagtaaatttcccagaatgctttggaaaatacaaagagcaatttgcttatcaaacaacatgtattgctctctctctgcctctctatgtatatattcataagcttttcctcctgaagaataatgacttcatggtttttgtaaaaatgaggcatgcttcatcttatttctttttttccagaacttttatttattttctttttcaacttaattttaggttcagggcatacacactaggtttcttacatgtgtaaattgcatgtttctggggtttggtgtacacatgattttatcacccaggtagtgagcatagtatccaaagggtagtgttttgactctcactctcctaccactggccatcctcaagtaggccctggtgtgtacttttcctttctttgtcaccatatgtactcagtgtttacctcccacttacaattgagaacatatggtattttgttttctgttcctgcattaatttgtttaggataatgtccctcagctgcatccatgttgctacacaggacattatttcattcctttttatggcagcatagtattccacagtgtatttgcaccacgttttctttatccagtcaactgttgggcatctagtttgattccatatctttgctattgtgaatagtgctgcagtgaatatataagtgcatgtgtctttttctttttttttttttaagacagagtttcactctgtagcctaggctggagtgcagtgatgcgatcttggctcactgaaacctctgcctccctggttcaagagattctcctgccacagcctcccgagtagctggggttataggcacctgccactacgcccagctaattttttgtatttttagtagagacagggtttcaccatgttggccaggctggtctcgaactcctgacctcgtgattcacccgccttggcctctcaaagtgttgggattacaggcgtgagccactgcacctgtccacatgtgtctttttggtagaatgatttatattcatttgggtatatacccagtaatgggattgctgagttgaatggtagttctgttttaagttctttgagaaatctccaaactgttttccacaatggctgaattaatttacgttctcactagcagtgtataaacattcccttttcttggcaaacttggcaacatctgttgttttatgactttttagtaatagccattctgactggtgtgagatgatatctcattatggttttaatatgcatttctgtaatgattagatattgagcattttttatatgcttgttggccatgtgtatgtctttttttgagaagtatctgtccatgtcctttgcccattttttaatggagttatttgtttcttgcttgttgatttgtttacctttttcatagattctggatattagacatttgtaagatgcatagtttgcaaaaattttatcctatctctgtaggttgtctgtttactctgttgacagtttcttttgctgtacagaagctctttagtttatgtctcacttgtcaatttttgtttttgttgcaattgcttttagagatttcatcatgaaatctttgtcaagttctatgttcagaactgcatatactggctgttttttctagaatttttatagttttaagtcacacatttaagtttttaatctaccttgagttgatttttgtatatggtaaaaggaaggggtccagtttccattttctgtgtatgaatagccacctatcccagtaccatttattgaatagggagtcatttctccattggttatttttgttgacttcgtcaaagatcagatggctgtaggtgtatggatttatttctgagttttctattctgttgcatcagtctatgtgtctgttgttttatgctgttttggttactgtagccttgtagtatagtttaaagttgggtggtataatggctccagctctgttctttttccttaggattgctttggctatttgggcccattttttatttgaatttttgaatttttttttttctaattctgtgagaaatgacattggtagtttgataggaaaagcattgaatctgtaaattgccttgggcagtatggccattttgataatattgattcttcaaacccatgagcatggaaagttttcccatttgtttgtgttgtctctgatttctttcagccatgttttgtaattcttattgtagagatctttcacctccttggttaactatattcctaagtatttcattctttttgtggctattgtgaatggtattgtgtttttgatttggctcttagcttggacattactggtgtataaaaatactactgatttttgtacatggattttgtatcctgaaactttactgaagttatttgtcagttccacgagcctttgggcagagactatggggttttctaggtatagtatcatattgtcagtgtagagagatagtttgacttcctattttcctacttggatgcattttatttctttctcttgcctgattgctgtggctaggacctccaatactatgttgaataggtgagaatgggaatccttgttttgttctggttctcaggggaatgcctctagcttttgcctgtttagtatgatgttgactgtgggtttgttatagatggctcttattattttgaggtatgttcctttgatgcccagtttgttggtagtttttaacataaggagttcttgaattttattgaaagtctttatttctattgagatgatcatatggtttttgtttaattctgtttatgttgtgaatcacacctattgatttgcctatgttgaactaacctttgcatccaaggaatgaaggctgcttgatagtggtggactagctttgtgatgtactgctggattcaatttcctagtttttgctgaatagttttgcatctatattcatcagggatattggcctgaagttttctttttttgttgtgtctttgccaggttttggtattggaatcatgctggccttatagaatgagttaggcaggtgtccctcttcttcaatttttggaataattccagtaggattgctaacaggtcttctttatatgtttggtagaatttggctgtgaatccatctgctccagggctttttctggttggtagattttttattattgattcaattttagaactttttatttgtctgttcaggaattcagtttcttcctggttcagttcctggagtttattcatttcttttaggttttctagtttgagtgcacagaggtgtccacaatagtgtctgagggttttttgtatttctctgaggtcagtggtgatatcacctttgtcatttctgattatgtttatgtggatcttctcccttttttctttattaactaggcagcagtctgtcaatcttatttattcattcaaagaactagttttggtttcgttgatcttttgtatggatttttatgtctcaatttcatttggttcagctctgattttggttgtttcctttcttctgctagctttgtggttggtttgctattgttttcctagttcctttaggtgtgatgtttggttattaatttgagatctttctaatgttttgatgtaggtgttcagtgctataaatttcctcttaacactactttagctgtgccctacaaattctgatatatatttgttttcattagttttacagaattaatttcattgccttaatatccttctttacctaaaagttattcaggagcaagttgtttagttttcatgggattgtatggttttgagagatcttcttggtattgctttctttctttctttctttctttcttttctttctttctttctttctttctttctttctttctttctttctttctttctttctttcgtgctgtagtctgagagcgtgattggtatgattttttttttaatttgttgagaattactttatggctgggcatgtggtcagtcttataatacgtgccatgtgcagatgagaagaatgtatattctgttgttgttgggtggagtattctatagatatctgttaggtccatttggtcaagtgctgagtttaagtccctaatatctttgttagttttctgcctggatgatctgtcagtagggtgttaatgtctcccactattattgtttggttatctaagtctctttgtgggtctctaagaacttggttttataaatctgggtgctctaatgttgggtgaatatatatttaggacagttaagtcatcttgctgaattgaaccctttatcattatgtaatgcccatttttgacctttttgatcattgttagctttaaatctgttttgtctgaaataagaatagcaacccctgctctttttgtcttctgtttgcttgatagatctttctccatccctttactttgagcctacatgtgtcattgcatgtgagatgagtctcttcaagacagcatgcagttgattcttgcttctttatcccactcatcactctgtgtcttttaagtggggcatttaacctgtttaaattccaagctaatattgacatttgagggtttgatcttgtcattgctttgttagctggttgttttgtagcattgattatataattgctttatagttgatatggtttggctgtgtccccacccaaatcttatcttgaattgtagttcccataatcccgacatgtcatgggagagatcctgggaggtaattgaatcacggtgccagttatccccatgctgctgttttcatgattgtgagtgagttctcttgagaactgatggttttataaggggcttttccaaccttcacttggcacttctccttgctgccaccatgtgaagaaggatatgtttgcttctcattccgccatgattataagttcctgaggcctccccagccatgctgaactttgtcaattaaacctctttcctttataaattactcagtctcaggtatgtccttattggcagcaagagaacggactaatacagtagtgttggtgggctatgtacttaaatgtgttttgtggtggcaggtaccagttttttgtttccatgtttaacacttccttaaggatcttttgtaaggcaggtccgatggtaatgaattcccttaggctttgcttgtctgaaaaggattttatttcctcttcacttacaaaacttgtttgtctggatatgaaactcttggttggaatttcttttttttaaggatgttaaccttgaggtgacagtgtagggagagatgttcaaatcaagcagtggcttgaagcttctgttaaactagccagacttccaaaggcccatgcgcagttcttattttctgtttccaaatttctaataattagatttagaaatgctcagtggccattcaaattaaacacacacaaagcaaaatccttcaatcctttagatgttgtttagaaacttttaggaatagtttcaggcttatttgccaggccttacccacaggtaggaattgtctaagggtgtggtagagtggtctggagtcttggagcctcaggggccagacttaattgggagggatgtttcccatggtgtgacccaagaagaaaatttgaagctgtggtcagggtaaggagagataggcagatgtatcaagcgtataactcaagaacacacattggaggacagaagaatttctgagaaggtaaatgggcagtgaagtagagagaatgggtcagttggtttagattctagcttaaaaaaaaaaaggaatttgttgggagcatttcttttgggagtgtccaaactgctctgggttggggtggcccagctgcttagccacactgtgctggggtagacccaaatttcattacttcagttatcaactttgcctgtgaccacatgctgacaaagtgctggtcagttcctgactcatttgtttgccttgtatgatctccagagtcatgggtgataatcatgacttttaataaagaacaaagccctgatgtagattgctttttaggaagacacctagagtcaatggtaaagaaaaaaagaacaaaacaacttgttatacactttatagttcccacgtgaccatttacacacaccttctaatttgaatctcacaacaaccctggggcacagggttatctgcatttcacagatgaagaaacagaggtgagagaatttagtgatttgtcaagaccacataggtggtacgagctggagccggactccaaatcctagtcttctaacttaatccagtactttttctgccatcactttttaaatcttggcacacttataagctgcccttagcaatcctgcaccaattacgggaggtgatatcagtattttgactttgcttggctctaattttttcttgagactaaggagtaatgataaagataggtagctttatgtccaaagagtttcctttatggctatttcccattctagtgttttggccttagaagagataagactgtgtggcatctagaagcttgctttatttaaggaacaactcaacttggccataatatgcataagctgttgtgttctagaagagccatgagaagtgctatggaattttcacgtttaataaaaatgcagttctcatagattatcttggttaagtctaagaagattagtttgtttttatctaataaaaagtataaaggtgctttacaatgtaaaaagggtcagttgtttagtaatttaaatgtccagttgagggttctcaattatgaaggaaattgatttaaatgtagcttataagatatcaagcactaaactctgtgatctcaacagattccattgttcttcttgtaaatgttttggaagaaaagttttccatagaaagctagacgaaactccaaaggaagttttagacccttctagagtttacagatgttggttgaacagaaatccttaaaatctgtgagatggacttctaatgagaaagccaataaaatgggtcctttggttttgtctattgtttttgtttttatgagaaaaataatagactgttgtaaaacaaagtataaaagaataaatcaaataataatgatttttctttcacacaaaagatattattctttaagttgttttggaagtcaagtttgcagaaaatttgctttcattagtccttttttctttctctctctgcctggtcacttccttttgcccatcagcttctattgacttctcagttgtctggctgtggaggacaggttcatgccaggaataaaggttcctaccttgtttcctagggaaaaaaaatgggcttacctgatatcgcagataaccaggaaattccacttcctctttcagatgtgtgcgtgatatgtccctattcattggttcaccttcccccttcaaaactaaaaatgaatgtgaacataccttattaagtaggatttttaaaggcacggcatcataaaacttgcaacttctgtaggaagagcctaggacatgtgttggaatcacaccagtgatttgtgttgtgtgttggtcagcttctcagccgctggtaggtaggtcagtactcacagtgtgactcttgtcccacaaggctaatggtgaccatggttctggcttctgaggccagcagagaagtaacaatgtgcatgaactgccgtggcaccagctgctcctatgtagacctttgaagcatgaaaaatacatgtctctcatcattcttagtatatttacttatttgctcattttccctgtatgtacctggtttcctgaccctgccaactatcttcttcactccagctgcctccttggccttggcatcactggcctccttggtctcctcagctctgaccaccaccttggtccagccttgcaggcctctttgtttctgaccctgtagttcctgtacatctcctcagccccagctgcttctttggctctagccttgctggtcttctcatttgtggctgcctcaaggggaaggaagggaagaaaaggaaaggaaaatgtataatttctaaacttgtaaatatatgtatttaagtctaaggaaatgttactcagtattccctttgcttaaatttatcatggatgtatctctgtctttcaggagtgaaattatcaaaggatcagctgtgaagttattagatactatgttttgagtagaatgaggcttctgcagatataaggacatctcattgtctcctctgtcactcctctgctggtttggaaacatctataggaaagcatcttctatagtcatcatcaacctaagaggccaacatcttgccatcctattttccttttttgctacttatgctttcatttttacattttgtaggtttccacataagtaagtgttctctttgtatacaaagcagcttttcttatggtgaaattcatttattttggtcaaagtgattgtcctgtactggtaagctcaaactgattgtgcttcagtaacaaacaatttcaaagtctcagtggcttgaccaagcaaaagtttatttcttactcactctttatatctaacataagtcagcaaaagagtttgttcatctaagacacttatggagctgggctcagagggctccatctcaacacgtttgtccacaatcatggcaggaggaaggtaatgttgttaattgctctctggctcttaacatctgccagagtgactggcatcacccctatgctcattcgattggccaaagccagtcagatggatgtgatgaacttcagtgagggtgaggtagtacagtcttaatatgtgtgaggatagctggaatatttggaagcagcctaatgacaactgtactttcccatgttgagtggctatgagtctcatcccatcaaatcttggtgataccaatgagaaccaatttactttctcatatacaaatacgaagttgacattttttccaaacatctgggacaatgaatattgctcttgatcaaatttcaagttattttcatttaagaattagacagacatactgtgatctctttttatgttacacatttctctcatactggcattttatctgcacatgatctggtgaaagcttacttggtaatgatggcttgtcactttcttccctgtcttgcagagttcatggtctcttttcaggagccagtcattctaatatcctagttcaagaaaacatcttcttctgtttattagttgttcaatttctgtagtcctttttcaaagtacttagcttcaggtggaagaaagtttcctaataatttctaaattagaaattgtatgctattttctacctactgtgccatttgtttccaggagagtcagctgaggcgagtaactgtggatggatctagtgcctttttgcaggttattgccaaatattaatagtaatgacaacaaaaataatgacctattgtatgtgtatagacactaacagtttaaccatatgagatctcatttgatcatcattcatgtggcaggtttcagacgaaaatatgacaggccaccactctatattcagggtagagacgctccatagttttttagaaaatgtttgaggaagatggtttcttgttttgtctttagaaaggattagaatgggagagaccacaaagattaacacccttagtccattaggacttctctaatattgggaaacccttattctgtcaagggccactgatggaacagtaaaaaagaccagagaccacctacataggaaagcaatataatttagtcttttaatgagaagttataaaatgttccaagaagaagcaatataaaagtctacttaattaacacaagaaatagcaagatacatgcttcatttctctattttagcctaaaaagggaagggggacagagaggatgaagatcacaagggaaagagtcatatgaataaagaaaacaggaaagagaatctgataaaggggggaaggttgcttatggaaaagcacataaacacaaatgcagagaaaccacaaacaaacacacctgtgtgcattcacttcccaactggcttccggagaactacataagcacatttgtaatcatggagtgctgtgaaatagcagcatcttgatttattctttcagggtattgccagttatagtgtaaacaccttgagaataggaacatctctagatgtttgtgaaagtgaaagatttttatcttcttaatgctgcactgcattttggaaagttcaggtatagtgtaggtgtattgtccttcaataggaagttcggagaagggccacatttggcacatgattcagagctccctcactttcagtcaccccaggtcactcttcctgttctgctccagtacctaccttccaaaagcaaactccggacaacagcctatgtaatctagtagggccattttacatgccagatagcatagtttcatacttgcttaaactgttgacgtaatctgttcactgactactttttcatcattttgggaaataaataacataagtagagatagatttttattcctttatcaacaaatgtttgagaaccagctatttaagcactgtgctaggtactgtgtattagaagtcagtaaggccagcataatccttattattatttaattttgtgggaagacaacaataaaataataactaaagtgttctaatagaaatatgcttatttcacaggtaagcactaatttttcttttgcctctctttcacccctttttattcccttatgtatttttcctgtaattcaattaatagaagaaatctaggataagagcttattccctttcatgtaaaaataccaggccaggccagccctaggcaagcatgaccatgtttctcatagtccttcttgcagctctgcattgaccacgattccttcttaactctctaggttcctttttaaatggcttgaaattgtttcctcttttcacattttgcaagaatgaagttttagggaagttctggaaaattaatgggaaagtaattccctcaagagagtgagacacaaaaatgtggctcatccagggagcagcttcagattcttcccttgctaataagatgagagcaagatgatgtgtattgagaacctgccatattcaagacactctattaggttccaagggggctataaagataaagagggcacagtccctgccctccagaagcagtatatggtaactataattagaaaggaacacaaagtaattaaagaagtgtgccgagatgggaggtatggatgcctctgactgttatgtttttggagagttttgtgaaagaggtggcatccaggctgatactgaaagagatgtggggattgcagaatcggactgggtaggatgctgatgcagcatcttcattctggtactctgcatgctgccagtggacaggcaatgatggtgcggggcaggtatctcaagtcaacggggagaggatagtgtcacaaccataccatttgggggactgttgatgtttcttgatgaattgaaatacgggggctttcatttgttgggcaatggaaaaatacgctagatttcgatgcaatgaaatattcacaaatgccacaatcaaaatggcaatttgggaagtttgttatggtatgtatgagcaggttgattagaggggagagggataccagttagaaggtagtgcaatggtacagacatgggatgataagaatccaaactacaaaggtagagggtagaatggaaagaagagagtgatgggctctgtcttgtaatgtgtatgaccctggagttatttacagaagcttagcatatgccagcgtgtaaaatgcaggtgagggtgactacagtggagtgaggcaaaggttttgatcagcggagtaaaatgtactatggaacagaccttgaaggctcttgctactttggaaatctgagaaagggaagccataaacatgaggagcactgttactctccataaaacagcattatgctgttgattttcaaatattcacaaatgcttcttggaatgtacttttccatggattagtgtgttttatgttgaaagtgcattttttttcatcagcgagtttgcttttaaaatcaggtaaagatattttccctttaaatgtaaaatgctaatttaatttagtctttgcagcatgggaatgggatactaatgtggctgaaaacagcagtttattttttgtgggtttgaccatttcagaagtttaacatttttaaaaaatattatcactaggaaaataaatttgaaaccacattccagcttcaatgaggattattcaagtgtttttcaattatattgcttaaatgctccaaagagtctttgcctcagagcacggactttttattatgacttcactgcaaagggaaacagaggactctgttctgggttctgaagtggttttcctcatccatctctggattgctcttcttggaaaccaacttttggtttagcctagtggagctttctatttgttagagaaattgaccagtaatgtgtagttatatgattgtgcatagccagctacagccacaactacttttagcccctcactcaaacagtgggaaaatattctagggtatgaaagtctcagaaagattaattatacacgtacatgataaagatttccagttatctcagaccagcatatttattctttatgattaattatcctgagatagtcttcattcaaggtaatgaaatattcttaaaatacttattgctttttagcttgatagctgaaaaccaatgctctgcattcttctgtatttataaacctttatgcagtttggtgatatgaggctacgtggagaaactcgctgcataaagaatgagggagatgatggtccagctctcccttgcagtcatcagctgacgtccagaactgcattcaggcctgggaaccacccttcaagaagggcatacacagactaaagtgtatttggaagaataaacaggtgaaggagactggaaatttgatcatgttggaacttggaaggttgctctggagagaagactcaaatagttgtggtatttcactgctgcagtgggcagatggcagcagccatagttttggctacctagcatctgggccccttttccatctcagggaaatctgctgtgtgtatgttggtgatggagaaggtcttgcattctatggtagaagctgaagggtcagatttgtctcttttgagtcacttgacatctgcatgtggacaagggtactaggcttcttctggtgtccgggcacttgtttatggctggggctttgagtctaacaggcataggtcagttgataaagtgtctagattccaatgtcatatccagactgctcttgtggaatgattttggcagtgttcttcactggctgcttcccttagcttctaaccacttcccacctggtttcacgttctaatagagaatggaaatatataatcctaaaagattttgtgagcttctcaatatcttcaaaacaagtttcttttttgcttaaggtagttggtgtaggtttctgttgtttacaaacaagaatgctgactgatataattactaaaaacataatgatttcttatttctaactggaattattttattttttactatttagtgaattttttctttaatttttagttaacatatgacaattgtgcatatttatagggtacagagtgatatttcaatataggtatacaaatgtgtaatgatcaagtcaagataattaggctatacatgacctcaaacatttagcatgtctttgtgttgggaacattcagaatcctcttttctagttgcttgggttttttttttgtttttttttgagatggagtttcattcttgttgcccaggctggagtgcaatggcatgatcttggctccctgcaacctctgcttcccgggttcaagcaattctcatgcctcggcctcctgagtagctgggattacaggcatgccccacgacgcccggctaattttgtatttttagtagagacaggtttctccatgttggtcaggctggtctcgaactcccgacctcaggtgatccacccaaagtgctgggattacaggcatgagccactgtgctggacctcttctagtttttttgaacatgtataataaattcttgttaactgtagtcactctacagtgctataggacactagaacttattcctcctatctagctacaattttgtaatcattctcttcctacttgccttcccccactacccttcctggcctctagtaactataattctattctttacttccatgagctcagttatttttagctcctgcagatgggtaggatcatgtggtttttaatctctctgtgcctgatttatctcacataacataatgccttctaggtttatccatatttctgctaatgacaggatttcattcttttttattgttcaatagtactctattatgtgtacatgccacattttctttattcattcatctgttggtgaacatttaggttgatcctatatcttggctattgtgaatagtgctgcaataaacatggggtacagatagccctttgatatactgattttctttcttttggataaatacccagtaatgagattgatgaatcatatggtagttctatttttagtttttttagaaacctctatactgttttccataatggctgtactaatttacattcgcaccaacagtgtagaagagttcccttttctctgcatcctcaccatcacttgttatttttttgtctttttgatagtagccattctaactgggtgagacgatacctcatggtggttttgatttgcatttccctgatgattagtgatgttaagcattttttcatattcctgttggccatttatatgtcttcttttgagaaatctctattcagaccctttgcctattttttaattggattttttgttgttgttgttgttgagttgtttgagttctttgtatattctggatattagttccttgttagatgaatagtttgcaggtattctctcccattctgcaagttgtctcttcactctattgataggtttcctttgctgtgtagaatctttttagtttcatgttgtcctatttgtctatttttgttgttgtcactggtgatttttgttgtcttacgcataagttctttgcctataccagtgtcctgaagcatttcccctgtgttctcttctagtagttttatagttttgggttttacatttaagtctttaatccatcttaagttgatttttttatatggtgagagacaggagtctatttgtcttcttctgcatataaatatccagttttctcagcaccatttattgacaagcgtatcctttcctcaatctaactggaatttttaaccaggattcaacaatagctttatggaatctgtgtgtatgttgtgttatatgcagtattttggttatttgttcattcacatgggggagagagtccattgttttatttacttctcaaaaggttctgtaatccctaaagggccaagaaccacttatctgcaggatacaatttaaacatcttagcatgacatacaaagtcctcattatctggctggcctcagcccattgctttgattttctctcctgttacattctctgttgcttctatttctttatcctcttttcatgctccagtagtcaaagtactttgtttctctaaaagcacctaatggtttataatctcgacgtctttgctcttaacgttctttctgcccaacccttttctttgcttcttatcccaccatttcattggtttgctgaacacctactcatctatttagacttcactggtttaattcctatgtggatgtaatgattactgtgctatatcctcttggatatatccgtattgtactttatattctgatttcagcattgctggcagcccatgttaagctagcagcttgtatgagtgcctcttctttgtagccattgtgcgttctccaaagtcactaaggcagatgtgttacccaggcacatctttgtggagaagttaacccttctagggggaaacactcaaacaatgagaatgtgaatgggtcaatgccccaggcttcccattgcctgtgggccaatggtaggcacattcgacatgactcttcagagagatccctgagagattgggccgggggctgtccacacagttaatctgctcattaagccccctttattggcttgctttctttcctgaatcacttttcttcctctttcactcctgctttctagattactgctccctgcatccaagtctttatctcaagctctactctcaggtgcatctagatccagacaccctcttgactgtgtgcatctattttagctgtgagatgctgctttagcatctcttgccctttgttgatctcatttaatgatttctttctagtagactattacttgtggggcgtaaacagcttatcttattgtgatgtgagtgggcaccatccaactggctgccagtatgggtagaacaaagcaggtagaagaagggagataggttttgctgagtcttcttgctctctttctcttcctgtgtcagatgcttgtttcctctcctcaggaaggacatcagattctatgttcttcagccttggaatctgggacttaaaccagcagccttctgggggccctagggcctttggcttcagactgagggctgcactgttggcttctctggttttgaggttctcagacttggactgagtcatactactgtcctctctccctccccagcttagagacagcctatcaaggagacttctccttgtgattatatcagccaattctccctcttttgtatacctatatatcctgttgtttgtgtctcactggagaaccctgattagtacacttattcattattggtccctaagcaggtacatagtggaccctcaacaatgtgtaaaaggcacagtgcatgagagctgtcttcagatatctgaagggttaccttgtgtttacatatgtctggggaacagaaccaagaccaaagagtagaagttacaggaagacagattataattcaatacattgtttatcagtgcacctatgggaggtgatatttgatagcaacagtaacagtggctcattatggcatgatgacccactcagggaagatatttgcccactcttctgctgagaagtcctattatagaaagttttatagaacaaggaccacaagcacatacctgcaaggaccaggctggcatataaactagtgaggcaggctaagtgtcacatagttgggaatggtgagaactgtgtggaataaagtgtgtgtaccctgactcaaaggggtaggtactccttagctccagccaacagttgctagacagtaatgcagatccagcactgtcagaccttccagttttccaaaagtaagtagaaatccagattcttaggtaaatcttccaatataaagacatttgagtcaagaaggcatcaccgtggctggctatggcacatgggttgtttgtaatctttgtgtagtggatgtagctgaggatgctaaagcctcagatgtgaggatagctttctagagagccagattctggtcagcttgctctcttcaggcccatgaacacactctgcctgttcccaccttgggcctttggccatcctctcttcacagaagggacactgtgtggctcaggcccctctcctgtgacatctcccactactggtccttccccagcaagccctgtcttcttggtgcaccttcagcatttccagcactcagatgtctgctgcaattgctcactgtctagtagtgtcatagtttgtcttatctgtgtaactaagttataagttcccttaatgcagaggttctacttcatgtggctttcctgtcatttggagcacagtattgggtgcatagcaggtgctcaataagaactgttggttaacttttgctagatgactatcatactcagtgcttatggcatccctcttagtagaagatgaggtaataaagaagaggccaccagctcttgcatggagaacttaaaattaaatcagtgaagctctttcagatgactcagtgcttttggcattgctcttagcagaagatgaggtaataaagaagaggccactagcccttgcatgcataggttaaatttaaatcagtgggactctttcagagatgaaatagacatgtcctctatctactgttgacctgctgtcctcagagcttaaagtggcgctcagtgtgcctcacctgtcaaaggctttccctcaccatttcccaccagagatccaataaaataaccaattatgtgtgccctgatttagattccttgattagagatgggttctgatcataaactatgtaaccatcttttaaaggaaaacgttaataggcaactctttgttacaaagattgcctaaaagaaaaactaattttaactgtttacaattatccatttttatattctttctcttttatttgaaacagattttgttttagaaatctcttttctctcacatctgtaaagcaaaatacaatataaacaattctcagtcatctgtgataatgaatattagggtatactttgggcactgaagtttactaattgtttccaaactttattttagcaaactttccccactttttggtgaggatgctagtgagtataaattgttaaaatagtatgtctcctttatattccatattgtacttgtctcactactgtttatttagcctagtttcagtgcagttttgttacaaggagaaggatttgaattatgcattcaacaaacatttattgaacccctactaagtgccagatcctattttagctgctagagatagttatgaagaaactagacaaggcccttgctttcttggagctgagcttccattggtgggagacaaccacaaaccaatgaacaaatgaacacacaggaaaatattggatggtgataggtgttgggagcataaaatagaatggagaaaatatgtatgtgtgtgggctactccagattggagttgagtctcttcaaagctgtgacatctgagtgttgaaccacaagaaggaaccagccatgtgaagatcttggggaagagcatttcaggacaacaaaacagctactgccaagggcctgtcacaggagccacatggtgtgctggaagcacagctcggaggctgggcagaaggaatttagccaatataatttattatacaagccaaaattattagcaacaaaatgaaatatttattttgcagtttaagtatatatagccatgaacatttagatttcagaatttgtgccatgatttcatgactagattcagtaattatttaagattcacattggagaaaatcagtgttctgaagactatgacgtatatcccgctttgaagttttggatttttcttgaataggataggccattaacaatattggaggaaaatatcatctagtgttatattcttaaattgaatttgccttggaagtaatcatgcatgcaatgaacatagtaagaaacagcttctttcatcctttaatgtaataattgctcccaaggattacaagagcttatagacagctggaacatccagctataatgttagctggacagggaagaaagttgttatggataaagcttcagattttcttggattttttggtatctgtataacagagacctgatgagttgccagcacataacaagccagaaccctggatccagagagcatttgtgacattcagccaacacagaactgctttcccacccaaagggtggtctccaaatctgttgtagcttttggcaagatttttatatcacaattgaaaacagatgccctttctgccctttcccttgttgtctgagttactaccgttcaagagattgcaagccatggcaatctctcatgcaccttcagaatgcccagcaagagtcctcgttagacattcctattcagaagtcctgctgtgacacacttcctctgcaagaagagaacagattcaggaaggtgccaggattgtgaggttctggtagtctgcagggtgtactgtgaatgctttttgtcaaaatcaaagcaccagtcctgggtttaatagaaaacatctctctggatagtttctattttaaaatatttaatcctaaaataaaatatttaatcctaaagaaatatgtaatcctaaaggaaaaccaaagtgtactctccctgatggactatattgagttttattacaggatatggccctaaaatgtgcttggatgggatattgaaaatccagagtatcaaaaatcactaaactactaaattcttgattgactaaaagagacttattagacataacaactgaatataatgtgtggaatttgtttggatcttggtgtaaaccagttgaaatgtaaactggtggacaattgggaaaatttaaatatggactgaatatcaggcaatattaaggaaccactggtaattttgttaggtgtgataatgatatagtggttatctacgaaagtaagagttataaggacagtgctgtggaggggaaaaatgaaacctgaaactttaataagatttattggttcaaacaccacatgttctcactcgtagctgggaattgaacaatgagaacacatggacacagggaggggaacatcacacatgggggcctgtagtggggtgggggtaggggggagggatagcattaggagatatacctaatgtaaatgacgagttaatgggtacagcacaccaacatggcacatgtatacatatgtaacaaacctgcacgttgtgcacatgtaccctagagctcaaagtataatacaaataaataaataaataaacaagaaaaatcaagggcaaaaaaaaaattattggctcattagtagaaatgtaaaagtgcttcagaaaaagtaatcatagtttaggggagaggaacctaggggcagacccaggaggagagaaagtcatgtagaaaaggagattttgaaggatgttcagtgtccttcagtggaaagacactgccagctctaaatggctctgcaagggaggagccggggaataaatcctctgacatcactctcttccctcccatctattgctgatcttttcctgctctcaaatctagatggcaagggactcactggtgtagtctatacaggtcagcctttggggctgatagtagggtggaaaagggcagagagtaggactggggtgtaaacaaaagctaccagtaacagcatcttctttacaaagtataacaatatggggggaatgttgaaggatagatacttttggaagaagcccttcatagaattataaaatgttagggctgggagtatcctgagaagtgattctcaacctcattttagaggtgaggaaataaagggagcattatacaggtagcaatttgtgtacagctagttgtcacagatctgttaagaaattacagactttttgatatgaacagacacttctcagaagaagacatttatgcggccaaaaaacgtgaaaaaaagtgcatcatcactggtcattagagaaatgcaaatcaaaaccacaatgagataccatctcacaccagttagaaaggcggttattaaaaagtcaggaagcaatagatgctggagaggatgtggagaaataggaatgcttttacactgttgttgggaatgtaaattagttcaaccattgtggaagacagtgtggcgattcctcaaggatcttgaactagaaagaccatttgacccagcaatcccattactgggtatatacccaaaggactataaatcattctactataaagacacatgcacacatatgtttattgcagcactattcacaatagcaaagacttggaaccaacccaaatgcccatcaatgatagattggataaagaaaatgtggcacatatacaccatggaataatatgcagccataaaaaaggatgagttcgtgtcctttacagggacatggatgaagctggaaactatcattctcagcaaactaacacaggagcagaaaaccaaacaccacatgttctcactcataagtgggagttgaacaatggacacatggacacagggaaaggggaacaacacatactggggcctgtcagtgggttgggagctaggggagggatagcattaggagaaatacctaatagagatgacgggttgatgggtgcagcaaaccaccatggcatggtatatctatgtaacaaacctgcacattctgcacatgtatcccagaatttaaagtaaaattaaaaaaaaaaattatagactttttgattttcagccctgtctctttcccctaggcctgggaattttcataaattttccaaaattttcccagacccaccacaccagctcagcaactgttcagcatgggtgaaaatggtaaggaagtctcagttgttattcacaggaatgtgtaagcattatagacatagccattgcaatataccatgtttctgtagctgaaattacagtgtcactgtgggtaatctggaaaatacatatatgtgtcaaaaggaaaataaaatcacccataatggaccacagagataactaatattaacattttcgtgctttcctatcagttttttaaattaaaatatacataaatatgtgtatgcaaaattagtatcagttgtacatatagttttgtaggttgttttttcacttaataatgaataatttcctatatatcaaattgccttagaatctgagttttgatagcagtaatatttcaaaaatgaatatagcataatttttaaaagtcctctgttattagatatttgtttcttattttcttctatgataaataatgctgcaatatatatatataggtacatatataaacattatatatcccatataaataattgtgtttatctgggacatataatatttttatttaaaaaattgccaccataagaatttccagtggtcctttctgttggggcagagtggaaagaacatggctctagggccaggcatccctgatctgtttggcttccgccacattctggatgtgtgtccttaagcatgtcacttcactctattgagcctccttctcttttctgttaacagggatcatactgcacatccctcagtgctgtgatgagaactttatgaggtagtacttttctttctttcttttttttttttttgagacggagtcgtgctctatcgcccaggctggagtgcaacggcgtgatctcagctcactgcaacctctgcctcccaggttcaagcaattctcccacttcagtctctcaaatagctgggattacatgcacccaccatcatcatgcccaggtaatttttgtacttttagtagagatgggttttcaccatgttggtcaggctggtcttgaactcctgacctcagatgatccacctgcctcggcctcccaaagtgctgggattacggatgtgagctaccgcgcctggcctacacaaagtagtattttaaagtgtttggcatgtagggtgtactcattacatgttaggtctgtcttcatttgggatggattagattgcacacaagtatatgcacatgtgtgttgagtgaagtgaaggaaatatagttacaagattttattcagtatcaagaaaaaagtaaacctgacttgccgatagacacatttcaattgaaagaatcctttcagcaagagagacctattgaagtttaagatactgataatgaaaacagaaatgaaagtctttaaaagtgtatttttctttatactgggttgtccagtaactattcctaacctccttccccatcctcttccttcctcagtgctcatcttcaaactctatcagcgggcaaagcatgtgtacagcgaggctgcgcgagtgctccagtttaagaagatatgtgaagaagcacctgaaaacatggtccagctgctgggagagttgatgaaccagagccacatgagctgccgggacatgtatgagtgcagctgccccgagctggatcagctggtggacatctgtcggtgaggcagcctggtgggggccaagggatgccatcaaataatattgtttaaattaatggaaaaaaatgcaacatttcataatctacgggaatgaagatcattccccacttcctatatgaggagtctctgatgatacagagctacacttgttcccttctaaatacctgtaggatgaaagatttgctacctggctccatgattttatgaggctctgggtttggagtcagtttggagtcagctctttacatcatgagaaagacctttccgtctttggatgattaggcctttcaggatggtaactttgctcagagctgggccctgttaactttcttatgatatgttttattatactgctgctctgccagaaactcctgtccagtgtcctaattaagtttagtagttctactcagaagaagggagaaaactgacagaggatctcaagcttgatgggagcatgtggggagatttgctgaaggaatcacccagaaagccagcatttcctgccttctaggtttagtttaggcagtttgaggaaataaaggctgaagaaagcccaggtgatacatggttaatagaggcagaaatgtaaagaggacaactctttcacaaagcctaaaatcagctttcctaaaattgtgaaagaatggagataacagagttagtcctcttacccaggaaggagctcagtgaccctgggagaactgaaactgggaaagttctcaaacgctagatgttacttcactgtgagaacacaatgctacactacaattagtaatggaaatgtaattaaccacttggcacttgtggcttgcctcagtcattgccacactcccagcctgaaaagtttaaaccaagtaactccagtgatcacaaatggcctgggtaatccagcttgtcaaaagacttgaacacagcattgatgaagatcactctgctgacatgtttgctcactcatttccaaaagccttccccagcttgtttcattttaagtacccttttctgaaaatatcaagggcctagtatatggaagggacaaatattgttcagttctggaaataagaggaagtggaattatttctgcagagatcaggaagaaatgtctttgcctggaaggaagtgggatggttggaatcccacctgaaaagctgcggaagggcatttgccagcttcctggaattctctaataaactttctcttcctagagtggtcaacctgtacttgttttcatggagcttacattctcgtggggaaagagagaaatgacaattaaaaataatttgaatggtagtgataagtgctatggaaaaaaatgagaaggaatagagactacaggtttgggtgggtactctttctgtggagtggttgaagaaggtcactctgacgaagagatctttgagcagaggcctgaaggaggtgaataaatgagaacagcaaatgcataggccctgaggtggatacttggctgtcaggtgtgaggctcagcaggatcagcatggcagagggccaggaaggaaggagaggtagtagatgaagtaaggaaggaagtggggagccacaccatataggccgtgtaggccatcggaaggcttctggctttgagaagagaaagggggcaatggaaatgctaggcaattctatgccaaatatgcctgcaaggaagacttagataattgctgtgtgggtataagagagaaatcaagacgactcctgggtttttgtcctgagaaactttccttgtgcctctaaaagccacatttttgaaaagcacacttcaccactgtaggtaagagttatcttagagtaccataaaatattagatcaggaaggggtcttagagatccaggaaggcactaagagatgaaataatttgagtaagtttcacatatgagttcattggaaagcctggctcccaatccaatgattttgccacacgtgcctctccccttgggttatactaagatgtgattacacttaaatgtgggtcatacatacgtgtgtgtacgtgtgtgtttgtaacctattttcatctcctagctttgaagctttatgatggaggcctttgttgtcatagtttccagcatttgaacattaagcaaagtcatgttgagcaggaacgtaatgtgtagagtaggatgaaaagtgggctggaagtgaggaagcttggattccgactctcttttcattctgagctctgtgagctggaactgttgcttcgctttgtgttctccattggctttttctgttctagcagtctacagacctatacatttaaaaaatatggttctagtgaaaaagcttatggctatgtcttaaatgggtttggaagagtaccttttatttatcttttcattttgtttgtttttggaaaatcctttcttaatggcagctaaagtgtttcattttcatttgctgtatttattttctgagaaaaattcagttctgtgaaaaattcaggagctccatcactttttcatgattgttttgtttggaaagccaattgctaagtatcaaagttattttctacttattcgataaccatatagggtccaagttttccatattgaaagattatcttctggcttgttggccagaatagttgtctggtccttaaagcttcttatataattaattttttctttgctgtcactgtgaccagcagataatattcttcaaatgtttcagttggctgcaagttactgaaaggtcctaagtggcagagcaacctcagaggaggatagccccaggggaattaagttgatgcaggcattatgtccttccctccttcaatcaatacatattttcacatgggtatctttgtaccgtgtgaaattgcagtctattctctactttcaaaagctgtgactttctcttgccgggcccaattgctcacacctgtaatcccagcactttgggaggccaaggcgggcagatcatgaggtcaggagatcgagatcatcctggctaacacggtgaaaccccatctctattaaaaatacaaaaaattagccgagcgtggcggcatgcgcctgtagtcccagctactcgggaggctgaggcgggagaatggcgtgaacccgggaggcagagcttgcagtgagccgagatcgcaacactgccctccagcctgtgggacagagcaagactccatctcaggtaaaaaaaaaaaaaaaagaaaaaaaaaaaaagatgtctggaaagtaatgaggcaagaaggaggggttcagaagaatgcagaaattagtgggaataagataaaggatggataaaggatggggaagacagacggtacaagagtagcaggtagtaacatggggaaaggttcgaatgaacagtggagctacttgtaagccctagttccttctgaagccttgtgactgtctcactgggtcaggcagagaaggtgttggacatactggaaggggtcctggcaaggcctggtgtgagccactggtgccacagacacaacctctagcaaagtattgctttgtttaaaaaccaccaccacctccacaattaccctgccaccattaaaaatgttaacatcagtagggaaggtgtgactaagactgggcagcctgagcaggttgcttgttttccccaaaagagggaggaggagggaagctgaaatgggttcaaggaggagcactgccaaaaataatctttacatcaccctccctggtccacttatggcacttcaaaattcctttagtgtttctgaagggcttcttggaaactatttgtatgaaaagacaactaattgagtgagtaaattaacggcttgaatacctagaatacctaagttgctatacacaagcagaaaatcttacagtgatctgagctagactgaattaaaaaggcatctcctacttagcatataggacaatgtatagaacaactttgtgacccaagtggagagaaggggggttgggaaagagcaccactgctagctgtctttttcagttgaaccttttcctgctcttcaagagaaaatcagtttagaatctaaagaaaggagcagggaggatgaaggaaactatacttacagagtgaggcttttttaaaaaattaaattaatgttagaacttaaattatatgaaacaaagtaaataatgaaggaaaaagataatgtttgctgaattataaagtatcttttgtagccaaacaaaatgtaaacagaaagaaatgactaaattttaagtagaatttactggagaacacaaaacaattttgaaaccaagtcagttatatgtgagacagctcattcactattggttccctcgttttacttaagacaaaatggttaatgccttttgtttttgttttgacacttgttgaagttagagaggattaattgctgcattatcgcccaagctattaagggagatgaatgacaaattttagtggatcaactatgattacaaaagttaatttactttgtcttcctcagaagtctttctgcaatgtattccatggtgaggctgctcagcctctcgcatccattcttcaacaaggtcataatggggaagaatgaagtgcaaatccattgttgcatgctctttccccatgaccttaagtgctaacatgcataccctgtcaaaaaaaaaaaaagagggagggagccatttcacctccccttaggggttcacttctctttgggcctctttgacttatgaatatacatgccatttgcaggacccaaacccactgctcttcaatggcctttaagtggcttacatttctaaagtagacatgtgggcatattttcttatcctttctcatttgaacactgaaggctgtggtttcttgactgtaaagcaatttgaaggcacggtgtctaacctggctgtaaaaatcatagaaactgctagaagttcccttacctgtgactcttgccatttcccagagagcagaagctagaagtcttctcaagtaaaaaaatacactgctgactgcttatattatatataatttttaaaatattttaagggaaatatcgtagtccagcagccatttattagaacctagaatttctagaattgtgctgggctggggtcagagagatggatgtgacctgttcctaaattctagatttcctgaaataatttatttcatatccatttgtataatatatatttacttatttagaaagaaatgacacagaatttaaatacaaggcataatttcttaccttccctctttttcaagtgtgtagtgcagttgggtctcctggatctcctccccaccctctccattgctctgtatcttgcaacttagtaagtgctttatggtcgaattagttcacttaaaagtaggaaatttgactttggctatattgggtgcctggatagttaattctgtgaatacacaaggatcaaagagtaacattcctcataatctccatccctcatctgccctagcctttgccatcgtgctttataaagtagaggctgcctttgttgctttaacaaacccttctacattattcccaatctagtcatcacaatcatcaaagtgggatccgagggattttagggttttggtttttgtaattcttgtattgcctctctgatgtgcaatagctcaggagatatatttttaatgttttattgttcttccagaaaaaggcgcaaacatgaaaagttcactaaacacccttggttcacttacttttctttcttaatttaaagggtatatcggtctcctaactttcggtcttctcagaatttctatggcatatgccaaagggcctattaagtaccagcagggaacactgcagacagacctttctgcctttataagtgtatacagctgcgcaggctgctgaccagctgctggggcagccctgacttgtgatcagatgtgccactgacttgggggcagaaggctatttctaatagcacttatcattctttatttgggaaatttgagccctgatttcagaccatgtgattgatgcaattcagtccattttcatctgtagcaggcagggtggtgacagagcagctctggagactcagtagcaaatatctttacctacaaagacttccagcttctgctccctggaaactagtaaaagtctcaggaaaatagacctctggcccagttcctataggttttacagccagattaaaaataatactctgtttgctttaggttcaattttgaaaaaccacagctttcaaaaactgttcaaatgagaaagtataataaaatatgccttttagaagttggattgaggacccttaaagacttgataacttgagtccagcaaaacggcatattttagatcttagaaaatcaagtaagaaggcacagtattcttctctagaccatgtcatggctggctttaatgcccatattttagggtcttccagagacacttcagtgacacctcagttttccccagcatcttccacagtaagagtttgatacgactgcatatgacaaccatttttttttttttttttttttttgagatggagtctcactgtgtcacgcaggctggagtgcagcggtgcaatctcggctcactgcaacctccacctcctgggttcaagcagttctctgcttcagcctcctgagtagctgggattacaggtgtgcacccggctaatttttgtatttttagtagagacggggtttcaccatgttggtcaggctggtctcaaactcctgacttcatgatctgcctgccttggcctcccaaagtgctgggattacaggcgtgagccactgcacccggcatgacaaccattttttaaatccaacaaactgcaaacaggccctttgccaacctagaaatttagaataatccaaggatcccaaggtcagagaaattttttagcctggatgatgggatttcaggcttagtcactgggccataaattgaatgttaaagggataggaggagatcagtgatgtttatttgtttgtaagcattttttttctttcttaaatacctatgttcatttgaaaagcgtattttaatatatataataaagcagatgataaaaagaaatcaactgagaagaatcactgacaggaaaatcaattactgacatgcagtaattctgatgttctagagtagaggtagtattctattgatatgtccaggaagtaaaatatctcatttagattgaaaaaaagagacaaaattgtgctaaattaatcatagagcctttaatccactagtaatttggagtgaattttattaagaagaattaattgtaagtacatgttaactttcgtgtcaggataaattgcatcttttaaagctaagtgatctgtgtacattgtgatagggcctttcactttggttgaaatcttaggtttgaaactgtgcctggtttacagtaactaaaattaactctagctgtgtggtcctttatatagttgttgtcatcccaatcagatatatctcatctgatgtcaacttctgagtccaataatcagactagctccagaaggcacagggaaggtggtgtggacctctagggactgccctctgctttgtggaaaggcttggttaattttccattagagattcaaccaaccaccgacccaacctggagtttaataacacgctttttgttgataagtttattcagtgaactaggctatctgttctaggggactgattcttctttgaaacagcccggccttaagaatgcagctgaaatagccattggggaaaacttgtataagactgtacattttaaattttgatttgtcctcatttggagtgaccttctgattcagggttgcctacatttcttttaccattgcctgttttatcttaacgcctccttcctgatttacgtgtaagcttgctatacaactcttcaagtggctactttatggaatcaatattacagtgggttattgccagtcatgaaatgggaggagtactgttgacttaccacttggagtcaaaaccagggactagatttagatacaatgaaaaaattccaaatcactctctgaaacagtataaatgtcttaatgtcctaaaatgtttgatgacacctaaaaaccccgcatgtattttcttcttagaacttagataggctatgtgttctacaaacaccaagcaaatcccttgtattttcatttataggttctaatatttttttcctcactgttttaggaagtttggggctcaagggtcacgacttactggagcaggatggggaggctgcacagtatcaatggtacctgcggacaagctgcccagctttctagcaaatgtgcacaaagcttattaccagaggagtgatggaagcttagcaccggagaagcaaagtttgtttgctaccaaacctggaggtggggctttggttttgcttgaggcctgaaaaaatgtaaaaagtctgagagaaactacttagggcacttaggaattggcaggactttctgtgccacagtaaattaatcttccttctgttttgtattatgatgaacggttgctattatatcaagatatattttcaaagaaatggttgaaagctctctatgcttcataatgattctttttccatcttaaaatatggttttactattaagagccaagatcatgcttggacagatcttttaagaataacttactgagatttattgatttgaagattttaaagatgaatggtaaaacacactcttaatactgattacatggattggacttgaattaaatatattgttacaattaaactgataccactgaattgtatgcattattcttgaatagagttcatttctggtttctcttagtattcttcttcctcaaagttgtagttgtctgttgatgatggtgatgatgatgatgatgacgatagtgatgccacacattctctctcaatttcagcttcggaacgctatgaaaataatacatgattaaagtttcacagatcttcttggacattgtataattgaatttgaatgtgagatttctccagttatcaagagactaaggatttttttttttttttgacaaaaggaggatacaggaagaaaattcagactcatttgaatatttgtaaaccatgtaatatataaataaccactttcaattcttttggccctgagctatctccattacttaatagaaaaacttagataaaaaacactttaagactcttctattcacattgaaataaagaattatctagatgataattcagataattcagtttgttcatagaattactttcttatcactctttttctactactttttctcaaatacctctctaatccaagaggcacttccaagaaattccacacattccttatatcccttttttgcttgtctagcaaagcttgtttgtatatatgcaccccattgtaaagcaggtatgcaggtatgtgggtgaaagtgactatgaaaagacttaatgaattctgggatttgtaatggtattgatgggtatctctgtatgtatatcaagagtgggcagaaatgtttggctggtgatggcaaatgactggctttctcttgtggatggactataggaagcactttctgaattatgtaatgatttggaccaaaaagtattttgctgaaatactcaggtaattgagatagcaatggttttatggcatgaattatccaaaaaaatatcagaattacttattattctgtgatttcattagctcattaatgtttaactcacagattgggcatcaccatctagaatttcagtttaagggaggcctgcgcaaagctagttttatttcttaaaggataacagtcatacatagaatactaggaaagccaatattctatttaaaaataaacttctgatgcattttcattcttagcagaaaggtaaatgcttgagaaagcttgagtcaaatttgttaaaagaattttgagttctataaatccaaaaatctgaaacctgaatttatttaaatttataatcctttattttttaataccgtgccattttccacaaaggatttgtggttggtatataattctttaaagatacctggatcagtgtaaaaaaaaaaaaaaaaaggcacctgtcattgttttgctgttccatttacaattttcaccaggtgatttcttcttcacaaaaggtgagtaaaaatttccaatgtgcactcttctttgggggacacacatggtcattctaagcgagggatctattctatatttgttttgatttctctcgataaaaagaactatgtttcagtcttactatcactgtgtggtatctagatattatgagagatgctaaacttacctggaagggatagggccggggccattagaaaaaagatcatgcagtaaatggactttgagcatggccctaaaagatgagtagagtttaaaagctgtggagtgcacactgcagatgagcaaagcctatgggtataggcaaacatggtgtgtgtaggaggctcagtgagagtgaaggctttgctttggtatgtagtgaagaataagattgactacactggctggagctagcttttgaagagtcaaatccaggcagcatttagatcaggggttatagcccagcagcccatgggccacatctggtctgcagatgtatatagtttggcccacagaatgactaaaaacttgggctccaaatcaggagattgtacaagcagtatcagatattctggattactcagaatctggattactgagtggtggaatatctgatactacttgtccaacatttctacagggcatcaatgaactagggctgagatagtagctgccttgttagatgaggcatggctatccagtgcgctacagtttccacaactgcttgtataatagtttccctgacactcaaatcatttaccacttaccagctgaggtcacttgccctttatcaggacacttgcactgttgttttcctattctaattaggtatttctctgtgcccatgtccctatcaatagtagggaagatagaccaaaaaaaaaaaaaaagagagaaagaatgaatatttttgtgtgtggatgtaaaaaatagtccttagctgggagtggtggcatgtgcctgctgtcccagctactcaggaggctgaggcaggaggatcacttgagctgaggacttcaaagctacagtgagccatgactgcagcactgcactccagcctgggagacaggtgacagagtgagaccctgtttcaacaacaacaacaaaaatgaatagtcctgtttgcttattatactgtcctgtttgtatattatacaacacccaggtgtttcactctttctatcacttttctgccccatgtaggaatttgatttgatccatttttgacattatactagcagccaatgggattgctctagatttttgaatggaagccttgacatgctgaaagtaaaaggctctcctctatccctgacctccaattgtccagcattcagacatattgtacactagtctctacatgttcttgtctgttgggagagaagaagcccttcagacttaacaagaatgcccataagtaaagagaagcaaaagaga

SEQ ID NO: 216 - DNA, 227339 bp, Homo sapiens
  source 1..227339: mol_type = genomic DNA
tgtaataaacacctgttgaataattgttgaataactgattgattgacagcctgctgagcatgccagatgtttctgtctggctacaatgtctgggtttttcttttcttctataaaaattgttatgattttcaatgcaattattcaccagattttcctcatgtgcctttatttttctttttctcccagcttttcattttgaaaagtttaagttacagatacaagttgaaagaacagaataataaccccattatgctctctacctggatccaacaatgagtgttttcccacatttgtttttatctcttgctatatctatgcctatatttgtataactctctacaatataaatactttcattgctaggtcatttgaaattaagttgtagacatcaagaactttacccataaatactccagcacacagctcctaagaatgaggacatttttctaagtaaccacaatagcaatatcacagctaaaaaattaataataactccaaaatataatctaataccccttcatttattcttaaattagaaaagcttgccttttgatcagacaatgactttgctttccaaagtggaattgtggtcctagttccctacagatccattaggatttataggtatagtcaagatgtacagttcacataagatagttgcattctctggttctgggatgacaaagggatgttcaggcccccagaatgggctgtttctagggtagaccaggtccatcatcaagtgggaccagggagatgttgctttgggactctgagggttgccatgagccctacatacctgttagagtttttaaccccacagctccacaatgtatgcttgctctgtctctttctaaaatccctgtttctactctcctttgtctacttgcattggcaaatggaaacactatacactagtcagctccactcttggcagttctgattcagtaggtctgggatgggaatctcgagaaattttatttttaaaaagctctccaagatctgcaatctggcagggggaggggggaatggaaaatccctcatgagttacgtggtctgcctacacagctctgcacatcttatgtatatgtgtttgtgggtttctgtaaaatgtctccaattatctttggaagtgagtggagtataaactataaataaacgagagactttctcagaacatctatgtgcggtgggaccagtcttggggactctgcagctgaaggtgggggacggtggagagagactgtgaacttgaagggagatgactggctgggtctgtgtttggtgctgccattggctaattacatggatggttttggacaagttgcctgacttttctgagcctcagtttgtcatcctctaagatgagcagagtaatatgcacctcatgagaccttgaggtcgtgcatgtgaaagtgctttgtaaactacctgcaggagtctaagttgagccagagataagttcacccaagagcccggatctgcctgggggcaggggcaggcacacaaggaactggctaccggaggagctgcggggcgtcttgagaagaagcttaccctaaaggaaggtagcaaccacaggcaggaggggtaggaaatgggaaggggcattgctggggttaggtaagtgtcgtccggggctaggaggattccgctggctcctttccccaggacgaagggaggaaagggctctgatacaagagtgtacacgaacgaaaagcactggctggagatcatctatgtggaatgtggacagggcaaggtgcccgtagcccctatggctgacagagtaagtagaacttctcactaaagtacacgtatgtccttaagtctggggctatgggggcgtctttaaccatgagtctcctttcctagcactcctgacactggcctcctccttcctaggcccaactctcaggctcactcaggggcagcctgggctggtgaagcatcagcagaggccgtagtgctatgagtgctggctggcggcacggcgacatattccctgggagcctgagatgagagggttacacagcggggaaggtgggaacaagaagactgcctttcagcagaatgtccccaggatcccctaagcccccgtgatgctgtgctcggtcgctttcctgccccaccctctccagatagctgctgtcctgcctaatgggaagattcctttcccccaccggcaagtgtgccaagtgcctcctagtgactcagtctccctgactctgctactcgctgagctgccttgggcaaggcacttaacagcaccctgctataaaactgaaatagtgagagcatttacttgataggactgttgcgaagatttaataaaataatacacaaacagtgcctggcatatggtaagcacatcattaatgtttatatgttcagggcaatcgattcctttaacctaaatcacatttgataaactatttctcagtcacaattcaagccaagcaatttctgggaagacagcagcaggtggttaacactgtccccggggtgtggggattttgagcttagtgtcactaagagctgctcactgaggatagaactgtagtacttcaaagtgtcccctctcattaaagacagcccattgtgggtcctgggagtatgacagggcctgggcaagctcttccatatcttctttttataataacctccatagaaatgtgctttcagtttggtgggaggggcgtgcgaacgagttcccattatccaatttcagtgtttaatattttgttccttttaagcagtcataattttgtttctccttttctcctgattgggtattgtccccctttaaagtattttagaaaaaaggaaattggacaatcagattataagaaaggttctattgtgcaaagtcacaatgtatcattaaattgtacagggctcccgacaactctgacaacagtaactggtacagtgaattggcagcagaaacgctgaagctgtatttatgtgctgctacaaatatgtagctattcttactgtactatacagtcaggaaaaagccctaagggcttctggcatgaaaatgttacattgataaatgacagccacggtgctgaacagtactaggggctgacaaaaggcaagtcaatgtatatagagtttcctactcattaccttacctgtaaacactagaagtcatgcacaagtgtttgaaagtgtctgtggagatgtgttaggaaagtaaatgaaggtagaagaaagacaaggagcgggtgtttatatgccagccgtctagggaagcaagttgtagtatcttttagacgcttgggctgtggggttgttgcaatggaatgtttttaggtttctgccttttatctaatcagcagaatgaaacttcagggtcaccatattgcatgtaaaaccacttttaaagaaaacgatttcaaacttaccaaaaaagttgcaaaaatagtgcagagaattcacctatgtcctttacccagactcgccattttaaaatattttgccacttttttttatcattctctctctatatttttcttgaatcttttgaaagcagctcgtgtatgtcatgcccccttaacccttgatactttagtttatatttcctaacaaatatcatatttcctaacattcttctaagcaactatagtacagttagcaaaatcagaaaattggacattatactatttaccatagtgtaccatggtatatcagactatgctatagtccgtagtcctgttttattcattgtcctactcatgttctccatagtatttttactttccactacaggggctttattgcatttagatatcatgtctcttcaggtccattaatctgggacatttccttactctttctttgtctttcacaatagccaaagtgacatttctgaagaatacaaaccacttactttacagaatgttccccatttttttcctgatatttattcacatccttggccagaatacatattttcatttgaatatattctcccttggacaccttgtaattattctttgtttctgggatagtttttgtcattattttcaatttccttcttgaatttgctcaacccttgtttatatacatccttggccagaatacaaaaaccatgatgctgtcaccttctcagagtctctccgcagactcaggatatccatctgaccctcataagtgatgctagttttggtcacctggccaaggtgctgcctatttctccaccagctactaaatcccccatcccctcaccaccaccacccccacccagcagtgaataatatgtctattatccaactaagaaatgtctgttgaaagacatttgaagaccttgtaaatctcctccttttcatcaaactcttcctcccctaaccacttcagcatccattcaggtgtcttctccaaacaaacctttactgcgatggttgtaagatggtgatccactcttccctgaatgtctatcagttggcattctactcaaagagttctccttttgtccatttatttattatcattgtgtatgcctagatttctactttattcagtgtttattttgatgcatatatggtcttagatttagccagtggggccccttcaagctggctcctatgtccttttaacattgtgctctctctctcctctgcttctctctttctctctctctcgctctttctgcccttccttactttctagtacaacaagatgctccaggctcatttaataccctctcaaccccagtcctggaatcaataatttctccagtgaactcttacagtggagaatggtatttagaaaccaagatctgggtgcaaggggtgctcattgctactgggatattattaatcggggccctttaagtggacagatctaggaaatatgtatgtatatttgtttaaatatgcatacatatgagcatagatgtgtgtgtgtgtgtgtgtgtgtgtgtgtgtgtctgtatgaaataatgagttcataccgctatctctaattacaaatctactccacaggaatctttcttgccttcttccatcccattctgtatctcccttcttccatagtgaaaagcctagctccccaaaacaatgtatttcctgatttgctcaattgcataccatgcataaaataatacaattgctatacccataacactatgaaaaaaataaagggctttaaaattctttccagttctaggctgagagcacatagctggcatactttgtttaaagttatgaatatttttttaagctttatattattcatttataatataattggattcagatatttctgtttggattcagtttttattcctctcccctcagctttcttgattttattttgtttttttaatatagagaacactatcatgtttccaaaatttaagcctggaaaaacagtatactcagagaagcatcaattcttctcctatcccttctacctttccctcccaccccttctaggtaaccaactcaattgttttctggtttaccactattgtgtatgtgagtgtgtatgtgtgttttgccaaaatatgcagatacatgtgtcttttcttttctgcatggagtgctttccagtgaaaaccagcaaaccttctacacaagttctaaaagagctataacacttacatgtatgttttcttctagtcccttctttgttacagataaagtagcagatgatacataccctattgcaacttccttttttcatttaacaaaatatcctggatattacgctatatgtgttcacggacgtcttccttatttatttatttatttttgtagtcttgccaacagaatgttttgtcaaacttttgattttttaccggtttgatgggaggataaatagtatgtttgtagttttaatttacaactctattaagagcaaagtttaatgtctttccatatgtttatggactctttgtagatctttactatgaattgtctgtttatgcttttcgccattttttataggagatttggggtttttccttaatgttaagtactttatatgtcagagatattacctttttatctataatgttgtggaaataatttctcccaacttgtcatttgtagttttttcaaattgtgatgaaatatacatcacattaaatttaccatcataaccattttaagtgtataattctgtgccattaagtacatttaccatccatctccagaatgttatcatctcaaaccgaaactccgaactcataaataataatgggaactcctaattcctctcttcctcaagcccctggtgactgccattttactttttgcctctatgattttggttactgtaggaaactcatataagtgaaatcatttggtatttgtctttttgtgtctcgctcatttcatctagcatattgtcctcaacgttcatccatgttctggtatgtgttagaattttcttcttttttagggctgaataatattccattgcatggatataccacattctgcttgtccatttatctgttgatagatatttgtgttgtcccaccctttggccactgtaaataacactgctatgaatgtggatatacaaatatccgtttgagtcgctgctttcaattcctttatgtatacaaccagaaatggaattgctggatcatatagtagttctaaatttaattttttgaggaaccactataccattttcaacagcagtgcgtaagggttccaatttctctacatcctcaccaacacttgttatttatttatttatttattttaaaaatgttttataggctgggcgcggtggctcacacctgtaatcccagcactttgggaggctgaggcaggtggatcatgaggtcaggagtttgcgaccagcctggccaatatggtgaaaccctgtctctactagaaatacaaaaattagcagggcatggtggtacatgcctgtaggcccagctgcttaggagtctgaggcaggagaatggcttgaccccaggaggtggaggttgcagtgagccgagattgtgccactgcactttagcctcggcgacagagcaagtgtccaccaaaaaaaaaaaaaaaaattttatataatagctatcctaatggatatgaagtggtatctcactgtgggtttttgttgtgttttgttttttatttccataatcaacactggaggtacattacagtttgtcctcatgaattctagttgttctcatgaggtacattttgtccttgcagttttgactttgtctttgaaatgccccatgtcacatctagctattcttctgattcccaggtctagaaactacagtgacttcagacctgccccatgtacaatggaaagacttccataaccttttttcttctacctctaacattgtctaaagtttaatctctatcatacatcgcttattccatcaaactaataatgattttactttgcagatcaaatcctaatgatatacaattgataagtgtttaggaagggaagttttgggctataaattgtccctcttcatctcatttaatgctttttggcctactctgttttgtttgatatcagaatcacagcacctgctttttcagagttggggtttccgttatgcctacatttgaaaatcttttattttaaagggtgaactgagcccacttataaattgttatatctgatgtgggttggtctcagctgtgtcatattgtttcctattataactactgcatcactgtgccacacttactgtgtttctttcattatttggtatgtattctttgctatttttagaacttttggggttttggaatagggtttccaatatttgggaatacatatattttgttgtagtgatttttatttatatttttaatatattacccttaattcctatattttgtttctaaccttttaacatctggtctgtctgttttatatggtatcctttcactactacctgctactgatattgcagacaatgatattattctattttcccttcgctcttccccttctcctccagttgtctttagttgcacctgttctaagtttatcagaaagtataatgtatatacactagtctttcaccttctgaatatacaaaatgctctccattagtcactctgctggcttcctcagctgtctcttggttggaggaagctcattctctaagattcctcatgaaaggcccatgtgagtcacgttctctgaatttttgcattcaggtcatatctgtttgcctacaaccttgacacttgagggctgggtataaaaatcactgcctggtacttttttgtgtgtgtgtcatggagtctcgctctgtcacccaggctggagtgcaatggcatgatctcagctcactgcaacctctgcctcccgggttcaaatgattcttccacctcagcctctcgagtagctgcgattacaggcacctgccggctaagtttcatattttttttagtgatggggtttcaccactttggccaggctggtcttgaactcctgacctcaggtgatccacccactctggcctcccaaagtgctgggattacaggcatgagccactatgcccagcctgcctggcacttttgttccttgttaatgctgctccactgttgcctggctttgcatgttgctgttcagaagtctgatgccagcataaatttttatctctataagcaatttgatcttttttgcctttaaaatctaatcgttttactaaaatatatttaggagttgataattccagatcatttcccaaggtacatggaagtcacttttgacatgtacatttaaattttcccttattcctggattattttctggggttatagttttaatattaattaggttttattgtttaatgtttgtactttagggactccacttaacatgtattttggtcttcctttcctggcttttattttaacctcttctctctgaacctttttacttctatctttatattattttcaatttcttgattgttttcttgccattcttcagtgtccttttacatattttcatttgaatatattttcccttggacaccttgtaattattctttgtttctgggatagtttttgtcattactttcaatttccttcttgaatttgctcaacccttgttgcatttcttcctaatttttgtctagtctgtcttcagttcttgaaatttcttatcctagatatgtgtgtgtgtgtgtatgtgtatacaaatacgtgacactttgttcagtttgacatgtggtattacaattttcttatgcttcatggtttttattgtgggggttttcatcagcgaaaatgttatgatttattttttatcatcagaaatgtgatttctgttttctttttgcagaatctttaaatgcagttgatttgatgtttttctgttactaggcattttgaggcagggttcccggttcaagagtgttttcttttatctgtgtactgaaatgcagtttttaatagataatgttggtgtttggggaggggactggctgtcttctctttcatttctgcaggatttgtaattttcccttctgacttccttctttcccttcattgtcaggcctctgaaggacattatcttcttttcgtatttatctgactttttcccagaaacaaggctccttcaagcctctcacctcttgtcccattttctttcaaatctcttcccttgatcaataaggcacctgacctctgttcagtttttagttcttggtgttggactttctatttataaagaggtgacaaccctgtacttcacttaagtccttggcaatagtggagggagctcagttggaatttggtatcttttctttcttctacttaagtaatttaatgttcagttcatggcattctctctaagtaatgctgaaggcttgtttttgtttcgttgaggatatgggtacggacttatatcaggcagctgccattatcctctgaccgagaagctcctgaaaacatttaatatatcaagttctaagtaaaatttctgtctttcttaggaacactggaagctttgcgtgttgcaagggcatcaccaaggttacatagattatgttacaagacagatcgttttcttgtatcgttaaagatgcttaatgtgctttttaaagaacgcaacgaatgagaaagaaaagattttaaacaatatattattgctttccttcttcctcattttgtgtttattgaaaagaacaactctaccattgatagctctgtcacccacagaaaaatgttcttttgaaaattaccttctcagttcctaccaactcaaaacctccacatctgcctatatagataaataaaatcgataccagcgggtcaggaatgttttgctgcaagattagtgagaaaactgcagcaagcagcagcaaagtcgggttcaagcgggcggtttgcaccaaaaactcaggtcagttggccaataagagcaagcccgttaagggtctgaggtggccccaaagaccaaggctgaagaggtgacagtctgggcaggaagcaccgaggccactaccgcccccgtaatcgagaggccccgtgtgcgtgagcaaggctctttgcccacgtgtgcgcgcgctccagtcgggtcccggggcagccacctgtcactcacgggggagggggcggccggcggggggagcacgctgaggggcgggcggccgggggcggggcggcgcccaggccctcacggcggagcccggcgtgctgcagccatggagacgcggcagtcccctcccgcggcccgcgccccggcccccgcagccgccgccgattggtcgccctttgctccctgacccccctcgccgcctccgaggccgctgcttcctgctctggtgccgcgcggcgccgccggcccggggcggagctcgggcgccgagtgcgcgccgccgccgagcagtagcaccgcgcgggaggaggagccgccgccgcgcccttccccttcctccgctcctcccccggcccccaccgcgcccgcggccggcccaggcagcactcgcgagcagcggcggccccgccggcggccgagttgggagaatgcggcggcgctcgcggatgctgctctgcttcgccttcctgtgggtgctgggcatcgcctactacatgtactcggggggcggctctgcgctggccgggggcgcgggcggcggcgccggcaggaaggtgagtggagcgccctgccgcggccgggcccctgcgcccaccccccaccctgcgcccctgtcccctgccctctccgcgccgcccctgcgctcctccgcccggacctccgctcgcgtcgcccgccctcgtcccgggcctccgcgccgagtgcccagggcaggggtgcacccggcccctctgcgcacgccgggctccgaaagggcggcccccgcagcctttctctgccccctctcgtggacgtcgcccctctctctgctcgtcgtaattcgagtcttgtccggccgccgggagccccatcccctgcggttggaagtttagggatgggggtgttgggaaacacaaagggggtggggaggagaggagagagaggcgaccgcttttccaacgcgtcatgtacagcaggagagaggagtccaagtttcttttcagccctttgataccagcggctgcaaatcctcgtccctttccccctgtcactccgcggggcgtgggttccgtgtttctgccaccttctttgccctttacctttggggggcaggggcggccgctcccgtgccaagtaaagccccagggcccgtgcgagccaggggccagtgcgcccctgcgccccgagcgaggccagtcccggccgttcccttgcggccccagcgttaccctctgcccaacccggcccccggccctcccgcgcgagccggacgtggcctcctgcgcttgcattttccatccccactccccgcttcagggagaatccctcttctgtggctgtgtttttaacatgctccaggggccgagtgatctggctgtggggaccgtgtgagccgctctgcggttccgcgtcctcgtgccgccgctccggacggccgggccctgggcattcgggaggatggtgagcgccgagaggagccgggacagcgcggtcctgcggccgagcgccggccgggagagcagggcgtcgggctgtgtgctggagcatgccggcaggggacgtttgtagtgttttactggctcctcggctttgaaagcagcgttatcttttccgaattcctgtaaccctcgttactgtgacatttagtgtcaccgcaaacccagaaaattctgagttaatggagatggactacgggtggttgggttggaacaagagagtggtatcctgaaacaagccagagggaactaactagatgaacagacttcagttctgaagtcagacccctaaatgtccacgccggggtttggctgcttcagaggttttttctttgcttcattcattcattcatagccgaagatgttaggtggaatgggtgccttatgtggtttctggtaaattacgtggatttgttttatctagaagggcagaaataaagccctctttccacgtgctgaatcggcctagcttctgagctgacattgtactcttagcgttgtttttgtaaaaaatggtataggtagtatatgtacgcgaagacttggtttattcttgaacagcaaagagcatgcaggcagcaaaagccgtgcagtccattcagagatataatcgtgtaaaactggaatgatttttaaaactttgcttcccggtaaactgtgccttggccactctgcatagcctggtgtgctggtgagacctggcaaagctttctgcctttcatgcaaagaaaaccaaacacataagccacccttggcgtttctctttccttagtctgccactttcattagtacacgtgattagaaagagcaagcgtgctcgttcgcctcccggaggctgattcctcactctggtgggcttcagttcctggatggtgtgaggggtcttccatgcagaagtcttcagacactcctgaagtgtgtgattcttagtttgtttttttttgttttgttttgttttgttttgttttttttaaagaattcctggtggcaatatagacaggtacggagaccaggtagaaaaagtgggggaaatgaacaattaattacacatggattggtgatttgggattctattctttctgtcaacgaaccataaaatttaatgctaccccttaggatgctttagtgatttgtcggttgaggaagaggtgtgtaaatgcaatagcttttgaaattgcagtggaagactcattaacttcgtgtggtggacccagggttaaagagaagccttaagatggtttctgaaggaggtaaatagagccctgctgtcacgaatgcctgatgtataggaaaatcgtgtagtcttctttcttccccaattgtttccatggatttagacactagaagtgtctctaaatttatttcattctcataccaaaaaaaaaatgtggtttgtttggcttgtaaagtatggacataaaaaaagatagcgggccatgcacagaaaggcagaatttaaaagctagctatagtttttttagagataagtggacctatattttttctcttgcctcatactgttcaagtcagggcttttattccatatttagccagtttctgcacatcctgacgtttttcatagggtactaggctgcagtattgggctttagggatcgtctgaggggagtccaactaggatttctgctgcttcagcagcccagcccaggcttgtcattgtgtgccctgcctgttaagtaactcatcacagaactgttattctccacttggcaaaacccagagagccagctcacctcagattgcaggtttagtaaactaagcaggagggagtgctgaagaccaatctcaggcactgccgcacaactcgggactcaacacccaggctcaggacatgtatgttaaagcagtttattcaaaatattgtttaaaattatgtttcatttacatttgtgtccataccctttccccccatattttgctctttccccctaaattgatgatttgcacttcaagcgtgcctttcctttgagcttcttaaatgctttaaaattttaaccatgttaagtctcccctgggctttggtacgttggcagtggatggagccgcagaagagaggaagggatttctctggaaatgaagctgcctgtgggtgaagtgtggctgtttagggtggaaagggaagggttttctctctgctgtaagagtgtgtggagcctgagaccccttgcctgtgtgcctgcatgctgggaggtaagggacggtgttagttgagggacatgatccggagccctgggagcctgtccactttgcacagtagcatcacccttattccctgagctggcacgagtcctgtggcccttgcccgagagtccaagggtgggggactttgggtgggatcttctaggaatcatgcggggaggcgggcaggttatttcttggaacagtgaaggaccttgccgggctagaccatggtacacatggaggggaacgttagggtgtaaagttggagaaattcagaactaaattgtaacgggcttcaaatgccaagctgaaccatttgggaactagtaatgtttttgagctagtagtagacattaaagggaaatggcacaaatccacttattggcattgagtgagacctagctgtttacctctttgtgcttagtgaccttcactgatgcattgaacctctctgaccctcagtttcctcatctttgcagtgggagtaatcattcttacctcatggccttgttcggagagttaaatactgttagtgggtgctgaataactgctatctctaaaagaggaaaatgaaaaaataaaagcctaaatatccccttgaaagtgtagtgaaccaggaatcttaagttcacggtattcctgatacaattcttgatttctggaaaatagtcgtctttcttttttttatccgttacccccacctctgagattgatctgactggttcatttggggtttgggctatgaatcttaaatgctgttagagacggactttttgggaagttgtccagacaccatgccagctctcttgtacccaattgtggtgtcagaatggggatcccagtagtgggcagccatcgggaatgtgggtggagggtgcagcttgccttggcggttaggcagttgtagtgtccaacagtggacagacgtgtccctgaacgaggggttcctgtggtgggatcccaggttctgagctccactgctctccctctgtagccctgcccctcttgttagaagggcaggtcgctgtgatccctggaagcatgcatgacttgaggtggagcatggggccctcacgtggtttaatgggtgccaaaaatctgtgagcatcttggtggatgcggaggggaacacccataccactccttgccacctatcatcagtttggagtttaaagaaagtccacttcaaatgagagtttgaagttgacacagggaggacagtagcagggaaaaccactgtatagccagataatccgacagtggcactgtaacataaacttctctctttaaagaaaataaagtttcccaattctggagtgaagctgtggctgcctctgggtcagcaaacataatggaaacagattgtgtgactgctgaacagtgcaaaagtaacgagctcttccctagacccttgagcaaaaatgaaaaagcaactgctttacccagcactgagtggggtcagcttgcccaggctctgttggaccttggggtgggggacacctgggaggctggtgaaggttttatgagtcttcagacccgctgtcagtttccccaccctagctcctgtttggatgaatgatgggtgagtggttggtctcctgtttggaacagaggaagaggtggtcagaaaaatgatgggagagggggtgggggagattgggttggggaagacataatttcttcttgctactgctcatgtttcttagggctttggggagagggaagtcagtttgggaagatactgattttagtgtcaaagcaggcaaggccactgtcctgcctaacttctagcaagtccagaggcagtgggcttagtgaaagcaggtgtggtggggcgggggtggcggggggtgcggtgaggctgcctgggacagagacacaggtgtaagcaggagtcgactgtgaggctctggctgagatcccaggaagggaagctaggtattcctgggaaaagcctgtgaagtctcctggagtgcccagcagaattcacgtgatgagaaaacacacaaacctggccaagtctatgctccctgttggtttttgtgcttttgtccttgtgaagcctcttctggaagctctgcatgggtgatgctgagccgtacaagtcagtggatatccagatggaaacacactggcttagccatgccactcacatgtaacagtggggcacttccatgctggttgttaaatatgctctgccttgagaccccctgagtgccctccggttcctagctgccctggtctttccttgggatctctttcccatgttcagcaatcaaagggttgaatcctgacacttgaggggcctcttggacccacttctgtgcctgtgccatagtgaacatgctgattgtcacccctgcaaatgtgccacttggatagaaggaggcctagccccacttccatgatgggaacaatcccttttccctctgagtaagtcttgattcactgttactgttgagagttctggttccaccattgtaatcttgtggccttgcctctagactgccttatgggtgaggtgtttttaaggaggagggatgtcttggtacttccatatgcaaacccccctgaatgggtctgggataggctgggcctggcggggaactctcctctatggagaattacattgaattcattgatgtgtgctcaccagtgatcactcctgtccttagagtggaacttgaccttgttctcttaacagtgtgaagattcctttaccttggccctgtgcttgatcttcatgatgaacccagtatggagttggcaggaaagctgtcttcagattacctgcccagtccagaaagcctctcccacctttctctattgtaaaccatggaaataaaaggggctcaagacactaatccatcttccctgatgggcccccacctttctagggttccctgctctaagcaggtggcactgtgctcctgcctggctcttgcctcctgcagcacagggtgaaacactggcatttttgcacttagtcatgtctactagtatgggccccagaagcatggggtgttttatatggattaggtttcttagcatgctgaaatgtagatgacagtgattcatcagggccggatttggagataaacaaaaactgtcacatagagtctcactcataggcttacatttaaaaagctttcccaggctatgggagttatatgagccccttgtctcactgaggcgggctgtcacaaagaagcagttaagggctggctgcctgggggctgggaaatgggccgatccctcatggctcagcctgcccttgctggctgcttgccctggtcaactgtcccttctgccgcagccttccaggagctccccatggaacagagagtctctcctaggccactctgctgaccacctcctcctgcccatggctggcagttttctgtccctaactcttagggaagaggaatggccaggagggttgggggtagagttactgaatttccagagttcaggtcaggacatgcatttgggcagggacaagggtactttcgggactgtggttgctctggttcagtttcttaactctggcaccattgacatttttggctggcttttttttttttttaagacagttgtactctgccacccaggttagagctcagtggtacaaccagagctaactgtagcctcaaactcctgggctcaggtgatcctttcacctcaccctaccgagtagctaagactataggcatgtgtcaccacagcaggctaatttttaaattttttgtagggacagggtttcactatgttgcccaggctgggctcaagcggtcctcctgccttggcctcccaaagcattgggattccaggtgtgagcgactgcactgggctggatcattctttgttgtgcaaggctgtcctctgcattgtatgatgtgtagcagcttccccagcctctccccactagatgccagtagttctcccacccctgatcttccaagttgtaacaaccaaaaatgtgcagacattgccaagtgtcctggcgagggtgggaggtgggcagaattgcccttggtagagaaccactgccttagtccgttaattttgatttcattccttctgtctgagccattatggttagaccttcttgtaatgagactgcctttctgtgtggtctggggtgaaccactgtggggagggctaatatattaatacgttttaattttcaaaatttaataaacactttcatggcactcactgtgcatagaaataaaagggctgcatttcatctcagcccttttatttcttctagtgtactgatgaaactgaagcacagaaaggttaagtgactttcccaaggtcacagagctcacaggtggcagacccagggttgtctggtggaagagatctcctcagggcctctggaggcagtggggtttttctgcaactcctggccgagggtttctgccagccagcagtgaacctggcttgctcctgctccctgggcctcccatgccccttccttgcattggcagtgccctcatactgcggcctcatttggaaagttcctggaaggcatcttggagcagatgcacacttgataatgctttgatagtagtgctggtctgttttgcttttttttttttttttttttttgagacaaagtctcactctgtcgcccaggctggagtgcagtggcacaatctcggctcactgcaacctccgcctcccgggttcaagcgattcttgtgcctcagcctcctgagtggctaggattacaggcacctaccaccatgcccagctgatttttgtatttttaatagagacagggtttcaccacccaggctggtctcaaactcctgacctcaagtgatccacccacctcggcctcccaaagtgctgggattacaggcgtgagccaccgtgcccggctgctcttttcttcatttttaccttttgctccatggaatttgtgttcctaccctccaggcctctgcctgtcctgaaggccgcaatcctcagctgcccctccggaaggagcagagatgaaaactggctctggttcttttcatttattctttcagtgagtatctcttgagaccctcctatgtgccaggcactgcttgagtgtttgggagtacaccagttgttgtagcagacacggaatccttgtggtcttggagctttcattctagtggggggctgcggggagccagacagtagacatgaagtcagttacgtcgtgtgcagaaaggtgctgtgtgctgtggaaaaaatagagcagtgtatggggattagggatgagggcggaaggatagttgcagtattaaagtggtgatcacgtaggctcatggggaaggcaggattggagctgagactaagagggagccattgtggttccctctgcttcagaggtagcccctggtttcatcttcgtccagcctctttttcggtgatctctctactccttggtttcttttgctaaacaaatgagccagttttctttcccgaaggatgttgcctttggttggctagtggtggagtttccctccatgctgtagacatcttggtcacctgttcttgttctggtctcctcgatgaggcatgaatgcatcctggttaaaaggttgtgtgtactctcataatcgcttcccttactacagacctgcagctgctcgaggcagttttaatttagactgctccagcagtttaatttgctgatcagcttcgtgggatatgcttgtggaacaatctcatttcttgattcctgagctgacttctgtgaagcaccaagcatcgggtaagtcattcattgttaggtgcaccattgaagaacagtacacattcttaaagtgctttctgcacatattgctgtttaacgagaaatccccctgggtccctgtgcaccttttccagcacaggatttccgctgtgatgtgatctttgggagttgctgcgggtgggagtggggtttgttgattcatatttgcaggaaaccagagatcagatgcctgcctgatacccaggctttggagaggggggttattcttggcaatgtgggtaacactgagcttctgtgatagatagtattgtacttggggacagtaaaatggagatgtgacttcatggccaatctcagggaggcggaactgtgggaagttgtggctggtcctggttctcaaggtgagggcatgcaggtgcttttcatagaggccattctcatttatgaagggtcattagatattttatcggattggtaggtaccaatcccataaaaccattgggatggttaggcaccgtgcgtccagtgtacttctggataaaacaactggagcatttacatggcgggaaaaagaacaggtaatttgagaggccttcacattcaagagtggccatcaaggtttcttcctctctgcgtcagagaccagtccagggagtgaactcttttctttctgacaggctgctgccctagaaaaatgacgcacttcaaatgaagggtctttcttagctaaattgccctgtgagagcttgaggagccggtgcaaattaaaggcctgtgttttggagatgcccatgaattaagtactctgttatcagtatttgggtaagtgtagatgactgttgggtaggggcatttgtatggctgtcctggatgatgagagggttggcccagtgtgggatgcctcccagtctcattgtttcctccttgctgcctctggggctttccccttgacctagatgttgagcttttgctctgtgaccttcaaaaggcctgccctgccgcactctccttcccctcctgcccttgtcctgccccatcccctgtgccagggagctcacttagttgtcttcctgtctcacttttgatcatcactaatttcccctgtgtctggaatacaactttttcatcaattccgagaggccattatttgtcaaacatgccattattttgtggaccactaggaaagaaaaaacactgtccattgacctgtgacacaacgggttcttatcagttggcattcttattttctacttattgaaagagctctttcagaccgagacatcaatttttccatatatcactctcgggcatagatagatacaaaggaaaatacaagtgaaatacattgagcaaagtgttctaaaagtttttcagagtccaagcactctgagtcactttttgactcagatgttagtgcctattttcttcaaacagagtcatccactgtgccaccaaaagcgctggtgatgtagcatttcctaaggaaaaaaatccataaaaatactaagagccattggttctggactttgaagacagcttggcaatgaagtcgaggtagccagcctttgactcttctgggaattttgcctaactcctcaattcaccatccattcctatcccaccatgatttggtttttagggattaagagtgcttgcttcattgtcgtttcttggattttcttctaagccattgacgtatatgtcctgcagatgtggatgattgagcatgggctggtaagaatgcatcatgggccttgcccagcccatagcattgccgacgtcattgattgtgagctgcattccagtcgggggtggtggaggaaagggcatcttagaattgaccaattacagcctttctttttctcgtgtgtcacattgcagttgggccttcatatctgcgggttgcacatctgcaattaaggcaattcctactttattagtggttatattattaaaaatccttattttttgaagaacaatacaaactgtggatacaatgtgtcgtatttggggggggatcatggaagaagccagatgtgctgttgaagttgaccagtgggttcatggagttcattctactgttttatttttgtgtacttttgaaaagttcatttaaaaaatttaaaaagatatttactcatgtatgcagcataaattaaagaagcagctgaaaactagtatttttgtaaaaagcagctcaaagggtttgtgatcgtattagtccagaggtgcttctgcctcacagctcttctgtagtttgggatattccacagtgattcttttcatagggagcatcagagatcacgttagatcctgacttagtacctgtatcaccagggaagcattcttacattggttgctgtttcttctgtgaggagtatctacattctttggaaattgctaatcctggtgcagtttctggtggtagaggatgagctcaggcggtctgtgaggtcatttctgcctaagcagactgcccggtggaccaaagaccctgttacccaccagagttcactgtagatgttttattttattttatttatttatttttagagtcagggtctcaccctatcacccaggctggagtatagtggcatgatcatgatcatagctcactgcagcctcaaactcctgggctcaggcgattctccacttcagcctcccaagtagctgggacaacaggcatgagccactgcgtccagccagatgttttattatcttgactacacccttctcatttgccaggcacctctttatgttcagtctttctgccagatttttcactcatgctaggcagctttgcttgtggttataagctatccatcaggagctgtggatgacttgggaagctgagtgggagaccgttaataaatatgtgttagtccttttggttctcccaacaagatattgatgctaaaggctattttacgtggtatttgtcaataagagattttggcaaattatgatactgcgtatcttctgtaaggtataattcctggtacttcaaatttatgtcagctttgtctctgagatgtctgaaatgctttagagccattgctcatttgtcttgcttttcagcatgcctgggagaatgaacagctggggagaaagaacagcttttcttcccacattcacacacagtttctgatggacccacaggttactagcctgccccacgggtcatgcagtagcaaagttgggactagaatttcagtgttcctccacctgcctaaagtacggctctggagaaagtcagccctggctgtcctggtcttagtaaagctatagttcgtgaaacatcaggttacaaatagcaggtttccctcttgctgacgcagagctgcagcttcaggcttggaaggtgctgattactggggctggtgatctactaaccctttattgaaactgctgatgtggatgatcgagaagcagagagccgggaggagaatgtaattcaagtctgggttcttggatggtctaagctccaggcctgaggctggccgtcatgaaaggaacataactgtggctgtccaggcctcataattgggctcatggaggcagacgggctcatgaggaatgtccctatggagagggttgctgaggctcagcctccatctgcacttcagtaacttaggagctcacacattcttatgggtcaagaagtaatctgggtcactaagcatttgcctaggaagatgtgaatttggcgtcctttgttttagaaagaaaagggatagaggtaaagtttcccctcttcctggtaataaatgtgacttggcatatgtcataattgcagtagtgtttgtacttaagacataggttttagtttagaggatttttctccctaactggcagtggagagtgtgtggagtcattttccttgtactggccctggaaggatatttttggtgatctaatttttttattccagtgttgcaaagcgccgacatcattatcaaatgtgccatagttgtttggaagcgaagctctcatcagctatgtaagtttttattttaggttactgtggagaaggggaggcctcggtggaggactgatgtgtgttcagagtcggagctttctgcagaaattcgagtcctgttgacccagggagcaggccttgacatcaggccccgtgcatgaagcagtgtgatgtcccaagcagtggtgctctgaccacttgccatttaggtcctggtgccagcgggaaggtctagcatcagcaggttgccagggtgactctgtaaatccatactgggggctttggaaacagttttgcctgtttctggccctagcctcgtttgacagcagaagcccaggaggcttgtgcatgggagctcttggtggacagctagctctgggtgtctttctggggctgctgtgacatggcagagaggatgcatagcacaggggccactggcctgggctccggagcagactctgggtgtgcattctggcttatccagttagctctgtggcctcaggcaagtcacttaacccttcagtgcctcagtttccccattcacctatcatcaggttgttcaatgatgaataaattagtttatgtaaaatgctcagaatggtgcctggtacatacatagtaagtgcttaaaagtgttaactgctgttgctaatgtcaactgtcactttgaaggcggggaggtgttgacacgggttcttggggaagctgcatcagtgtgctctcacatcacatgtgacacgtcgcaggcattcacgagcccagaggctcctgttccccagccagagccagcctcctctgccaggtttgaagtgaaccaacctactttcctcgaaagcgcctccagcctccgcagaccatgcctgaaactgtcattcctaggtaggtgggttgttttggaaggagtgtgaggatgaaggggctcctgcagccctttgcttcttccttgggtggggaatctgagccccagacagcatgaggaagctggtcagggtcccccccagctggtgtgaggaccgagtggcccctggggttctgcaggtagcttcaggccagaaccctttccccatccagtgttcagtggccaggagattatttcccaattccacccttaatcttttccagcttgtctttgaaaaattataccgagatatggttttaagtgcgtgctgtttaattttttaatactcttattggcaattggatttttcaacatcttgagctgttactatctgaatatagcgtgttaatttgaaaacttttctgcaaggttttaattaggaaatgttctttcattagttcagtttctggcttgcttttgaaactgcagatgagtgacaagtggaagacaaattaataattgtggcaatgcaacaaagcccccctgtgagggctgaggactagttctgtcaattagaaaagtgctcacgtggctttgctgatggctctaattaagacaactcacaactggattgcagatcaatagatacactctgtgatgattttaaggaggaatgacctgtgtgaaaacccacgtttggtcatgctaaccatgacgaggaaggatggcacagtggttgggagcctggcctgtcatgttagacctggttcagatcctgctgttactacggagtagctgtgggacattggcttgcgtttccttgtctggaaaagagagttagtgagttgatgaagatgatgctgacgagcttagtgaggacgtttatttgtgcttgctctcccttcctgcaggtacttctggggctggtctggcttgacttctctgacccaggacgggtcttgcttagagcagacctgcaggtcagtggtgacatcaggtgtgaatttttggactaggagtgtcagtcggggtgcagaggcacctggtgaggcaggcttttccatccttcttctctagtccgtgtccctcctttgggcaatgtggagttgccttcaatctgggaaggtctctgtttctttgtgtaaggtgaagctgtggtgctgaatgaagcaggtgtcacatttgggttacatttttaaggttctctaatcggtcaaagtgctgtgtaagtttccaggggcaccgtagaacaaagcaggcttaatggattaatggacatgattgagtgagctgatgggttggtgatttcataggtgtctggctttaagccctgccttgcctttgcagttccacagccattcaggctggtcatctcttcctagggcctctggagttggcctaccttggagagatctccaatgtgccattcctcctgcagccgactctccttatccctacttcctcagtgctgagccagaggagagtaccttttatcacttctgtatcatttatttatttcgggaagggagtgtagtggctgccaggagagggaggcacacatataaattgtggacaaagcctagaaacctaggcattgcccctgctcataggaagtcatatgcatggaacatacgcactggagtgctagttagacagctgggatgatagagcaggggatccaggctgatacatcaggggaacttgcagagagaataggggatccaggatgatagagcaggataaggacagctgtggatggagcaggacgactggataatggagcatggagccaggatgatggaacaagcagccaggatgatggacagggagctgggatgatggagccgggagctgggatgatggagcagagcagctgggatgatggagcagggcagctgggatgaaacagcagggagctggaatgatagagcacggcagttgggatgatggaggagggaagctgggatgatggagcagggaagccgggatgatggagcagggaagccgggatgatggagcagggagccaggatgatggagcagggagcctagatgatggagctggcagctgggatgacagagtggggagcaggatgatggagcagggagccaggatgatggagcgggggggccaggatgatggagcggggagctgggatgatggagcaggcagccaggatgatggagtggggagcccagatgttggagcaggcagccaggatgatggagtggggagcgaggatgatggagcaggggagccgggatgagggagcaggcagctgggatgacggagcagggagtgggatgatggagcagggagcgggatgatggagcggggagccaagatgatggagcagggagctgggatgttggagcagacagttgggatgatggagcagggggctgggatgatggagctggggggcccaatgatggaacaagaagccagactgatagaacagaggaaatgatctgagaaacaactttgaaaggtcacctgcagccccctgatgcttgcattatgttaaaatgtttgaaaatttagaatcctcattttaaggcattgatctttccttcagaaagctgtccttgctgttaaacggtgtccggagagtaaggagatggtcagcactgagcatttagtttcttcagaggaatgacagtgggggttactctgtttttacttggagtatctggattgttcaggaccaagtaaaactctgtaagaaagggttggaaatcctggtgggcctctgttagcccttccaatagaagggggccggagggggcccactgtctgtgtccttggacctgcatgcaagctgaaggaaatggtgcctgctgcacatggaggagctggagccgtggacaggcctgagctcatctccatcagcacccggatgttggcgtacatgcctgtgaaggtgagggtctgcacttccagcagccctccccctttgtatgtcactttggacacccgagatttccctgatttgcctggagcctctgtgtaatttttaatttgatcccctgcgtcccagtggactgtgagtgtcttgaggccagcacaggcttggcccctcccacagcagggagacagtggggagccaggctaacatgggcccagggatgtatattctggaaggagggcaggctgggggacggtcacgccaatatcagagtgtgaagtggggctccatgagaggtgagtcctcatcaggaagggccgaggaggggacctgtgggcgaggcctgttgaccagaatgatccagtgtggcagaaggctgtctgggcttggagaagatcctgtgcagagatcctggggccagaatgaacttggcatgtctgggcaaccaaaggaggagggcaagctggtgaatgggacgtgaggtcagagagacagccgggggatggtgagcatttaggatctgattttgtctgccctggcacttcctgtgtctggctcagcaccgagacgttgctaggtgagggagatgaggctgagactggtgggctcgggggagaatggctgagagccagggttgtggagggtctgccacatgggggaccatgcctcacaggttcaaggcatccctggcccctggctccctcctactctccttcagctgtttgcctgctgggtgactcagctatgggctaccaagtcattttgcccttttctgctgggatctgcgtgctgagtctctgactggtaacatgctgtggtttggcagcatgcttgggagttgacatcatttctgggtgcaagtctggctttttctccctggtgcagggtgaacatgggattaggggagacaagaatgtctgctttttcgtccagacatgctgccttgctcttgcagctgaacagaccccagctgtatttgtaagttaagcccttaaatcctgtgccctaaaggtggaggtgccatttcatctccgagaagtggagaaagattgtgcagtgatgctgaggtacaggagagagctgatgaggaatagaatgatcagttgtttgtaagcaatctcctctcttctggctctctttagcaaaagtttttattattaactctcctttcaccactgcggatggcagacatacctgacggcaaaactgaagcataccctgacagtgaccctgtggggcagacacacctgaatgtgtgtttggagttttgagctaaggaatccgggagtggccaacctggagattcattccttgtttatgaggaacatctgagcccctatcctgtcccgtggaacactgggcatacagatgagcgaggccctttgttttgggttaaatgaaggttgccccgtggaggctgttagaggatgctaggtggaaactctatttataaaccacaggcttcaagcagttgcagttttcctgcccagtccactgccactgggccatccctgtgtacaggtttcccactcgtaagcccctgtgtctcatttgctggctctgggtctccttcagcttcttggacctggtgccgtccctgtaggagttcattaggggtctggcatgatccagttcatcactggaaaatggttctgaatgtaggcggtaatgtttgtgattgtctaggttgaagtccggggcagtctacctgtttaggcaagatgcaggattaggcatctgaggttctcttattcattgcattttggatcttctggagctcctcctggctggttattttaatgctctataccttagccaaccacttacagaactgttttgataggccactgacttctggtgtagacgttgggggtgaaggatgtttgacagatgggacggagatggatttatgtttgtgaaatgttggggaaacccgaggcaatacctggagcccagaagagtgggctcaccgtatgtccacagctctatcagtgcccctaaggtgattggaaactgcttgctgacctgcctggttaaggaacgaactcgggttccaccagaaacgtgctgagagatttccgtccaccttcatggaattcacagaacaaatgacaagattttaatccaggtcttggtattcctagggtgccagaggtgaaactgagaaaattttgctctcaattatttggcgagtttgtaggtagagaataatacgagctcctggagggctggaatctggaggcatttcagcaagggtttagaaagggtgggtgatggtgactagggatacagcacgttgctcagctctgggctgagaggtggttagttcagcctgacgacccagcagagcacctcctggtcattctgccggccctttatctggtgaggtagggcaaggagggagttggagtgaggaaaaatgcctaagtcaagggaatagagggagggcaagataagagatggcccttgtgcgagaactgtctgcattgctcactctttggagattgatgctttctccattttacagtttttagggggatgttcttactggcaaaggaggaaaacagctgtaaagtgagcagtttttttttcccccgtgtgttaagggaatttattttccttttcattctttgttcctccttggctcacccctgctcaggacataacttttgcagaaatgaggattttgctgcagcctgaatctcctgggttggatctcttagagcaattaataacttgttattcatgtgttcggggcacagccctttgtactcagtggtgcgtccgtcatgctgtttgtgctattggggaccactaagagtgctctagaaagttggtgtgggcagtgctgagctttggagtcatggagtggctcaggtgtcagccctgccacttacctgtgtgcccttagacaagtacctttctatgtctctgttactcctctacgagatggagtttatcacagggtttactgcatgaagctgtcacaagggttcaacaagatgttgcctggtgagcacttaacccacaccaggcacgtagggagaaagagctcagtagagtgtgtgtgggaggggtcttcttccatcccagggagggaggtatttcacctgggaaggtcctggctgggagctgtcttctaccccttctttatgcagcgggctctaagccagcatctggcaccgccctttccaaaccagtgcacactctccccatagggaaggggcctggcctgctggggcatgcttagtttctgtattttaagagctccctcatctgatgaccggtactaattaccgaatttcacaaatgaaatatgtgcagggtgaaggaatatgcctgttgattgcactcgaattactgcagtaaaattaaatttcaaggactgcaggagcctaagatccttctgctgtcctccacttcccccatcttaattggttttccttgccatctgtctttcttgcctttactcccccataactgccagcccgcactgttaaccagcggttttcaatctggctgtacgttaggaacacctggggaaaactttgagctgtagatgcctatcacccaccctagactgattcagtcagaatgtctggctgtggggcccaagtgtgttttagaaaaagctccccatgtgtgaatgactctcacgcagtcaggtctggggacagctggttaggaaggcgtcgctgagagtctccatcttttgggagtaactgctgatggtcatggagcccttgaatatctgtttggactttttgagggctctgagcttgagcttggtcttctcttttggaatacttgggtgtttgctttaatattcagagttaaatattgatgggcatataatgaaatgcctactggattactggacgatgcttttagctatgagtacttactctggaagctctgagaataataaaaacgatgaacagcagatattaagtgacagtttagaacagaagaaaaatacaagttttcttacaggctcttggctaaatgaatatgggggtggactggggtattcagtagttgagcaatcctggattctatttttccatatttgcatctccccccgcccccaatgtttttgctttatttaacaatttttggggtaaaaaccatgtaacataaagtttactgtcttaaccatttttaagtgtacagttttgtagtgttaagtgtagtcctgttgtgaaactttgtcatcttgcagatctggaactctgtatccattaaacagtaactcccattctcaccagcccctggcacccaccattctgctttctgcctctgtgcacttgacacctctaggtgcttcatgtaagtggaatcttgtaatatttgtccttttctgattggcttgttttcactagcatgatgtcttcaagattcatctctgttgttctgtgtgacagggttttttttttaattcatttttattgaggtgaaattcatgtaacataaaattagccattgtaaagtatacagttcagtgacatttactacagttgtacagctaccacttctgtctagtttttttttttttttctttgagacagagtcttgctctgtcacccaggctggagtgcagtggcgctatctcggctcagtgcaagctccgctacccaggttcaccccattctcctgcctcagcctcccaagtggctgggactataggggcctgccaccatgcctggctaatttttcatagttttagtacagacggggtttcattgtgttggccaggctggtcttgatctcctgacctcatgatccacctgcctcagccttccaaagtgctgggattacaggtgtgagccaccgcgcccggccacttctgtctagttttaaaacattttcatccaaatggaaaccctatgcccattaagcagttgttccccatttcctcatctccccagtccctggcaaccactagtgtactttctgcgtctgtggatttatccattctagatatttcgtataaattgactcaagcactgtgtgtcctttagtgtctgagttcttccacttgccatagtttttgaggttcattcaggtagtggcatgtatcaactttcccccccgacagtttttattatggtaaaatacatataacaaaactgaccattttaaccatttctttctttctttttttttttttttgagatggagtcgctctgtggcccaggatggagtgcaatggtgtgatctcgcctcacagcaacctccgcctcccgggttcaagcgattcttctgccttagcctcctgagtagctgggactacaggtgcacaccaccatgcccggctgttttttgcgtgtgtgtgtgtgtgtttttagtggagatggggtttcgccatgttggccaggctggtcttgacctcaagtgatgtgcccacctcggcctcccaaagtgctgggattacaggtgtgagccgcagtgcccataaccatttctaagtgaacagttcagtgacattgtgttcacattgttaccaccatccgtctttagaactcttttcatctagcaaaactgatactctgtacccaaaaaacagtaactctccattctccctccctgcagccactggcggccagggttctaccttctgtctctgtgaatttgactcttctaggtagctcatgtaagtggagtcattcagtatttatccttttgaattggcttatttcacttagcataatacctacaaggtttatccatgtagcatgtgacaggatttcctttctttttaaagctgggtaatagttcattctatggacatacaacgttgtgtttatacattacgctgctaacacgtgcaacacatttgctattcatcctactgtgaacacaggtgtgcacatttcccttcgagaccctgcttttcattcttttgggagtacacctggtggaactgctggatcatatgggagttctgttttttaatatactgaggaacctccatactgctttccacagtgactacaccaattttacattcccaccaactgtacacaagggttccagtttctccacatcctcaccaatacttgttattttctgttgtttgatagtagccatcctaatggatatgaagtggtatcttgtgattttgattatcatcttttttttggatgagggaaagtttgaccccatatgtgggtgtctgtcaccaagatagaatgaatgtaatttccaaggaaaaataatcccaggcaacctcttctggattatgtcccaactgattggaaatgctgggaactttctgtggttgaaggaccttgacatttgttgtcaaactgcctgtgagtcacttatcttctgggggaaaataaacataaccgtgtcttccagtctgaagtggggtgggtgggtgatatgaagcattgcacacagcagagcctgctgcccctccacagcctctgcaaatgccgtgtgaaggtggtggacctgctaccagaactggtgtcctgctgtctctgtagttaactcttaggagaaataacggttgtgtgtgtggaggtgaagaatgggaagggaaggaggggtggggagggctggtgcttctgaggttcccaaagttcctggactcgaattttctgttggcaaataagctggtcagaacttaggaatgtggtaagttgatccaggaagaagttgaaggtttctatctgtgtttttctgtgcggttgtgtatgtgtaacacgtttgcagaaatagttgaagcttattattttcttcaaaagatcttattttctagtgtgtaaatcacaggtaattaaatatgagttaaagtaagagagagacccttgggctatctcagacttagctttgagagagagaatgatcatgggtctaaggcatcactcttggttttataggtttggaaactcaatgttattagttccatctaggagttatcaatgggggattggggtttacatgcatcagaattgtaagatactgctaagaatgacagttcattaattgatgagaactgtgcctcgctgagaaagccagcactcctggggtgtgtgtactccgcagaccttttcttttgtttgtttctttctttctttttttttttgagacggaatctctgttgcccaggctggagtacagtggcacgatctcagctcactgcagcctccgcctcctgggttcaatctattctcctgcctcagcctcccaagtagctgggattacaggtgtgtgtcaccacatactaattttttgtattttttttttttttagtagagacagggtttcaccgtgttggccaggatggtcttgatctcctgaccttgtgatacggccaccttggcctcccaaagtgctgggattacaggtgtgagccattgtgcccggtcctcagcaaaccttttctatcggcctatttctatctattttctatcggccaccttttctattggcctatttccatctgtctgaggaatcttgatgcatcggccttctcgttctggggatctttctgtgtatagaatcaataccctctccttagggtagtgatggagattgatttttcaaaaatcccaacatgtaatttatgaaattattgtttcagctccagactctgtgctctgttctgcagtgttggagctaggaccgcacatcccagctgctttgccagtggcttccgggccacctccatcagcaggaggcggtagaagcaccagcaagatggggctttggtccttcctgttggcttcctgttgccccagctgtagctgttgaattcagtcttcagttatcccagcactggccagccagcctcatcgtccacactccctgcagatcccaccactcctccaaggaagtctctacctcagggccctttggctacgcttctaaggttaagtctaaccggttccctcaggcctaggggtggtggctgcttcctgtcgttgctacttccctgatatctagaattttcctttttctacccagttacctggttactgactttctacccagttaacaatttatattaaagcccttctgttcaaaaagcttatgtagtttctgcgttctaattggatcctgactaatacatctgactttcaacattctttagtaatcagtcagcaaaatgatttcatgagatagacgtattatatttaattggattacagttcaccttatattcctttagttttttttttttttttttttgcactgatctttctgattttcgttaggctcgtctatgtaatttgagacataactcctctcattagctactttctaaatcatcagacttgagttctttcctggaaagatcaccacagatggctaatgtcattcattttgttggctcttttggctttatagtagagggtgacaattcttttgtttttggtttttttttttgagctggggtcttgcatgacctcactgcaacctctgcctcccgggttcaaatgattcttctgcctcagcctcctaagtagctgggattacaggcacgcgccaccaagcctggctagtttttgtatttttagtagagatggggtttcaccatgttggccaggctgatctcgaactcctgacctcaggtgatctgcctgcctcggcctcccaaagtgctgggattacaggtgtgagccaccgcacctggccaagggtgacatttctaaaccttatctctaaattctgtgtccattattcagtattcctttaacttgtagagcatggctattacgtgtttaagcaacatatatctctaaaaagattcgaggccgcttataagagaaagtatattatgtgtaagcacagattcattaaaataagagtttaaaaatctggggtcaaatttagggggtagaggggatgagggataaaaaggtgaaggaaaaaagaagtggatggagaattaaagaatgaaggagaattaacactgaacacccacccccatggagccggatcctggctaggtgtttgccatctgtgtttagtttaatgctcagcataatcctgcgtggcaggtatgttacccccatctataggtcaagaacctgaaacccaaagtgctggccgattgtgctctagtccccctatacatttcagcttacgtctactgacactaagccaaggggagctccttcagttgaacgtgcaattgtatcttggtagccaaagcaagaaaggaagcatgttgggttgcatagttctcatttgataatacaatgaaacattttcttgagagagagaaacattttcttagccttcaagcttgataagaatctagtggatattaacttaaagggcactgaacatgataatagtgtccgtcagggggagaaataacagaaaccaaaagcagagatgcacacgtggccgtttatttaaatcaaacctgaagcagaaggaggagcattagatcacagttgtgtaaaggcaattctaggagaaaacgatggactgtagctagctttctgcagtcctgacctggccaagggtaaaactagatcggctgcgggctgtgttccctgggcttcctgctgcttcactcctgggaggcagcacagagtggttgttacggggaaggttttcataagtgctgtgaatccaccctgggccgtttactggccttgcacatgtgggcaaggtacggtcaagctcagcatgatgacattttagccaatgacagatcgaatacccaatggtggtctcataagattatatactgtatttttactgtacctctgtgtttagatacacaaatactattatgttatagttgcatacagtattcagtacagtaacaagcagtccaggtttgcagcctaggtgtgtagtaggctataccacctcgttttgtgtaagtgcatgctatcatgttgccacaataatgaaatcacctaagggcacatttctcagaaggtatccctgtcattaagcaacacatgacagtacttaatctctctaagccttagcttcatcccttcttaaatgagggtaataatactgtttcgtccacctgtgtgtgtgtgtttgagatagggtctcgctctgttgcccaggctggaatgcagtggcacaaacatcactgcaacctcgatctcctgggctcaagcaatcctcctgcctcagcatcctgagtagctaagaatacaggtgtgtgccaccatgctggctaatttttttttttttttttttttttttttggtagagattgggttttgctatgttgctcagggtggtgtcaaactcctggcttcaagtgatcctcccaccttggcctcttaaaatgctgggattacaggcatgagccaccatgcctggccttatttttatatatttaagaacatatgctttcggccggggtggcagctcatgcctgtaatcccagcactttgggaggtcgaggcgggtgggaggcgggtggattacctgagctcaggagtttgagaccagcctggccaacatagtgaaacccccctctctactaaaaatacaaaaaaattagccaggcgtggtagcaggcacctgtaatcccagctacttgggaggctgaggcaggagaatcacttgaacccgggaggcggaggttgcagtgagctgagactgcatcactgcactccagcctgggcaacaagaatgaaactccgtctcaaacaaaaacaaaaacaccatatgctttcccaacacatctggacagctgatattaaaaaagggtgtatgtagtagaattaaaactattacaagagaaacagagccagacagtttggggaagggagaaaacagagaggttgtgggggcacttaccttgaatcttcttaggtcccttgtgtgttgttttgcctaatccttcccacacgtctgcaaagaggatgatctccccacgtagagacaggaagcggattccgatacctcgccttccctgtgttagatgtgccgtagctcctactgagggtgaggattaattggagatgatgcaagtggacctctaagcacgggccgcgatgatgtcgtagttcacggtcacaggactgtcactgctgttacaaactggcccttctgctccgagtctgctggtcctcatacggttcctttctgtctctggttgtgttggttaagacagagtagctgcaatcagggagagtgtcgaccctgaccccaacaagcagggagagctagtgcagaatgtgggcagtggcagcagacccgcggggctgtgacactgtcctttctgtggcttgggtggacttcagggtgacccatctagcagagtaaaaatagtaaccccacatgctgaccatgtaccccctgctttcacgcacttttatgggtgaattcacctatccgttatagaaactccatgaggcgtttttattatccccattttacagatgaagctgtcagggagagaggttgagttgccggcagtctcacatgtagaagtggtgaagtgggaattcagacccacccctgcgggctcctcagccaggcctgctcttagcatcccagtgtgctgctctgtgacgagccccagtattgggatccactctccagatgaggtttgaagagttccgaagtggaacgtctttctgggttggctggctgtagaggggttggtgactccagtgtcctgtggtggtagacagtctccagccaagggcatgtacttctcacctccctgcctcgtgaatctggtcagtctggtgtcaaacttgaaccagtagactgctgtggatgtgacactgggcgtggtgcaggctctgtccttgaggggcctggtagccccacctgggtcccctggggcccaactgccatgctagaagacgtccaggctgctctgctggagaaagaaaccgtgtggggttgcctggagggtgagacatgttggaggggagggagggagaggccaaggcctcagacaggtgagagagccccagccgcgaggcacctgtggtctcaccatgggacataagaacttgtttaagccatgacgttttgggagggcttttgtgcaggaatggcacccggaactcctgcttcccatgaacccagggctgtgggcctggctgctgggagtgagccatttgctgggccagggatttgccctgctgcagggacttttctaacccagccgggccaggctcacctgggggcccttttgattttgagaggacgcatacctcagcctgcattttggtgtcctcttgctagcacctgccagctgaggttgagccatggtggacaatttttccttttaagacgattctagttactgaaccaaagatattaattatgtgcttatctgtggtaattacaactaaagcattctttatcactgcagcttagtcatttgcttacgtgatttaaatgtgatatatgttaatatgcatatctcgtcaaagggagtcatgggggtggcatggttagagcatgctggctgagggcaggaggccagaggtgtctgcgtctccctcgtccatctcgttctcccctcccgccttccttcccctttcccctctctcccttctttctgtcccaccaggatttctttaaggtttgtgtttcatcaccatcatcctgtttgaaagtttttttttgttgttaatccatcagtctttctcaattcataattaatttcttccaacctccctccctgctcccatccttggcagcctgggggcagcaggttgggaactaccaccaatgttgcaccttcttaatattcttttatgtatctcttctcaaagatagaattagtttggtctgaattatacatacaatcatagaatcaaagtgacttgaaacttagaaggtgcattttcttttagggtttaattcactcagaggtcctccaacccagcctctcattcagtaaagacttcccttcagcaacagatggtaaatagattctgcagaatgagtaattccttcatttctgtctgaatggtttgtttagaagcaaacacaatgattccctctccttattaaatttgttgggagaacatcaggatcatactaagttactgtccaaagctacaactgtgaagagggggtgcacggtgacaaaaaagagaaatgtcgcttgacatttcagaattcaggcccagtatcatcggtgccctcataacattacacgccaaaccctttaataaaactgtcaatccagattgttaaaacactgagcggtttgctcaggagatagaatatttatcatactgaggttcccagtttttaatgagccaaatatatttccttatttttttcatgatctttaatttatcaacttaaccatttttaagtgtacaggtaagtggtattaagtacattcatattattgtgcagccatgtccaccgtacatccacggagctctttcaacttgcagaactgagactctgtgcccattaaacacaactcccactccccactctcccagctcctggcaaccaccattctactttctgtctccgaatctgactactctagatacttctattagtggaatcatacagtatttgtccttttgtgactggctcatttcacttaacataatgtcctcaagattcatccctgttagagcgtgtgtcggaattgccttttgaaggctgagtaatattccattttggaggctgagtaatatgtacatgtgcacattttgtatatccatttatctgtcagctgacttttgggttgtttccgctttctggatatcatgactagtaatgctgttcctcacattttaacattcaaatgacacatcataatttcatttattcttgatatctcaggaaaattttaaataccgtttaatagtggagaattatggtaacacgcaccaaatgtacattatatttttaattgcttggcaatttgggacaacttacaaattctgtctttaggtttggtcgctatacaacagataatgctgctatttctgctttagtttcagggatcaaaatgagttaatacgtatgaatgtcctttgtaaagagagaatgtaaatgtttgtcgatagaaccagaatacattctgaactttcttgcttgtattctgggtaggtagacatttaaagtagagatttggcataacttagttcttccagaaacttcaagcactttacactcactctttttagcccaggtttgaattatgtggggtcattcatggggtttatgaggtttgaagacatacttaaataacatgtgggttctctagaatgaatgtggaaggaaacattgtactcctgtggaatgctggcaccctaacaggagtgactttctcttttctctctcttttctccttttggtcaactctgtttgtatgtagtgtgagctctatactgtgggatagcattctttttagaatgcatgcatgtgaattgtgtagtgcagagatttgctatatccatttccagaatgtacatattgaacactgttttgcgaaaggcaggtctatgcaaactaccccaaagtccgaggaagctgagaggctgaaggaagagcctgacaaatcccgtttcttagaaagaaacatttaatagagacctacaagcagaagccgcatctgtgtctagggcagcggtaagacgagatgggggagccccacgccattaccccccagacccagggcttctatgccatagcggggagggaggagtggttccaaagggatacgtaggacaattgaagtaagataacatcaaggttgtttgatctgagggcaggatttactgtaagcacctgctcttacacaggaatagtagataaatgggaagtcttagaggccttcttggatagggggttaatcagaagccaacgtggcagattagcatccaagatggagttgctttagcctccacaagcactgactgtatgccaggagttgaccatgatgtgttatgaggcactggggaattcattcctatatgaatctgggtgattgacaagaaattctagtggaagtgacatgtaggttgagctgtgcattgagcgggctggtcacgtgcccccctttagatgttcccgatcgcgcggaatcacgacatgagaggatgagatcagagttctgtcagcttcatgtagccaaggactttcaagttcttccttgaggagttggccctccctagtctcctctgttacaccagtcattgctacgttagcagctttgcaaagtaggtatcacgctccatgtgctctgtgcctgctgttggcctgaagcattgtcatggccttgcccaggtttgctttccttaagggcaccatttggtcccttttgtcaaacccatttgcttacacaggctgctgcactatttctatgattgcaattccagagtttccgagtcccgggatgggggtgtctgatgttagtagcatgccatggtcagatgtcttggggaatctgggggtaagcatagttgaatacactctctgctgcaagtttctcaaaaatgtgaatacaccaatggtgtttcatgaatccaccaagaccatacagcactatagctttgcctggagagttttctctcctcagcaaagctctccacctgtcccaagctgtgattcccaagaaatgccagctgggaagcctggtttgagggtagcatatgctccattgccatggccaagtcagtacaagccttttagcaatggtgcgttccctcagaaggtttgctgtggcccatttagccatattttggctttggttcctggaagggaggtgtctgccttcttcctagtggtgtgctgcccaccaggcatgcccagtggctcatctgtctctgcagatagcttggctgaacccaaaagggctcagtccttcctgtgggcttgatgcctgtaggaagggccagtcttgtccccatgtctgcagtgtgccacagcctcctttccaatttgtttccattataggattatgagacctcctgactctaaggaactgttttatctggggcttggtgttgcgggcacagcacctgtgaatagttaatgacattttttattcccaaccaagacctaggctcctttagggcaagggccagtgttgatctgaggatatattcccagcttctcacacagtctgtggtgcagactaggagttccatagatcgttgaatgaatggtttaaaaaatgaagggatcaagtcctggaagtggttttaatttgctgtgactccaggtagcttgcttaaacactctatgttttctaaattttaaaatagagctaatatttctcaaatggctccataggacattggtgacactcagttctgcaccagctctttgcctggtaatgtgcaggatgggggatgcccagggtatctttttattccttttttttttttttttttttttttttgagatggagtctcgctctgttgcccaggctcccaggctggagtgcaatggcgcgacctcggctcactgcaaactccgcctccgggttcaagtgattctcctgcctcagcttcccgagtagctgggattacaggcacctgccaccacacccggctaatttttgtatttttagtagagacagggtttcaccatgctagtcaggctggtctcgaactcgccacctcaggcgatctgcccgcctcggcctcccaaagtgctgggattacaggcgtgagccacagcacccggcgtttttattcttaaaataatcctgtgaggcgtatgtagtgttcacctgattttgtaaatgtgtaggcacagggaaccgaataacttgctcaagatcacaaaggctttaagtttgagaagtgcagtgaaaatgcggggctgcttcactccaaagtcgatgtgtgtatatgtacatataagtgtatatgcatgtgtacatgtacatataaacaaaagtacacatttaggaagtgtatgggaaatatacatgtacacatgcgtatacagtcataaggacgtttcagttaacagtagactgcatatatcacagtggtcccgtaagattataatcttgtatttttactgtatcttttctattttagataacaaataccattgtgttacctacagtattcaggacagtcacatgctatacaggtttgtagcctagaagcagtaggctgtaccatctagcctaggtgtggagaaggctgtaccatttagttttgtgtaagtacactctgatcacacgagcaagaaatagcataatgatgcatttcttagaccagatctccattgttaagtgatgcatgactggatatacacatacacatatgtgtatgcctgtatagatgcgtgtattctacatactcctaaatgtgtcatatggcaagggtgcctcattgtaattctggctttttccataaatgttaaacaagcatcttctcccaccgccagtccttttcttccttcaaggggacagggcctctggagcttatgcccagctcctgtcggatgcccccgtgttctggtcactcgtgtgcccgtctcttcacactcagttttcccacccctgagcacctcaggtgccaaggtgtgtttgttgaactgaaattcttaagcctgctgagtacattctcagtttgtcaagacagataaacaaataccttttttagatgatttaaaagattcttgacacagtcccagtggtgttttaacaacttttcaggtcctgatcagccaaactctgggccaaaagtaaatgtttaataaacaacataagagtgatggaggaaaaatgtatcttaagtggaactgtgtgttctgtaaatctatgacagattactgttcctgcttttgttgtgtataattattcttgttcctcctgagaattgccctctctttcatcatgaaacgtataagatggcctcctcctctggtaatttggagcaattggcctgggagaggattgatgtgtagtaaggacagtccgtaggagagatttagtgggggcagtttccttatcttctattctgtccctttgccagacagaagcacaaaaagtagttggactgaaaatgctgcttcctaaaattagctctcctctttgttttccgaatggttttactggttgatgcgggcacaatttgcccttcttggggagccttctgcattgtgtaaagtgcaaagacacatctatcagagaagctaattttaggtgctagtaagttttaagggcatgcaaagctcaaaactttgcctgttctcttggaagaagatttttccctcctgaaaaacaagcttcctttcaaagtcagaaaaggggagcttagacgaagccccaggagggcaggtatgtcttgttcactgcagtctccagtgccttgcgagggcccggcatgctgagcgctcagtaacccttggcctaatgtacagtttttcattctgtgaatcaggaatagagcaacataaggggagcttctgcttgagacagcaatggcagcatcaaaataaacgtggcaattttggtcttcaagagtgaagttgtgtctctgaaattgtaagcccaaatggatcatttccttttttaggttttagaattccaggtttattttctggaagagcttgcagcagatgggcttctgtaggggaacgtttataccttgggggttccgtttcgagagtccttgatttattattgtttacaaatggtggttggaaattgttcattgatttgacataaagctgcccaggcttattgtaaaaacacctctgcatccaattagaatgacagacacttagtgtgatgactcaggacagttgatggccttaaaaaaaaagcgaacagattaaatcactctctgttttttcatagccattgatggaaacagattctgtggggtaaataacagagtcttgggtggtggaaaggttgaagatgtccagtagttgtggcagggcaaggatggaggactttttctttgcaggggcagtggagaggcggggccatgggtgaagactggagaatactcagaaggtagcatggacgagagtgttgtttgatgactctgcatgtgaccagtagtgacattttactcactgaggctcatattgaggttaagcccgaggtccattggccttgctgagatcgtgtttagaacacagcactgtgcagtaagagactcctataactctatcaaatttgcatttggaggaattgtaaagagcctctgttacctcctaggtgaggcagtccaggaaaacagttgctagaaggagctatctgcagaaatagacagttgtggtcctttcatgttttaataattgttccctggatttcaaggagtcagtccaaaatccccgtaatagattttagtaacgttcatggaatctcagtttgcacatcatgagacctttagtgtggtgtttactgtcttcaccttaatatactttgtatccatgagcaaccttgctacagtcatgcaaagatgattattttttattcagcaataattagccacagtgttgagcacccagatgccttcctgcagcagccccccttttctccccagccaacatctgcaactgtgaacagatttccatcttcagccttggtggttggaaagaaatgtaagtcacctttttttctggttggttctggggcagatgccaccaggctgcagaggcagtctgtgtctgtggggctcaccagggcatgagttctgctcccaggaaagagattcttgcaggattttgtctgtggttctaaggagacaagtaggtggcacacaaaaacagaaaatgaaagaacccatccctccaaaaccacacacacaaagccaaaaggaaaaaaaaaaagcacataattatcatgtaggcactgttgcagctaaccctgattttggcctcaattctgaaacaagttagctggtttagacaaaccccttattaggtaatggattgttattcattcctccccttctcctagtcatttactccgtgagagctgctcctacctgaccttccactgattttggtagcagcatctcccagagcgactgtttccttcttcagcagtgttccttactcagggtgtaagatcttaaccccacagagccccgtatcaggtttaattaactaattgattcagcttgtgcttactgagtgcgaggcagtcatgtgcttctgtttggtaaatggcttcattttccctctaactcctgagcgtcctgaagcttctcttatggttctctccaaaggagtcagcaggctggctctgcaagggtcagtaggttctggggtggtggggggccgagggaggcagggaggttggctctgtctttatttggcatagagctccccgaacagggtctctcctcctttctccaaaggttaatggaaccactatcttaaaaagctgaaatcttatcttctggggtatttgggtagagaaggctagggaatcccttttccatggtggtgcagtaggttctcagaaccagctggtgggcctcaaagagaggcggctgtattttagcctgataatcttgattcctggtttcctggctctgtagcatcagaaatgggaagctttaaaagccgtgccttgttggatgcaccgagtcataaaataaatgtgatgtgctgggtgggggaaatgcgggaggagggaaacaggtggttggagctgcttcgtgatggccgcccaccctggctctcctttcttaataggcttcagaaatcctggaatgcgtaattcaccagctcacagagttccacccatgtccccagtggcttcaaaatgtaaatgacatttgcagtgctgggaggtaggagggcgatcccgttccttccctggatctcagtcgcagaggtgctggctcatgtgcctgagtgcagcggctggcccgtcattactggtctttgcaggaagccactctgaaggcacctgggcccttgccaggctgagtcacagctgacttagggaaatgccacacaggacgcttgcagtccccccgttctaagcgtaggttttgcaactgcatactcggaaaatgaatcagagtgggggaaagtgtcagagaaacagcagaaatggaatgtaggcaggagggccacagtggcgctgtggattcagaccacaccttcggctctgtttggggcccttcctgtaaggagcgtactgatgccagaggctgggggtgtggaagggaagctgctgtgctgttagatccattctgctatttagccagccttccttttcccagctggcacagacaggatgtgttagagaggtgctcagacctcctttcagagcaactgaatcattctccaggagggacagggagtctgaaatgcaaacaggttcccagggttattgaagagcagccaaactgaacacccactgctctgtggactcaagctggttttagacattgtttggtcaggaccagagccgagctctggggcccactgggggctcttgtcgcaccatatcattgattctacaatgcacatttcccccgcctctcatgttttaacatgtctgaaatcaggatgcatcttccatggatggtgtttcagggtttcattgatcgtgtttttcttcctgagtggcacacaaaattaatggtgctccctagagttgatggtccctgcggttcagtgaaccgtgttgctcttgtgtaagctcctgtgggaacatagagtctctgtgtcccaccttcttcctcgcagtggtcagcacggatgaggtgggagttgcataaatgtcagcattcgaaagtgagggcgtctgtcggtgctgtctcactgtggggcttcagagaacgtgagcacctgtgtttgcattctccatcaaggttcatgtcctgttggctcataagcatgattatatccattatacaaactggggcacaggcacccagagagaagtcaaaagacttgttcaagatggacaactaggaagtggtggggacagaccagtcctgtctgatgccagatccagcgctgtatctgccagtcagcatgcacactttcatctctccagcctcttcccactcacctttactcaacatttctgggcctccatagtgattgtagtaattcggtaaagatgattcatttctttagtccggtcttcggacttgacttcttagaagcaggtcttgtgcaatagttgcatattaaccacttggtgacacagtgcatgagggtatgccaactctttttgctcatggccgtgcagtgcagaatttccaggcattgtccgctctgtttcctggacttcggagtgatagcaaagttttgtattccctgatcagctgtgtatctctgagcagcaagttgatctctctgtataagggtgactgtgcccatggaggatggcatgcaattgcctaaagatttcagtctgagaatctgagaaacgatactgaatggagatgacaggcttagtgcctgcttccaggagccatgcctcctcctggcctggaatgaatacctaaacacctgaggctctgagttccggcagtgtgctgaaactgctgttggtctggcccactgacccggaaacccagccacctgaggttgtgactttagggcttctagttttgtatttagctttaattccatctgtgaggcagtggagactgttcattttattttacatcaaaggcttttggaggttgagatgggaacaggatgatagaacagtaatgcataattatggagcatttgctgtatggcaggcattcgtaagagtgcatttgttgatattattgtttggcctctcctgtcattagccctaagcagctacacttgctaagctctgtgctaaggctgcagtaagcaggcaggcagtgcgtgctggtgagcttgggcagtgctggagtgtgtcttgcccagtgtggggatgaacatacaccctttcatgctcacaggtgccttagcctggatgataatgtttaagttcattctgtttatatgcaccgtgtcattaaacaatgctgtgaaaagggcactattatttcccccatattttcagtgataaggcagaggcccatgggctccttgtagcaatggaggcattccttgaggatccaggcaatctgactcccgagtcccggggctggacagaaggaagctggctccgagagctagactgcagtgcagaggaattccacgctccgcaggtgctgtcttcagaagttgcatctcgtcagcaggatgagtgcttttggaatagacaatcttaaatgtcatagtgaggtgacttgcagagataaggaaggacgccagcctcaggcactgactgatgaatccagatggtgacttcctccttgcaggagaatcagccacttacacagactgggagggattctactgagggaaaaaatgaattcgcagccagggacagtggctcatgcctgtaattccagcactttaggaggctgaggaggcaggaggatcacttgagcccaggagttcgagaccagcctgggcaacagagcaagatcctgtctctacaaaaacagaacaaaccaacaattagccaagtgtggtggcacacacctgtagtcccacctactcgggaggctgagacgggagcattgcttaagcctaggagtttgaggctgcagtgagctatgattgtgccactgtactccaacctgggtgacagagcaagaatgttaaaaaaaaaaaattctcatttcttctcatggactttgtgtgtgtgtgtgtgtgtgtgtgtgtgtgtgtggttggttggttggtttaagccatggattaaagaaaggagaactatttcctgtgactaaaagtggtttacatattggtgctttagcaggaattttggagggtggcttaagtgaataattaaaacagaaatcttcctagacgatgtttatcacactcaagacattaaaaattagagtcaagggactgctaagacttggggtgctggtgggtgaggctgcctttcagggaggccatgctgtgagttgagaatcctaggccaccttgcctgcactgccagctttgcagctgtgggcacatctggatccccatttctgtgcgggtgcagacaggtgaatgttacctgcgtgcatcataaaatgctgtgaaaggggtcacaggtattgcccaggcttgggcagactcattcatagggctcactggcttgcatgagaagggatgctgggcacggtaaacacagaaggagaaggcaggctctgctgccaggagcttgcaccctgagccacgtggaactggtttgcctgtgaagcaataggcacagtcctgaaagagcacagtcctgaaagagcacttctaattgggcatacaagcaagctcataataaagttctcctaggaagttttcctcatgttttgaagatgatacacttagtccctgactggggatggtttcgcttacactttttcaactttacgatggtgtgaaagtgatacacgttcagtacgttcctcaattaacaatgaagctatgtcccgataaacccatcataagttgaaaatatcctaagtccataatgcacttctgatataatggtattttcaacttacagtggctttaccaagatgtggcgcattgtaagtcgaggagcatccatccctgatgggatatataaggatgagatttatgcacagatgttcctcagcttatgatgggatcatgtcccagtaaagacactgtaagttggaaacatctgaagtcgaaaatgcatttgatatacctaagctatcaagcatcatagcttagcctcacctgccttcattgtgctcagagcacttaaacgttagcctgcaattgggcaagtcatatccaaacaatgctgacagcaccgcacactgtagggtatcagttgtttaacttcgtgaccgtgtggctgactgagagctgtgaatcactgacattgcccggcattgtcagagactatccgaccgcatatcgctagcccaggataagagcagaattccagatttgaagtacagtttctactgaaggcatattgctttcgcaccatcgtgaagtcagaattgttaagtcgagccatggtaagttggagaccatctgaataacaggatgagatgtagagcaggatatatatgttagaaacaaagtttcgcgaacagtgcaaacgttttctagatggactatcctactcttctctatctcattaaacactttgctggcagcaactcactgagttgaattcccgctccaccagtagcctcccctgggcgttggaaggctctgccctctgatgggggtctccctgggagctgcggctgcggacccccgtagatgggatgcagctgcccagtgtggtccttgcctttgcaggtgagcgggtgcagggaggtgcggggtggggtggcggctgcagcagtggtggttgggggccctgcaggctccctcggggtgtagcagggacatggtgtggtggttaacaggagtaggccactcatgtgggacgtcaggactagtgccacaaaggcagccctgtcacacgaacaggttcttgggggacagaggtctgtctgggactggctaatgacctggaaagactggagaggcaccattgtccaccaccagatgtatggctgcagggtaggagtagacttaagaaggaacactgttggctgggcgcagtggctcacgcatgtaatcccagcacttcgggaggccgaggcaggtggatcacctgaggtcagaagttcaagaacagcctggtcaacatggtgaaaccccatctctactaaatatacaaaaattagctgggcgtggtggcaggtgcctgtaatcccagctactctggaggctgaggcagaagaatcacttgaacctgggaggcggaggtcgcagtgagttgagagatcacgccattgccctccagcctgggcaacaagagcgaaacttcgtctccaaaaaaaaaaaaaagaaggaacactgttagggaggcagtcagtgagcctcaagtcagaaagacaaacaagctcattttatgcatttgctaacatttgacctcttctgggacgcgtaggtctctcaagttctgtttctgtttcctgtcacgcagatcagagatgtgaaacagacctggtgtacacccgtctggggtagcactgggagccacggcgtcctggcagagcaggtgtgcctcccacaggctgatgcagccgttctctgtgcagaggctgagccatcctaggagcagctgtggggtgaaagtgtccttccttaaacttagtgctcctgctcattctctcagtatggctaatagctcatttaaatatactatggtggtttttaatttttgtgactcattccctcccctcctcacctgtgtttttcctgtgtgtcagggacattttagggggaccaaaaggatctctgtctctgctctgtgcttgctctgaggttgaatagagaatgttcagggctgttcttatttgagtcactggagctgttgtgagctctgacggcctgggagccccactactgtcacatgaggacagggcgtggggtggctcaagcatggccgcttggggttgggtcctagtgctgtcatgttggaggtgtctgacctttgcactaagtttccccacttacactaaatggggataatcaaagctttgtgtggggattaagtgagttaatgtaaccagaacacttagaatggtgtgctgcatacagtgataatgcagaactactcactgctgctggagtgcgctgttatattctttattaggtcctcagactttttctatgcctaagccttgagggtctctctcagctgtgcttttctgttttttttttttttgtcttcaatagatttttctagggtcttttctggtaaaaagagactgggaatgcaaatacattgagcatgagttgagaggagtttggacatcagcctgaccgtggaaaactggggaggcgtggagtatatagtttcctctgggtgggttactgacagaccatgggagttctggggaaaatgtatgctcttctctttaagtacaagccaccattgccaggcagaagctgataaagtaattagaattgttgttcatacctgacttgcaggaatgtgtgtgcgtgtgtctgcatgcgtgtgtacgtatatatactgtgcatgcatatttgtgtgtgtgtacatacatatgtacacactgcatgtgtctgcatttatgtacatatgggcatgtggcatgggcatatggcacatgcgtatctgtgcatgcacacatgtacacagcacacatgcacacatgcagtgcatagtatgcctgcatgtacatgtgcgtaccatgcatgcatgtacctacacgtgtgcatactaatttgtgcacacgtgcacactgcaatgtgtacttacatgcaagcctacgatatgtgtttgcaggcacatacatgttcacacactgcccatgcacatttgcatacacatgtgtgcatggaacatatgcagtacaacacaagtgtgtttgcatacatgtacaaacacacatgtgtatttacctacatttcaaggtgaaccctccccagaaggctctgctcaatgagactctgaaagtgttcaaaagcatggtctgagaaagcatccctccttcagggcatgtacccaagtagtctttctcttgctggctgaaatcatcagggattgtttccaagttttaacttctgattttcactcttttaaatcccagagccgatacttgaacagaagtaagtttgctgttacacctctcactttgattagcttgttgcgttaaattaattgtcagattgcctgaaaccaaagcttcttaaaatgaacactggttcactcgggaaatttttgcaagatcaaaaatggaagactgtgtcactgatgaaagggagagatagccagaatacaaaatctagagctttggacctgaaatctggctgcaagatggttttttcctgtcttacctaagaagtggcccccaggattcacataccagtagcctctttttgttattcttttttttttttttaaacatatccccttgttaaagatcctcttgattgcaagcaaaagcagcctactgtgcaggctggcttaagcagaaaagggaatttattgtggggacatggtggggaggtgtctcattactgagaggaagaaggctggctggcctcagaaggcatgagaactgggacctgggtccagcccagtccatggtggccacagctggatctcagctctgctcctccaggccaggtggctgctttctcctctctctgcagtgggattttctctgcccaggactcatgtgtctacctgtgggtctaatctcctagcataggctgagcctgcacctccttgagaaaacagattagcttagcttagtctgagtgttcactccaggcgcaccctgagagggagtgcagcctgcacatggggtgggtagttcttaaagggagcctgcctccagaggcgccgggggagggggggggcctgcatttagagtgtgtgcgtggagcatgtagcttgttcctgttttcatggagtcgcagagatcagaaagcatttatgcctgtttctgacagagatgcacacagctggtctgaatgggcaggattggggtgagggcagtggaggagggatctggccacacaggcagtctgctgtgagggccacttcaagccactcttcccttgctgagctgtgattcgttcttttccaagtgacttaaacagaggccttttctcttgtttgtggggatgaggatggcgaagggaggaggagggagagggtggctgagtggaggaagcgcagttgtgctgcggagattcctgctctgcagcttgtctgctgtggattggcccagggggtaggtggcacagtgtgtgtggcaggggggtgggggggaccaggcctggctccgctggtccactcttgggctgtgagccaggacaaaatcttataccaagcaagcatcttttccagtaaaatagagtgtctccatgcccttaggaactgcctgggacagcctcattctgtcctggattttgttctgggctctgctgcctgttgagcgtggaccagtgacctcgtaactgtggcagaggtgaaggtctcagcaccttctgtgtgccctcttgcatgtgtgtttgccagcatgcttggggctttcttcaggtgtttctggcctgaggaagtgtcttacccccatgttatttgtgtggctgcacagcatctggagggagggatagagccccagcgctgggcacatcggatctgtgctctgaacagctctgttgatgccagagctgcctgacttgctctgtgtggtgctgtgaaggtcaggcttggagagtgaggagctgctgaaaaagggtgagttttgttctcttcttccagggctcagtcttccttgtaccagtttctttctctgttcttctctccttgactcaggaatccagtttgcgcagcacttacatggcgggcaaactccagtttatacctggagctgcagggcggagctgctgtcagctgggagctgttattgaggaacagctgtggtagaggtggataagaagaagacctgaccccacctgctggggcaagaagcctgcatagcacagctaaacagccatgtgggacaacggctgagcaatgacagtggaacccagtgtcccatgcaaagtgctcaagaagtggacgggatggatcgctgctgagtggctcttgaggagctcagagtatcttggggctgatgttgcctgttgggactttccccagcacagacagcgtgcgggatttcagatgctcttctccttgccttcagaagcccagggagtgttggcagcttgtttgcacctgatcagataaaagaggtcatgatctctgtgaaggtcttttcggggaaggggtcactggccttgccaaatgtgggaagcgaggcctcttcccagttctgcctgtgactcaatggctgtggctcagggcaagtcattggatttgttttttgttttttttttcagaataacgtcagcatgtgctgagcatctgactcacggggtgaggcagtgaatgaaggacttcatctccgtgaagtgcttgacgtgatagaatgaaaacccttgcgttcccagccttggctgtcagagtctcattttaaggaaagccgtttttgacgtgtgtttcctttcagttcggagctggcttctgttaggacagggggtttctgcccacttagctgtgtctctggtaatctgagattcttggaaacgggccacagtgattcctctggccacattcagggtcaggttttcagttcgtcttcctggtgtttccgcgcctcattctagggggaggtttagtcgttcctttctctgctgtcccccagtagcttccggccattccttgtgaaggaatcttcctaagtcaattttccctggtgaagactgagccctggaagaagagaacaaatctcatcctttgtcacttgggaatttcactggcgaaattcagtgaggcacttgaggtttgtaaatgggcagacgtttcccacacgattacgtctgtatgttggaaagatatttctaagttgtagtgaggtaggagggattctcagcgagaggaggggcttgggctgaacccggcactgctgggacatgaacaggggaaacagcgttggcggtggagcaggtagacattcccttgacctcgtaagtcctggatgccacccggcgaactggcctgcgggctggaaatgatgcagctgacccagtaaacgcactcagctcaccttttagtctggtccagaacgctgaattgagctcttggatcttggtgctaaatacgtggtgtggcattaatggcagtaaagatggatggttatgtaccatgtagaacgtgcaaatctgttttcaataggctttattttttagagcagttttgggttcacagcaaaattgagcagaaggtacagagagtgcctgtatacctgctaccccaacatccagcttcccctattagtttcccttcgcaagagttatagtccacaaacctacactgacacatccttaagtctcccaagtccacagcttacattagggttcactctttttttttttttttttaagatggagtctcactctgtcacccaggctggagtgcagtggcatgatctcggctcattgcaacctctgccacccgggttcaagcgattctcctgcctcagcctcctaagtaggtgggattacaagctcctgccaccacacccagctaatttttgtatttttagtagagacagggttttactatcttggccatgccggtcttgaactcctgaccttgtgatccacctgcctcggcctcccagagtgctgggattacaggagggttcactcttgcttttgtacattctatgggtttggacaaatgtacagacacacgtctgagaaaattgtgggtttgatttcaggccatcacataaagcaaatacggcagtaaagcaagtcacacacagtttttggtttcctagtgcatacaaagttatgtttacactgtattgccgtctgtgaatagggcagtagccttatgcctaaacaatgtacggatcttaattttaaaatattttattactgaaaaatgctaaggatcatctgagtttttagcaagtcgagtcatagtctttttgcccagatgttgatggctgctgactgatgacggtggtggtggttgaaggttgaggtggtggctgcgacagtttcttaaaagaagacaacaatgaaatttgccacattgatggactcttcctttcacaaaagatttctttgtagcatgcgttgctgtttagcattttgcccacagtaggacttctttcagaataggagtcagttccctcaaaccctgccacgtctttgtcaattaagtttattctgaatcctttgttgtaattttgacatgctcacagcatgttccctaggaatagattccatctcaggaaaccactttctttgctcttccatgtctttttccaggttctatcatgagtttgcagcaattcagtcacatctgtcgtctccacttctagttctcttggtgtttccaccacaactgcagttccttctccactctagtcttgaacccctcaaagtcatccatgaaggttggaatcagcttcttccacgctctggttagtgttgatattttgatcttttctgtgaatcacgaatgttcttaatggcaactgtaagggtgaattctttccagaaggatttcacttgactttgcccagatctataagaggagtcactatctatggcagttatagttttacaaaacatctttctttttttttttgagacagagtctcgctatgtcaccaggctggagtgcagtggcacgatctcggctcactgcaacctctgcatcccaggttcaaggaattctcccgcctcagcctcctgagtagctgggattgcaggcacacaccaccacgcccaactaatttttgtatttttagtagagacggggtttcaccatgttgggcaggatggtctcgatctcctgatctcgtgatctacctgcctcggcctcccaaagtgctgagattacaggcgtgagccactgtgcctggccacaaaatgtatttcttaaacaagacttaaaggttgaaattactgcttgatccatgggctgcagaatggctgttgtgttaccaggcatggaaacagtattcacctccttgtgcatctccatcagagctcttgggtgaccaggtgtgtcatcagtgatcagtagtagtcttttgacaggagtatatattttttttccgagcagtctcaacacggacttaaaatcttcagtaaaccgtgctgtaaacagatgtgctgtcatccatgttctgttgttccatttatagagcacaggcagagtagatttaacatcattcttaagggtgctaggagtttcggaatggtaaatgagcattggcatcaatgtaaagtcaccagctgtattagcctcttacaggagaatcagactgtcctttgaggctttgaagccaagcattggcatctcctccctagcaatgatagtcctagatggcatcttcttccaatagaaggctgctgtagggtagccaccttcatcagggatctcagttagatcttctgggtaacttgctgcagcttctccatcagcacttgctgcttcaccttgcacgtttatggtatggaggtggcttcttcccttaaacctcatgagtcaacctctcctagctttcagctcctcttctgcagcttcctcacacacggttagctttcatagaattgaggagagtaagggccttgctctggattaggctttggcttaagggaatgctgcagctcatttgatcttctatccagactgctcacaccttctccgtatcagcaataaggctgtttggctttcttatcgttcatgtgttcactggagtagcacttttaatttccttcaagaacttttcctttgcattcacactcagctaactggccttcctcactaagcttaatcattatcagcttttgatttaaggtgagagatgtgccgctcctcctttcacttgaacactcagaggccattgtaaggttaccaattggcctaatttcagtatcgtggtatcgcagggaatagggaggcttgaggagagggagggagatggcagaacagccagtgagtgggggagtcagaacacacaccatgtttatccattaagtttgccattttgtatggttcatggtgctccaaaatgattagtatcatcaaagaccactgatcacagatcaccataagatataatagtgacaaagtttgaaatattgtgagaatggccaaaatgtgacatatagacatgaagtgagcacacgctgttagaaaaaatggcagtgatagacttgctcgatgtagggttgccacagaccttcagtttgtaaaaaacacagtatctgaagcatatcagtgtgaagtgcagtgaagcaagatatacgtgtctgatgaaagcatccgcctcactctgttctgggcagtgtcatatggaatagcttcgctgcccttggaattgtctgtgtgctccctgttcatccctcccaaccccgataaccactgatctttttactgtctccatcactttgcctatcccagaatgttggaatcattcagtatgtagccttttcaaattggcttctttcacttagtcctatgtatttaaggttcttccatgtcttttcatgactggagagctcatttctttttagcactgaatactgttccgttgtctggatataccacagttaatccatttgcctagatgtgtccatcatgacaaaggacatcttggttgtttcacattgtagcaattatgaataaaggtgttaggaacatttgtatgcaggtttttgtgtggacataagttttcaactcctttggataaattccaacgagtgcgctcactggactgtatagaaagtgtatgtttagttttgtaagatcctgccaaactgtcttccaaagtgtgcaagcctattttttgaccagggcggttagtcacacatagcagccacatctgttgtggtgccttcctgggaggcccctctcttttatagtcccatcagtgccaccatctgcagggtcaccagagtccctgtagggccagaagcacaagtatggctggttccttatctccctggagccctggcttcttcccacctctctccagcctcaactattttttgcctttgccctacggggactggctgtcggttcttccccgcgtggctcctccccgcactgtctcggtgggagcatcgtccggccttcatgccctgtaagatgcggttcagatggcacctcctctgtgacgcccttcctctcatcctactagcccaattaaaaaaagttattatagtaaagttcaaatatatgtaagtagactcaatagtataatgaactctgcctgcccctcaccctgcctttatccgatcagcctatggtcagccctgtcctgtccatgaccaccctggaaatgggccccagaaatcatcttattttacctataaatattttagtgtgtgtctctaaaagatagtttgaactcacagtaccataaatcatacttaaaaacaattaacaagttccttaagggcatccatatttaattatcgctcaaatctccatttggttcctaaatgttatacctgtatttataatttttcttaattcaggatttatataaagttaccgactgtggttgattcatacaacctctggttcttggaaaatcggagttttcttttttccctctgcttttggtcatttcattgacttgtgcgtacaggtttttgtgaagggagctgggaatcgccttactgttttccagcctggattttgtggcttgcgtctccgtggggtagttttccatgttcctccgtgctctgtttcctgcaaatgtgaagtcgggtgtagagccttgatgagattcccatttgatttgtttcttcctctttgagggatgggcgaggctgctcgccacgtggggtctgtgctgcactcttggacctggaggcacagggcactgggtttctgtggtggaggcaaccattgatactcagtgtctgtatctcctagttctttaggctttcaacattgtaacattttaattctatctgcgagtgtaatttctttgctaggctgtttgtataaagagaactccccccacccccactatttgtttacctggtggtactgtccatgggggaaagataacacccatgtcagtttcttccttttatttatcagtttctagtcagtggtaaccagatagggctttttgcttgtttggttttatggcattatgtggacttacacatttgcatttcagcttattccagttattattattagggttcacattttcccagctttggtcagtgaaagctgcttgaggtgggccctacatcccattggcgtgattgtcatggcctttgaggaccgtgttgctgtatactgtggtaagattcccggggtcacattgtctgttcctgccccagacctggagtcagcctttcccagagagccctggttctctgtgctgggaagcgtttgcggttcgctattgggctcagggcggcctgctttcctgttcctcccctgtgccctcggcacctggccggagcatctccaagcgtctgccaccatacactgcagtcctcactagcctcttgcatgcgttgggggtgggggtgggggtgagtgggcggtgttaaaggctacacctgggattctccaggcctcagcagctggtgttgtaaggttacatagtaacagtgttaaccagcttgccctgtcttttctcaaagttccacccattcagttccaggggtccaggacgtgcctatcaggaacagcccttggatgcccttggatgcctgccttgtggatgtcatctgctcccatgtcagccatctccagggctcttcccgagaagagggcagtccccgccaagggtgttgcctctcaaacctgccaaactacaaaccctcttggtacctccacacatccctggagtcggctttggggaacactgtgttccatgtctaagtggagtcccgggcctctcccctccagtgtcgcctgtgccagctggacacgaagcagcagatcagtcatgaaaatggctgctcagctccgatctgcccttccttccgcaggactcagggacgcacagctccccagggctggtcacccaaacaacagcattcctttctcctcggcctctccccaggctgcttgggagagaaaacttccctcatcctcctccgcacacactaaatgccctgccggtatcttctttccagtgactgtggccccaggtcgtcacacatggccagacacagctgaatctcaggctagatcatgttggcactgcttccaccccttggataaaataaaattcccagtgacttccttaatattttgataggctgagtggcttatatgcaaactttgatgtaaacactaggccagaaattggttaactgtggtttaggactcctaatctttctccggatttattgaaaacatgtcttagaatggtacgcaccaagtggttctccctggtactgcatcctgctggccacgtaccctttcctgatgctcctctgaagggaggatgtttaacgcaatgatctccagccagtgtccaaatggcatagagccacttccttgttgacattccctgggatctggaggtcacttccagctctttcctcttttctgcaagagccatggtgctgcacctgcctgctgtgtgctggcacatgcctgtggggttgtgaaggctttgtatgggtccctggaccacacctgaggaggcgctgtcttagtcccgtggcgggcggtggggcaggctccctgcactggaggaagcaccagcaggcttttgtgcgtgaacagacaactctgttggctttcctgccctcccctgtttgccttcttgatttttcccttctctttttgtttctgtctccatcctggttgcattccctcactcccctcttctttgtccctgccaggtttctgatgggttacttctttgaggaggagaaccctaccaccattccagaatactcaaggcaaggtttgaggggagaattaggcggatgtccatttcacaaggctttgtttttgccgaggagaacatcagtgtctgcctttagtaggttgccatcatcataagcaataatagctgactgtaactcagggactgtgctgggaactttccatgcccacggagtcagtcccttcagcagccccaggaggatgagtgcttttgcataccccactttgcatagatcccaaaaaggggacattgggacattgggagcatcagtaacttgctcgaggtcacacagctagaagaggggaggagggatttagaatgtatttatttatcttataacgtttattttttgatatataaatttatatttccctttgtagtttatttaaatactgttatgctttttttttttttttttttcaagggacagggtcttactctgttgcccaggctagccttgaactcttgggctcaaccattcaagcctcagcctcccgactagctgggactgtgggtttagaatttgaatccagtgttcacccttcctcctgagcggtgctgtacattatgaacaggttgtttgccaggaactgggataatgccattttcctcataaacctttgccccgcaagcatgggtagacagacagctggtgctttccttggttatatttggcaaactatataaccaaaccaaacttgattatatttggctagtggaccagttcttttgtagttggttagaaaagaaaagatatcgctttcccttgaaagaattcattctccatgagattgaggttcagaaaatctgttaaataaatcccaagccctgaggcctccaaatcagtggctgctccgctgctcctctctctccctcgacctggtctctcagtgaccccctcatcttttcaaatcatagcatgttgggacaagtgttccagggaaggcctctgtcagtgtttagcttacatttcttgggtgtatctttttgacaaaattttccccccagggataaggaaaccagaaaaccacagtggatcagcgtgcaggaatgcataagggtggctctgtgtgtgtgtgtgtgtgcatgtacatacgtgtgtgtgtgtgttcatccgtgtgtgtgtgttttccttcagagcattttaaaggtctcagctattattaacatgaatttattatctatatttaggataagcccactaaggatgatttgggatgagctgtgaatctgtggtgtatatatagatctctgcacacgcgtatagtgcatatttatgtctgcacgtactcctgggcgttgacatctgcctgtggaatgcagacatctctgtgcagggttgtggcctgtcgtctcttgattggcagttgaagtgtcccgcatccccttgttattaataacttgcttggggctacattgagttggggatgtgcagtagtgatttatcaagacattgttataaagacacaaggctggttgtaatagtctaatcagaacaagtgtattcaaagtggcgagtttcaagcatgctgtttaggagacttcacacttattttcagcgttcagaacattgttgaacctctgcttttggcatcgtggtcacagctagtctatgagccttaggagaaattatacttgccatttggtgcccactgtgagtttctgaccaagaacaaaatttccaagcttgatcacctgccttattcgtgacgcttggctccaagtggttgttagctgtttccaaaaaacaaatgtgctttagaggatgaacattatgctgttgtctctgggggccaacccgttaggggagttccagaaatattttgaatgatgacagcatcatgggaataccaagggtctccccaggggactactttgaagaggggcacatgcaggttggtcatgtctttgtgtgagttccagggttcgaaaataactgacgtatactggttgtgtatgtctgtgtgtgtgttgcccgcacagctaagtttagacaccgagctttggagacctctgagagccgactccacctttgattttcagttgtctttcattttgtacccatttggtattgtcttgcttgagcctttgtggaaatagaccttgacttcatttcttaagtcttttttactttctacgattatggaaaggaaaaatatatattttatttagaaggcaacaggtgtacttatgttcttctcctatatgatgggtagtggaaatgttttaattgccttcttttgtctactttaacctcatgatcattgcctttgtttgctagtctctcagcatgcgtggttttgaaaatgacctgcacacttagcagatgtgatacagaaaccaaacccccgaaccacactgtcaggggactctaaaaatgtgaaaacacctggttttggtttcttagtcattctgtttatttggtgaactctgtagcttcaaacgtacagctttgaccacttaatgaaagcatgtggatagtgacgtgaggatgacctgaagatatgactccctgtcctttggactaagtggcctttaaaccagtcacgtgcctggctcaactttaaaaagaagtaaagacattgtcattagatctatacaatgtcaagaatattacccggcctggatttaggtggaaatgaattaagtgcaagtactgataggtactttctgggggttaattttattattttcttctctttaattttgatgtagacatggagacagcagagggagagacaccaattcttaagcatgttgtgtgctggtgtgttgcaaaacattgctgcaagagctgtctatcacccgcaagagcccttctgacctgatctgtggtcgtactggacttgtggcaagctggaatgtccccttgtcaccagtggcgtgttaatgttactaaaaagcaaggaaaatataattgagttctccctaaatctacctgtggcatgaaaaaatctctcaggttgcatcatgtccagaaataactatggtggggcctaatgggagtaattccctggctccaggtatttggaggaggcaggcagcacttctcattggagtgatttggaaccaaggcagtacattttcctgctgttcctgaacaatctgaagttttgcagatccttggagaaataaaagccacagtcttggaacctcccaccttcttttggcctgagtccttctcatgaattcagcaaccaaaatggagtcatggggacgggtgggacctgccgtgatggtcccacctgcattacccccatggcagactagggtggtgtggcctgtctgggaatgtggtctttctctctgagaacccagctatgtggttagtaactcaggattgtggccctgtggttactgtgcactaatcagccctccaaacactggaggagcacaccctggtgtctgcaccgctggctgttttcaagagtgttgttctcttccaccaaacagcctacactcagccctgcactcagattttgctttatttgttgatgaagctggaaagagtccatttgacgtgtaacctggtctccgctaagcggttgttctctattcttgtcaaatgtgaaggcttcccaagcctggttatgcattgttggctgccaaagagggccaagtgtttgaaagtgaataccagattagagaattcataaatgaagatgcaataacccatcacacaattagagtgcaggatccctttcccacaatcagagtaacagagatgggactaaggaagttgtacaggccagagaagggagggggctgtggggagaaagaaggaatagctggttagaatgtccctgtgtttctcaaattctgcagtttcctagcgacccctccctcaggagtgtagcgaggcctggctggtgtttgacagcgtcacatattttaaattaaaggcagagtgaataaggagagatgaaaggtttactgcgtttggatcgtgagtctttcagccaagatcgtgtcttaaattttgtatcttgtaatatcgtatctgtgggatttcgtcaataatgctgacaaaatctgaagttgtacaaagggatagtgggagtttctcatcagaggtcatagattttggtgggtaagagtgctgcttgcttagaggggttttggcagctgccttcaggcagtgagaaactgttaaggtaggaaggagaacagacaacttcggcttagatgagaaattgtgagcactttccaacagtgacatcccagtactctgtttaagtgaaaagctgaactctcttaaaactctcttgccatgcctcatgtcatcatttctccaggattggaatgtgtgccactcctagaaaggattattggcagagtttcaatgtctctctcctgtctttcttttcctctcttcattccatgtgaatatacgaaggaaggtggctccccacccagtgctcagaggttgggtggaggcagcacacagacaggtagtgacccttcaagcatggggaggccagagttcagaggacggtgtgtgggctacagccaaagaggagcgaggagcagggaggccttttggaacagaaaccctgagccacacttgaagaatgatgaggttccctagatgagtgtgtgggggcaggggtgtgggggcaaccccagcagagctgtggagatggtgatgggaacttcccagagcaggagtgtggggttgctgtgctaggagagggctgtaggaacacccagagtggagacacaggcagggccagttcggcgggggcaggcacccctctgcagaatgtggaaagggcctggtgatgagtatagctgagagagggcagccatgcactttttggggcccgctggggtgctctgagagggagggatggaaggttgcaagcctggattcttgagacctggagaccagggaacagagtgacctttgtcttatatcataagggggttgcagttgaggactaacggatgccgatgcctcgagagggtttggggtgtgggaagagaggcccccgcctccatcctgcctcgcgggtagaaacatgagcgggaatgagagtggttcagaaggccatcctcccgcaggcagcctcactcacgtacctcagtctctcctcggaaaagtgtgtgcatgggattgtaatatcgcatctatgggaaatgtcaatgttgacaaaatctaaagttgtacaaagggatggtgggagtttctcattggaggtcatagattttggtgggtaagagtgttccagcccgtataaccccacgtgcacactttgctgaggagagactgaggcacgccaaggagtgactgcacccagcgcaggttcagcagtggccaggacgatagtccccttcaggatttggagtgaggagaaaaggatttatggggctgacatttgttttcagacctaaaccattcctgtaaaattgcaacctaattgctcagtctggcggtttcctcttcctggtagtgggtgaatggaggtggggggagcgtctcccctcttttttggatagatgttaatattttgcactgcttttagcacctggggaaaacccattaaacaaacgtccccccctcccattgctgcctgaggcaggggcatgtgacccacacaccctactttactcggaaacagtgactttgcagcaaccctaaatcctgctgtgagccccgcctgcgctggtgctgtgtgataaactgacacctcccccttcttctctgtggaagactctcttaatgctgtgagccccgcctgagctggtgctgtgtgataaactgacacctcccccttcatccctgtggaagactctcttaatagtgtagtttgatttcaaattcattatgaatagatttttttttttgagttggagtatcgcactctcaccaggcaggagtgcagtggcgcaatcttgcctcactgcaacctccgcctcctgggttcaagtgattctcctgcctcagcctcccaagcagctgggactacaggcatgcggcaccatgcgcagctaatttttgtatttttcgtagaggcagggtttcaccatgttagccaggatggtttcgatctcttgacctcgtgatccacccacctcggcctcccaaaatgttgggattacagatgtgagccactgtgccggccgagggtttttttttttaattttaaagagctggatctatgtgagcccctcgcggtggtggttgctgtaatcctcctcagtgatacgctcccgtgctcagttcatcagaacactcctgggtgcgtgaactcttttgaggtgtgaattgttgcactgtaactcattcctcattaccacggtattgctgacgtggcatgtaagatgggatgtcttacaggccaagacggaacctcccctcagtcctccctgtgaagccagccgctgtggcccttggtgccctctgaggagccatctatcccagcggcccccaagggctgtgtgggggatgcaggcacagactgaatgggatgatttgtcccaaatgcagcttttctttccttctctagagtttctcatcaccagctgggtggctgcaggaagggtgtctgaatccttaccaatacccatgaggccagggatggtcaggcccccagaaggcctcttagtactcttctggccatctggggccatctgtcctatagcatagcctctctgtcacatcgcactcaccatgtgcaggtacttctaaatgcaagtgcgctggagaatgtgtgtgtgtgtgtgtgtggttatgaaggaaaacaggaccttcgcttgtcgtggtgtgtacaagggcaggcgtgtgttctccgatgttatatggattttgtggccctgaagccgtcagccacttggagttttggggggctctgcctcttccccgaagctctgttctgtggaggccacagagcccagcgtctgcatggctgcttattaaattcagtgggccacttgggtcttgtgcaccagggatggagccactggcttctgggttgcctctggagttgctggcttttggatagggaggtaagggagaaagtaaaacaggaatgatcttagagaagggactttcataagggtgtgtgtgtggcgggggcgggggtggttggggggaggtaggctttccttttttcccccaagctagtctctcctgagtgtcacaagagcctgagtgttggctgggaggcatctgtcttcagggccttccttgctccagtctcctcttctcttggaagttcctctttctgccagagcatcagctcaggacagccttcctaagcccccatcttcctatatgtggggtgccccgagccccatccagggcacctgcgctttctggttcggggacatctcatgcctcagcactgttgagagcagctcagcctggcactttgtggatgtttgagtcagtggagaggattttctggattatcagcaatacttccaccagctccttcttcctgaagcccccgcgacacttgtgaagcacacaccctgcttttactcagtggccaaatgccgccgctagcgacgcatcagtcattcggtgtatttcgggctctctcataattttatgatgagtttgctgttcgtttgtagtctgtttctaatctggctcattaggaattagcaaaacttgtctcttgctcaaaatagattgtgttgccaggattcaaagccaaattctgactgcagatatgctgcgaatttttctgtttctttagacttttttctttcctgtcctataacctgtttgttagtggggtagaaaatccacaaatttaactcttactattttattttttagagatgagatcttgctctgtcacccaggctagaatgcagaggcgtgatcgtagcaccctgaggcttcaaactcctgggctcaagtgatcctccctcctcagcctcctaagtagctgtgactataggtgtttgccaccatgtctggctaactttttaattttttttgtaaagatggggtcttgctgtattgcccaggctggtcttgagcttctgacctcaagtgatcttcccctctcggcctaccaaagtcctggtgttatagaagtgaaccactgcacctggctcacaaatttaactctttcaagaggaaacaatacacccaagggtccttactttttttccccccaaaattctgtcacttaaaaataaaagttcagctttcgttttagactcagggtgcatgtgcaggtttgttcatgggtattctgcatgctgctgggggttggccgagtgtccttctgctgtgactggttgacctgacactgaaaaggctgctgagttctgttagtcactcagcatcagtgcattggatctgaaaggaccacaggttgtccccaggccaagctcctggctccgcagagcaggcattgcttctgcagcttcctgtggacaggcatcacccgtctgctgaagtacgctgaacgggcacaattgcaggattactgccttgagatctgcatgacctccatgttcttacttgtagaacgtggagcccaagtctaccatccctgcagtcctctcttgtctctgaagctttgagtgagctgatgcccatcactgtggaactttgtagtcctaatacctcttgcacatgaaaatctctctgctatttgaagacctttctcatcccgccttctactaccatccatatctttcttctgtaagctaaacctctctaattgcctcacatgataagattttgagggatttcttcacctacccacagcgctgccgcagccaggcctcatgataccttagctcataatagccaccgagtggcttgggagaagcacttagcatggggtctggcacttagaaagcactcactagatgctcgtttctggacactgctgggcactggctgatgttaaggactccctgtgctcagccggttgtgaagggtttgggagcctggtgtttacccccactgttggatgaggtgcttcaaggaacaccagtttgatacagaggcagtttggggtttactagggagtcagccagcgtgagtcacgtggtatcaggaacaccgggccctggggaccgacccctgtgtctcccctaagtaggatgctcccatgcaggagcagaaggacaagcagcccggagctgctgcccggctgtgcccaaagtgggatttctgctgatcaagagtctggaatttacactccagcaggtttggaagtctcggcgacagctcctgtatgttcagtcaagcttggctgaccatggctaaaccactttaatgagtttatgggacaccagcgaagctgcaaactgggtcgggatgaaagctgagtgggcgggtgggggcttaaatgggaaagcactgggagggctggcccacacccgtgactgccctgcgtctcatgggagcagaaaggtggaggctgagcctgagacagggtaggaacccctcttaggagcctgtcaggcaccctccaacataaaaattttaaaaatttaagtattaaaaaaactaggcatctcgctagccttgagaaagaaatcaacaacctaataaacaagatagcttaaaacagtatctaaaaagctaggcacaaaacgtttgttttttttttataaaaattaaataccttaacatatgtccctgagtcgttttttagaaacctggacccccaccaaataataaatgctgtctgcagcacatagacctcgggtaacagaaaactgaggacacaactctgaccgccagttttaatttctttctgagaggcctggaggaagacacttccacaggccagatgctaacattcatttctgctgatcccaaattcctagacaaagctttgcttccttaaccaatagcaaatcaaaaaacctttgaatccacctttgacctgtgggccctgctttgagacatcccacctttctaggtcaatcccatgcagagctttcatgtattgatttatgactttgcctgtaacctctgcctccccgcctttaaaaacccttacctgtaagccatctgggagttaggtcttaagcactagccacccaattctccttgcttggcaccctgcaatttaaacctcgcactgtctcgctgctatcctgatgtcagcgtttagctccgctgcaccagccaagtagaccgaagttcggtttggtaacaagccctggagagataaggcaggggcttggctggtccaggtatggggtcctgttggaggccgaagagtgagggtcgtgatcaactcagtataccactggaggctatgtaagtaagcagcgaactgtttctcataaatgcagaatgttggcaaactgacaaactgcgtctgccacccagaagtgatgctgagggcagttatgacccagacgcaagtgtttcttatgattaggcatcattgaagcctgttagtaacagtatgaacctgtgatcaattaagcagctgaccaatcgttacctccttcctgctcttgttacccaataaataggaagggctgtagaagcttaggggggctgcctttgctcactagaagcagggtgcctttttcctcttcttcttctctcttcttccccatgctagccttcccttaaaatagttacttttgttttttgttatttctacattcatcccttcaatcagtctcgtaatgacggtctcaagtagcagtaacagtagtaactgtggcggtcagcaacagggtcctgggagtaactctcttctgatttggttttcactgccccgaaatagataggggtaggggagaccaggacgtccagcctgagaactgttaaatcacccagatttcctaagggaagaacacaccagactccttttctgtccaggggcttggtggccatctctccagctgatactgggagcgtcacagtgggatgaggctgccttccatcacagctccttgaaccctgtgaaagcccgcagaggctgagtcctgcaccccctctagttgggtctgtctcttcctttggttttcctgcagggccaggccttgctgagaatgtgagattgggagccatgaggaagggactgtactagagaggtgacatgcagactgtcttggaacttgcttgggaagaggtggaagatagtggtacataaatggaaaaggtgatctgtgcatttcttgaagcaggtacaaaccagtggttgaaagaattaaaacagccatttaaaaaaatgtgactattttgttgcaaaataaaggactgctatattagttgtttctcttctttctgaattcctgtaagaatatccgagtgtctattgtgctgtgttccttttgccctggaattgtgtttcttgagcgtgggatgagagggtaacattcttcctctgtcatcctccaccctattatagaactgatgcatattaattataaaaatacagcctagcataaggaagcaggaagaaggaacacataattcatgccgcgtaagcatccccaccacggtgccttctaggctttattctgtttggttttttaatatactcgtggtaacaatgtgttgcagtttggtttttttccctgccttgaaagttttaacactatattgtatttttacatgatctaaaaagcttttattaacattgtatggatatgtccaatctacctagctagtttggttttgtaacttatgatgaacctttttatgtaaacctttgcaatacattctttactatgtccttggaatagatttctaaaagtggaattaccgggtcagagagtttgaacatttttaaggcttttgatagatgttctcagctcttttccagaaaggttgtacaagtttacactcagaccagaagactcttttgtacctttgccacatcgttaatatttgcaaataaaatctttgtttattgcctaggtggtagttgacgtttctgtttcgatttcttttttctttttttttttttttgagacagagtctcactctgtcgaccaggctggaggctggagtgcagtggcatgatctcagctcactgcaacctccacctcccgggttcaagcaattctcctgcctcagcctccagattagctgggattataggcgcccgccaccgcgcccagctaattttttgtgtttttggtagagatgaggtttctccatgttggccaggctggtctcgaactcctgacctcaggtgatccgcctgtcttggcctcctaaagtgctgggattacaggcattagcgccacacctggccttaattttgatttctttagttcccttgaactgaaaagtgtctcatgtgttacctgatcccgtagcctgcttttctcatactttgtgttagctgtttaataaatattacaaattgcaaccctttgtctatttttaggtaatattttccccacacttttccttttttttaaatagagaggagacttaactttatgtagttaaattctcatccttttgctttctggtttcctccatttcttttaagcttagaaatgcttgtctcaaccagagatcaggtaagtaatacttaattacatattactctgatacttggttggtttgcttgattttgatatttaactcttcatccacctgaatctgtttttttttttttttttggcagagtctcactctgtcaccaggctggaatgcagtggcgcaatctcagctcactgcaagctctgcctcccgggttcacgccattctcctgcctcagcctcccgaatagctgggactacaggctcatgccaccatgcccagctaatttttgtatttttagtagagacggggtttcaccacgttagccagggtggtctcaatctcctgacctcatgatccgcccgccttggcctcccaaagtgctgggattacaggtgtgagccactgcacctggcctatttggtatttttgagaagtgcagctctaagttggttttatccccttcccccaattcctaaccagttgttcaggtgagacaaccatttgttatttctttggtttcagagaagctgtatctatctatctgtggtgtatccctctcaaacctcccctcattctgggttgggcccaggaggagggtatccaacccagacctggtggagaggagcagctttttttaaggccagtagtgctcaatatttataaactccttctgtatcagctcatgagacatttcacagttgtactcttcgcctgcttggctgtgtgactgagaggagctgggcgtggggtgatacagcagcgagcaggtgaggtatcggggcaagcccaccagcatctctcccgtgtcatctgcacttcagtattggattcctccccgtggacccagtgctcagaaaatccaaggccagtcttggtgctaccacttgcttagacaaatcactgagttgtctgtgtcagccagtttctccgctgtatttaagtatgatcagtgtgaactaaaaacctatttggcctgcctgttgtgaggcttaaatgagaggaagtatctgagagtgtttcaaatcatctaaagcattgccctcacataatttcaaagcaatattaatgtattaatttgagcctttaggtgctaagggttgtaagatgcaccatcattttgtcaattttaagatgcattccccatttcagagatgtcggaacaggaaaagccatgcatcctggaattggtgtttggtcctgactctcatggggggtgagaaatggtagagacagtgtcctagactcgggggtggggatgcgaggggtgtagaggaagacagtcatggatacccatattttattctctaatgatacagaatcttcattttgggccgattcctgtggctctattttctctttgtaattctactttgcgatgcatgtttcagaagagaaaccattttccagctttcttcatctcatttccgttgtgctaacagagaaactctgaattcatctgaggtgctttttacttttctttcggtgaattgtcaggcatgagccacagaagccatccgaatcaggtttctgtgtggaaatcacacggcggggaggtggaggcacaaaatgatcttaatgacatgcacatcttcctgctcccttgtggagctgagtgtggggggccctttgcagtctggcaggctcggctctggatttgaattcagtctctgccatttatcacttgagggatctcagatgaatgctctttccctttccctttccttgagacacagtctccctgtgtcacccaggctggagtgcagtggtgtggcagcctcgacctcctgggttcaagcaatcctcttgcttcaccctcctaagtagctgggactacaggtgtgcaccaccacgcctggctaactttttcattttttttttttttatagatgggggtctcactgtgttgcccaggctggtcctgaactcctggtctcaggcgagctccccacctccgcctcccaaagtgttaggattacaggcgtgagctgctgtacctggccaagtgctctctttctgatccttagttttctcttctgtaaagtgaggataaaaggatatattctggagcgttgtcaggagaattgaatgagctgcatgtgtaagccctagcagagtttcctgggtatagaggaggcacttagtcagcgtcacctccttcccatcttctcaggagttggagggtgacagagcagaggaaatttaggttttcactcttctgggggtgggtcaggtaactatgatcgaacctgcacgcattgttttagtgccacgttgattgggtcgcgcctgatcatttgcttctggtctgactgtcccagatccctgtcagcacatgtctggcaccagccatcctctgataaccctgccatagagctccaggagagagtggggcctgttcctggtggcctgagttgttgaattgtactctttagacatcgaacctaatgtttcaaaacacacattcattcgtgaggcctgtctgccgcgctttctctcccggatgtgagttccagcacatgcatgcaccccctcactgccccccatccagagccacagcctgccctgtcggaatatgtccagccctaatgagggaggcgttgtcttcagatcacacactccgcagcggctctgctctgccgcgccccttcaggagcgctgggtctgagagaggacttcagaaataacgggggcaacgttccgctttgatgctattattagaattttccaaacaccgcttgtttgtagcttcacagggacttggagagaggcgagtgggaagaggttgctgctagtgccattgtacgggaagctcaatggcatttatctggtccaaggtcattcaacaagaacaggttgaaatcaccctcagaccgaagagccggccgtctgtgcattttgcttttcccgcagttcagccgggactctgcttcacggatgctttcacctcacggacagcgaagccagacacacaggccctgcgtggttgggggcgagagcatttttccatagtcagtgggctattccgaagctaagagaccgtttccttgaaccaaaaggctgattctttcctgctggagctcctgttttcatactcatttccctggggagtggagctgaggcgtgtggactgttcccacccccgcctgcacccaataagctttgggggagccaaatagtgcttttcactggagcctgagtggatgcagggaggcacacatgcttcatagaagggaatcagtgatctgtcccgctgctctggggctccagcatggagcttcacgtaggctggggtggggttggttctgtgtgacagcctgcacagaggtggtggatatggccgaagccacttctgcttcatgctgtgtttgggccagatgtccttggtggctgggagggtctgctgtggaggtgcccatggtcagagagcctgcaggctgcagtggctgacctctcccctccccacctggctttgctgagagggtgcttgctgggtgttctcagctgggcagccagccgaggctgtcacagtgacaagggaggaattattttctcttcaaggggtggatgtgaattacttaattatttgcagaagtttcattgctttttacttacattctcctgattcctccccagtggaagcatcaagaccccactgcaacaggctcgtcagcatcttgtcacagctgtggatgtttgccaggctttctggacgagtccagctctagattgcaacctggtttagctacacacgttgaaaaggagaagaaaaaagtagagataagataggatttggctcaggattgatgttgtatagggtttgacttttattatctttcactcttgaaaagtgaaatatattctcctttgatttctgttgacgttgttggaaatagagatttccttcaagtctttaaacagcattattatcgtttcctaggttcttagttttgatttgttttacaagcagtagtgcttcattctaatcctcctgcatccattttacctttttctccttggaatttgttcagtgatgacttaatagaaaaaacaccttgcatgtcgttgcgtgcgtcttttccagacctctgtctgtggcctcttctcctttcatctgccattgcccaagtgttactggaaaggggtcctcatccagaccccaaaggacggttcttggatcttgcacaagaaagaattcagggtgagtccatggagtaaagtgaaagcgagtttattaagaaaataaacagggccaggcatggtggctcagagcgcctgtattcccagcaccttgggaggccaagatgggcggatcacctgaggtcaggagtaagagaccagcctggtcaacatggtgaaaccccatctctactaaaaacacaaaaattagccaggcatggtggtgcgtgcctgtaatcccagctacttgggaggctgaggcaggagaatcgcttgaacccaggaggtggaggttgcagtgagctgagatcacgcctctgcaccccagcctgggcgatgcagcgagactctgtctcaaaaaaaaaaaaaaaaaaaatgaaacagaagaaagaatggccactccataggcagagcagtggcatgggcagcttgactgagtatacttatggttatttcttgatcatatgctaaataagaggtgggctttttatgagtttcgtgggaaaggggcagggattttcctggaactgaaggttcctccctcttttagaccatctacggtaacttcttgacgttgccatggcatttgtaaactgtcatggcactgatgggagcgtcttttagctattgtgttataattagcatataatgagcagtgaggatgaccaggtgtggcttttgtagccatcttggttttggtgggttttggcagcttcttcactgcatcctgttttgtttatcagtgggttctttatgacctgtatctcatgctgacctcttgtcttatcctgtgactgagaacgcctaacctcctgggaatgcagccagtaggtctcagcctcattttaccctattcaagatggagtcactctggttcaaacacatctgacatgagcactcagtgtctaccctcacgggggttatggtgtgaggagaccaacaagagcttctggctttttctagctgctacttcctgttgaccattgacagccactttacccggctttggtcccctcaccttactgtttgaaaggtatctaataatccccatttcagagatttatatttaaatgaagacatttagatgagaacaatcagggtcctcttgctaaatctgaagaatcccgatgttatcgttgaagccaagtgctccttcctggccacatgtgtcccttctgatgagaagtttatccctctcggttccctgccacaacttccaagctgcatgggacacaccaagacccctcttctaggctaagacagcacagtgcagcctggagttcagggtctcagcctctgccttcagcaacgcctcactcctcctgccccatgaagggaggacggttattctgcagcagggctgctggcactgggcctggaggggagccactgtaagcctatcaggcagtccagaaccagcacctgttccactgacaacagctagaattgtaagaaaatggccaccaatggaaagagcagtagaatagtaagggattttttgttttttggtaaaattccaaggaaaatacaagcaaagcactgcgagcgtaataatttgccgttgcatggactaaggggtaaggaaggatgaactggtgtattaaaggaaatccagtttcgttcccacctatgaagattactcaggtttatggagagttgttttgctttgggctgttgcggaaataatctacttggaatgaagttctttcagctcctgggaacctttaattgtcctgtgggctggtcattcaggttgtacatccacagactcacagaattgcgtagccctgggaggaagggaccataaagatgaatcagcccagccttcctcagacatcctgcgaccaccccaggcccagagaggctgtgcctggtccaggctgccgggtccctgcgtcagctgtactggaactgtctgctgagtgcgccctcccccacggggcttctgtctgcttcttggacacccctttcttccccttgggggtcggctttttaatggccagctcacctctgcctgagaggaggaatgaatcccaaggcttgggtttaggggatggctcacctctgccagcctgtgcttcatgtttggagacaggtgatggttaaccaggcaacagtccctgccagtagtgtgtacacagacagtagtgtggctggtaggtttggccaaggcctggagttggattcctacccctgccactgcctggctccactgccctgggccaagtccctgcccttcccagtgccccagcccctggacagcagtgcctaggtgacagagagtggtccctgtcctactgaggggatgggagcacagtggagcgtgacttcccgtgaagctgctgtccgttgctatagaaatccagcctcggaaccgggagtactgtcagtggtgctcgggaaacttcccccttcctccagcctgtgcttcctggagtgacgcgctgccacagctggaggcttctctgcaaacgtgtattatggttttatcttctcccctcccacaatgagttctgtctgtgtcaagtgtttagagatcattcgaacctttctcctcacccctcccttccccttttcctcagggaaaagcttgtgcataactcagtagtaaatgaattgtctaaatcatgtagcaaaacacaaaataatgtgactcccagtagtatatgccattatacaacccagctgtacagtatttcagtgtattcagaggacctcttttccattaccaagtgatagtgtggaagggaagatacgtatcctttctagttctgaaatagctatattcttattttctctgcttttgtgtcatcattgaaaaattccagcattcgttgcaaatgtgtgtctattttgaaacaaatgacaaacgaaacaagaatgcatagatctgtaggtaaccatgcttaaagacattctgtttcttcaaggggaatgtgagtgaatgtgaattggatcaccccacaggagattagtaggaactgatttattttgttggcaacatttgttgacagtgtgtcctggagtcttaatattacagctgaaaggagagatcctgcccatcttaacactgcgcagaagggactcgtacaggctctggctccagacccgggctgggttccttactttgtttttaatccttaaaagttggtaaaatacatacatcataaaatttgctgtcttaaccatccttaaatttacagctcagtatcctcacgcatccacagaactctttcatcttgcaaaactgaaactctgtctcattaaacactgactcccttctcccctcccctccccctggcaaccaccattctactttctgtcttcatgaatttgactcctctaggtccctcatgttagtggaatcatccagtatttatccttttgtgactggcttatttcacttagcataatgtcctcagggttcatccatgttgtagcgcgcgtcagagttttctccctatttagggctgaatattccattttatggttaggccacattttgttgatctagtcacccattgatggacacgtgggtccttatggctattgtgaatagtgctgctgtgaaatatgggtatacagatatctcttcaagaccccgctttcttttgttttccttttttttttttttttttttttgagacagggtctcgctctattgtccaggctgaagtgcgtgccacaatcatatctcactgcagcatcaaacgcctgggcttattttcccgcctctgcctcccaagtagctaggatgacaagtgcttaccaccatgccaggcaaattttttgtttgtttttttgttagagacgagagcctcactgtgttgcccaggctggtcttgaactcctggcctcaagtgatcttcctgccttggcctcccaaagtgctgggattacaggtttgagctaccacccctggccgagaccttgccaccacactgcttaataaaaggctgggctgcattttgggattaggacctcctgtggaggtggggggagggtggggaaggagaacggtggcatcccagccaggaagcatgagggatggcatccgtccaccaggccacaggaagcataagggatggcctccatccacccggccacttctttccacatcagcattcttccgcacttgggccacacagggtctgcgagaactccaggtggctcttagagtggcactgaccaagtagtctgtgtagggggactcactgtgccccccatgctcagaggctgtatggtgaagtcgttaagggcccgggcttatatccagccccgccagctgatcactcttgatctggggcaagtaacttaacctctgtgtgcctctgtttcctcctttgtaaaatggggaaaaaagtagtacctacctcctagggctcttctgagggtgacctgggttaatataattaaatatacctagtacgtgcatagtaagcaccatttaagtgtctagaacattatgggtaaaaatacgcctgtgctttggtgagtctggaagtctaaagtgtaactttcctaagctggtcgttgcctgctctgttcacctaagttcgcatgctcatttgctgaatgctgtctgcatacttgctggtcagctacttcttgtcctctgtcttactgtggggcctgcgtgggaaggctgggtttttctgaacacttgcttataaattatcctccttctgttcatttaaagccagatgctctctatgtgagaattggcccgtaccctgggagaaggtttgagctctcctgggtcctgggggccagcaattccaggagagccatttccttcctgtggctgctcttcagagcagcagcctgcaggctgggcccatccctggttcaaactgtttttaggggagtgggctggagagctgcccaagtccatgtctgagcagctggtgaagagaatggtgctggctcctctaggcttctggtactcctggagcctgagtccagagactgaacctcctagtccttcccttgcagtggattctgggaattggggtactgggcactgtcagccccattccctgtgagcatctgggctttgggcagggtcctcactctctctggctttcagtttctgcgtgtgaaaaatcaggggaatccgcagcctgagagcttctctggaaggtgtagttagtttttggtaagagatgtccagttgtttgcagcagctgctaggaatgaaatgcagaactggagacattcgagagcagaagagcagaagcagcaacaaggtgtggtgtgtgcaggttccacagtcacacagcaccgctgcccatccttcatggggtcctgaagtcccatgcagaactgcggggtggtcctgctgaagttcttgtggatgctgctgctgacctgtaaagaggcatggcaggtgcagtaggggccaaggagaaagaggtcgtctgtcggcctgaacacttccttggttttttcttggctttacgcagcatgttgcttttcacatgggaaagtgtcagccccacgctcttattaaagcattgagttcttccaggcctctgttgctgctctgataactgaaagggtattgtgcttgtctttatctgccacacgcacgtgggtgacattgatgcgccaaccagatgcccccagctgtgacaggcagaatttaactgtcgccctgctcagcgatcaccagctcatcttgtttgtcctgatgatggtccctcctgttatttggctgtttgtcagatatcaagaattttctttgtaattaggctttaattgctaacttttaaattctaatcactttcaaaatagcactcttttaaatggaggtgacacatcttaggacattcagaacgatacctcctatatttgccagaacatattccacttacaaaagcagcacctgcgagtgcttgacagctgtgtcgtgggaggtggcttgatgcagatcctcctggccacacctggatcgggaggcagagcaggttggggtaggagacgtctccgtgctgccttctgggccacatgtcaaagagttgacactgttatttcacaaccctctccctgtatctagagtgaccatgctatttagtgtccagacctgagtgcttttgagaatgaaaggggaaatgttaataattacatggagacagtagttagtatccagaacatttgtcctgttttgtgcctgaaaccaagaaagactactacactcggcttctctataaccagaggatcacagagccagcgtcacccgcagcaccaaatgataaaagctcagagtagccggtgcctgcatgtgaagggcggtttgtgttcctcgctactggaagtaggattatggttgtaataattatgtcgacttcagtattttttccttaagaaagttttattgtgccaacatctgcaacaatagacgctgtatactcttaggtaccaagcacccaccaggatttcgccatgcttattttgtcttttcctgtttatgcctgtgtgtgtgtggtggggagttaggggtggtagtggtgtgttttaaagcaaatctcggatgttatttttcttcttgtgatgcttacttcaaagtaagtaccactaaccttgtgccagtgttcttatgtggggtgaggattaattaaagactaagggatttgaagagcaactataaagtattaaaaagcctgggagtaggtggttgatttggggcagaggttatggtgttgctgatacagtggcttctaagcttcttgtgggaaggatgagtttatctttggcagccttcagtgatctccccgcaggccttgaggtgagatgtgtagtgatgtcaggctcctctcttgcttggtaacctacaaaccaagcaaggtgagaggcccggcggagcatcccaagggtctcccgatggccactccagagctgcgtcatctgttttctgctgcagcatctgcaggctctcactcatcccgttacacttagagcgacccatgtgcctgtgggcccctcctgcctcagtaccaagactgtccttggcaccccctccccaaccccattctcagatcgccccctgtgttgcttgttagcaggcaggttccagtgcagactggccgaatctgaatttctcagtgagcgtctcagaaatctgcactgtcagctcccctgacccctaagtttgtggggtttcctggccaggcctcagactctggcagtcgggcctgggccttctgagggggtttgtcctggaaatcctgtcttcccccaagggaagctcccccaaaggaacccttttaggtgtctggtgtttgaagccagtcccccatttccctctgtttttgttgttatcacatactgtagggatggttgtaataaatacagacttttagagaatgcagccaacttggtggttctctggggattcctccgctgaggtcggggcttagacatttacacggttttcttttgccttttgagattcttatccacagctagttggttgaaagccacccaccttggcatagtgccaatgggggccttgccccgtgtggtgcctgatgcagcacagcaggacgtcaggcaagcccagacgtcaggcaggcccagaacgtcacctgtcttcttggtggcagtggttccatctggacttggaaataccatgtttgaaacaaggtccctgtaattacttaattgtaaagaaatgagaggtagcatttcggcttgcttgcctgcctgcccagcccctctgggaagtgtgcctttcaaagatgctcgccgcttgcatttttattatcctgtgattaagagagaagacgttggtccactccttgtccaggctgctttgggctgtagtggacctgcttctggtgttccttgaggttctgctttcttgtgagggttcttttttctctctgcttcttattaatctgtagctgcttatgttttttggcttggctaaaaataagcacttttccttcttcctcctgggttaggagtgaaaaagacagtctttgtatttctgctgtttggagttggatgtgagaaattgataagctaaaagactgtagttatttttcccctcccttttcatgtatctcgttagggagccctggaggaggaagctttgggaggagtcccgcgccttctctcccgcaccaggtctgagaacttgttcgcagctattcatgtcttatgtgtgcctggtcacccctcttcctctttcagttttgtttttttgttaatagctaaatcacatttctggttatttccttaatatggacagtattttcatttcctctggaggtgttgatcggaggccactgcctgcctcccttcctgacccggttggagtgaagcaggtgtgggctcagaaaagcctgcttgggaagcactcctgtgttcatttacaactcagccaccttataccaaccatacactgcacactcagtattagatgagaaaggagcaaactcggctctcagggagctggggcatttaggaaaaggaaacaaattagtatagtaagatgcattaatgaaacggcattgggactaacctggagggatggcccaggttgcagggggaggggtgggaaggagagagggcatagggtgggtgtcgtgcatgtaagtgaaatggcatgccaggggctgcacgcacctcagagcggccccacgtgttggcggggaggcgttatgctggaaacgtgacctgtgaggaggttaggtaagaaccacgcagggtcctgtatgctgcagtccagagctggctaccgcctgcactgtcagatctcggtgtctgtcccgctggccgcactgtgtgggagtcgtggcaggggacagacaggaggcaggtgggccactagagcccaggtgagaagggaagcaggccttcagctgtggcagggtgaattgggaaggaggggccagagttagagaaacaggaggcagtgtctgcatatctggccagctggtgagatgttggggatgaggggtgggcagtgccaagctgggggagatttcagaccatgattctcaaaagaatgctctctgatttgacagcatcctcaatttggaggaattacctttgtgttccttccaagatgttgtccctggactgatgaactgaaaccctttcctctggcattttctagtttccaagatcgaccgtgaattataaagacttcattttattcaacattcattgtgttcaaaccttctagctgaaagccgcctactttggggttaaggtgtgggtttgcctatattcactttgctgtccttgactcttggccaacattcctagagcccctgccacgggactgctgtgggctgagactggtgtcgcctctcccttgaaagcatggcctgctctgccgtgtgcctggcttggccactggttctcctttcctggtcccgcgggggcttttcttttcttctctgttgtaaaataatctcaggccagggccactcctggcctactcttcgattctgcgaacagtggctggctagtggtgtggccacattcccctgcagtggttgaggctaaacagtcactgttgagagaagctgccttcctcctccaagagtccctccttcctgccctgttgccctcttcccgttgaaggagagcttctgtctcctgagtgagggcctcagctctgcctgtgggtcacctctggctcccagcctggaaggcattgcaggcttcatgaagagagctcgtctttagctgctatttctaagcatgattgcttgttggaggttggcagtggtagatgctcctagcacacgtccacaccttcagggcaaacgctctgtccccagacactgtccctgtttagttagtttcctaaactatgatcactcagcaacctcgaggatagtcactgtattattacatacaggtgcagccctcttacatacctgtgtgtgtgtccagccccactggacacatgcctcccacttgcccacactcttccccatcccgctttaaagcttcaaatctgaaaagacagtggcgctgcgtggctgagagccacgaggtggactttaggtgaagggctgcccaccggcacaaccagatcagtggccagctcggggcgtgcacagtgcactcagagggagagccctgtggcactgcgttattttcctcctagagctgaagccagaaacctgatagggaaagggggcgttttcagggctggagtagttcagcacagtcccttcctcactgtggactccttttctaaatctgcaagtcacaggtaacctgggtgcatccaacaggtcccacagccctggaaagccctcgtttaacacaagtgctctctgtccttgctgcagaggcggctccacgccttgcttctagcggtccctcactcgccttccggagttaactccagggtgtgggtcagccttttcaaggggttttgttttctttttttttctttctttctatttttgtttttgagacaaggtttgttgcccaggctggagtgcagtggtgtgatcacagctcactgcagccttgatgtccctgggctcaggtgatcctcccacctcagccttccgagtagctgggactacaggtgtgcaccactatgcccagctaatttttgtatttttagtagagacagggtttcgctctattgcccaggctggtctcaaactcctgggcccaagagatccacccacctcaccctcccaaagtgttgggattacaggcataagccaccatacccagccccactcctccccaccttttttttaaacagggcctcgccctgtcacccaggctggagtgatcacagctcattgcagccttgacctcctgggctcaaatgattctcctgcctcagccatctgactagctgggaccacaggcacgtaccaccacgcccagctaatttttgcattttttgtagagacggcgtttctccatattgcccaggctggtctcgaactcctgggctcaggcagtccacctgcctcagcctcccaaagtgctgagattacaggcgtgagccactgagcctagcctacttgtttaattcttgattgcttgatttcagaaggtgctgcttctgcttttatggctcctgaagtcattttatggtcttgaccttgtctctcctggagcgggtgggaggacattgcgaggccacctagattggacttgtgtggttgagcactgggttcaggaacatccctggagggtgggtgatggttgctgcctgcttgctgttttatagggtgtttctcttacaggctgccaatagcttggtggtttgagcatcctattattgcagtgattcttaggtctggcgttgagggcagcaagatttctgcctaaacatagtccttctctgtagtagtgattctaggatgagccactgtagacaggggcatgtattgagtgcaacaagcggttgagggaccttagattttgagggtttttaaaaaccgcctgattggtttgtgtgcgtcctgccacagtgttacctaggtgggcttaatgaggtgggagtgggctttttgttttgttgttttatgcctcagccatgtaaatataaacagatacattgaatcattcaatgtccagagtgggaaattacagccaagccctcctcacttttagaatagcatggcgtgaataactgcaaaacctccctctggtctttcctgcctctttaagagttctgtctccagagactggcagagccgtctctgggcagatttgccgaattgtttcagcagggcttctccggtggccatcagatcaattgatcttgacacatggggtgcctctgagggcttctcactcttgatttaattctcagaaacgcttctcaacaccgttggtgtctttcttaattataccataatagaggttgacagccacacagtatgatggaccccagggtgaggatggctgggtgggcttgtggggctgctgaggcagagacctaggagggtgctctccattcctggatgcggagcccatgagtggcttaaaagacatgcactggctccgccctggggccaggagagccatcgcctgcttggtgactgcaaagctgcctacctccgtgtgctgccgtttttctgtaccgaagcttccctctttacctcaccataggaagcctgagatgtaacactcagaagaggcttgacaggcttggaatcaaaggcatgacttcatacatcacccaaggtgtcatatttcttctcagaaacttatatttggataaaacaaaaatcctttttcaacctttgaaacggtttccaacagctgctttaaaaagacatagtacaacaactccttccacttcctctttctgcccgctttgtttttgtccgcaacctttgcagagaagtgaatgtctctgttagagttggagttggaaattggggagggatgtgtgacttgattctgaaaggaaagtctcatctctttggtagagcatttttgttttgtttgtttgtttttagaccttaagctctacttataattctgtctaagacacctttgtggagcagttggagtgcctggctcctcattagagaatgcgctgcgacattcagcctctccttggccttctaggatggcgggaggcacagacacacactccttttcccacccagggatttggcgttcagaatgggggctttgactgcttggccctgactgtgcagttttctggatggaagcctgctgtcttctgagcacaaaggaatccatcgttttctttgcttccctaaggaatctattttcccagtggcagagcaacttagagaattcccagccagggccaccattctcaactcctcaggacgaggctggtgcacccggcatgcaggtgtctgtaactttgtgtgacttgttgaactctttcctatttaaggtgcactacctgggttgcctggagcacaatattcttcctcttgtggaaatatgttcaggatcttgtgtggtgtcctgggtttgattttatagctttgccaacataatgattacagttgacgatcaccgtggccaccgttgtcttttccctccattcccctgcagctttctggacctccgggatgtcctcctggagggaaggcccctggagaagtgtcccagtagaacgcactgttgtgtcacttgctctgaccaccgttgacatcgcagcacagcgctgcacacccgtgacagggtgatggtagaagatgagggtcggattgtccacgtagtgcctccaggaagctcaggatgatggccaagccagatatgtaaggtggctttggggcacaggatgatgccctcgaagtaatgcatggtctagttgttttgtaaacagtgctgtttcctgaagaagcaatgattttctgactacccggcctccccaagatagccctgggaggagaatttctgattctctctacagcagtgccttcttctgtaggatctccccacatgtccctgtgcccaccacgtaagctaaggaaggaaagcagagctcctcagttcattgatggcttcaactacagatgaaccagtgttacaggaaaggggtcccgatccagaccccaagagagggttcttggatctcgctcaagaaagaattcagagcaagtccgtagtgcaaagtgaaaagtttattacaaaagtaaaggaataaaagaatggctgttccatagacagagcagcctcgagagctgctggtcgcccatttctatggctatttcttgatgatatgctaaacaaggggtggattattcatgcctctcctttttagaccatatagggtaacttcctgacattgccatggcatttgtgaattatcatggtgctggtggaagtgtagcagtgaggacgaccagaggtcattcctgtggccatcttggttttggtgggttttggccggctcctttactgtagcctgtcttatcagcaaggtctttatgaccttattttgtgccgatctcctatctcatcctgtgacttagaatgccttaactgtctgggaatgcagcccagtaggttttagcctcattttacccaactcctattcaagatggagttgctttggctcacatgcctctgacaaaagtaaagctctcagggggctcaggctgatgggttcccttttacttctttgaatccccagtcgggcttggaaccatggcctgtaagcgcatccgacacttggctagaatctcgaacctgactctttcaaagatgagggcaaggtttttcaaattgtaagttgtgactcagtagatcatgaaactaatagaggagaataacatcagtattcatgatgaataattaaatagaaaatactggagcacatcatacatgtaagagtaggtacccttttatgacaccgtatgtggatggatgggcgtgcatgtatttatataacgtatatatttaaatacatggtttgggggatggatgtctacatcaaatttatttgttactatgggttttggcaaaaaagtttgaaagctgctaggatagtgcatagccaggagggaaataagaagaagctatgagagaactagataatccttctcctacacagactcgtgttttgtgtgagtgggacactcctcagcctgcgtccactctcaggtagcttcctctttgaaccgcttgtcattgtgaggcagtgaccatctgcgccagccctgtccttggctctaacgtgatgttcatttgctcacctttcttggacttcctttgcttcctcaggctttagcttcttgccctgctgcctgtatctatggccttctctctggctgtggtttagggaaaatcactccatctttctgtgccttcagtgtgtttgtccactgtgagtgaagcataatcaatacttggtgacttggctaaactgcgttcagtccttctgaatacttatttacattttatttattatttttatttttagagatgaggtcttaccgtgttgtccaggctggagtgcagtggcgtgatcatggctcactgtaatctcaaactcttgtgctcaagcgatcttcttatctcagtctgtggagtagctgagactataggcctgagccactgcccctggcctgaatacatttaaatgagataaaattaaatgagagaatgaaaatgaataggcccattgccatgcctgagacaaactcagatgtctgctaatgatcggttcttttctccttacatgcgggagtgtttctgtagtcagactggacacctacacacttaaacagtcattgatggggggtcagccttcaacattttaagggtctctttgcgtttttagttttatttttaatcacagtaagcacattttcatgtattagagaaaaagaaaaaacacccataatgctttctgtgtagaagcaagcattacagtggccttggtggtgttttttgaaagggctggggaattaattcatcgagaacatctgaggacgccttccagattcaccaatcatcaggcccctaagtacccttccagccccacgcccctgagttcttttcatgattccaacccagaggtctcagttgtgaaaagtttcttttgtcagacacagtgagctcagtctgtctggccgaggccactccgctcttggagatggattacagcctttgttcccactcctgggcctcctggcgtggcctcgggggcccctggttggtggcactcaccattcactctgtggaggggtctggtggaactgatatgttcataaaagctactggtaaaaacaaaacaacaacaaaaaagctactggtgcccagtgcctcttacaaactctcatgcagatttatcgtgtgggtctgtctgcgtgggtgtctaccttataaagactcagaaatggtttctcttttcacccattgtttggagaataataagtctctgtcagattagcttcttggggcctcagtgctttttgaaaagagcttgcataatcagtgtctggtgagctgtgaggccaagagcatattgccattgtgcaacggggatgtggattttgtacattttcaatatttcaccattcagtcttgtcagaagtcaagctgccgtccaccctgcacttgcagtggagacataggcccttcgtccacagtggataagtttttctccacgtgggccacattcttactagaaaagaaaccccggccctttagctcatcaccctctgctctggctttccccgagttggtacagagctgatgccgttggtatttttaagaaataatcttgagtcagaaggaatgtgccaaaccggcacaggtgagagatctctggacccccttatatttgcctattctgccccttctgagaaatttctgggagagaaggtagtattatgggacaatgaagccctaacccccaggacctcagaatgtcactttatttggagataagatctttatagatataatcaaattaaaatgtggtcgtcagcatgggctctagtatgactggtgtccttatgaaatgggggattcagacagagccagacacacgtggagggaagacagtgacaagagaatagacaacaggcaccacctctaagccaaggagagaggcctggaacagcatcttcccccatggccctcggaaggaacaaaccctgtcgccccttgagcgcagacttccagaactgtgagaaagtgtgtttctgttcctgaagcctcccagtttgtagtactttattatggcagccctggcatacttactcaggtagtctctgtcaggttatttataactcaccttatcacattggtaacttgtggttttatcatttggcatgacatccaaggccccttgcagttctaatatttacgtactagcacttaaaaagactttctctgaccacagggtctttgctggatggggtcttggtctggggctggggctttggtttccaaacatcagggtcctcccagatgaggctgccccgcgccgcatgcaccccccaccccgtttccgcgtgcagttttctgcggaagtatttcccaggtcctcggtttcccttctgtgtgagagcgtcactttctctcacatctgtggagcggaagtcctgaggcagtcaccgtttggggcctgcatggggttgtgagagcccttgtgctggctcctgcccgccctgttcttcgttggctgcctagggctccctgcaggttttcgctcggaggtgggccctgcctgcagccgctgacctccgggagagaccggcctctccctaattatagctcatctcttaatcccggtcatcatttcagctggctgtccttgaactgaaaattggaatacaattcaacctgtagctgttttaaaaactgccttattcagagagggtcaagataaagaaattttagcttctttcaggatcttccaaaacagatcaggaatgactgaatcaggacagggtctcctcctttggggctgggagggacagggcaggactctcccaggacagtcccatgggcagagctaggttttgtgaggactggagcttttgtcatttgaagaccatttctaagagaaagagtgattataaccccaaaactgggctcccaagtgcatagcacaaaggaccccacagaagatcacaaatggcccatcctgactggaagagagagattagattgagggccaggtcgtgagggcactctgagggtcgctaagacattcggcgtcaacctccagttcactcaggagttctgagtggaggacaaaagccttgctttaaaaggactaattctgtagtgattttgccacatggagaggggagggaactattgtgtcagatcaggaaaaccatgggatcagtgctaagggcctgtgtggtgggctctgtctgggtgggagagactgtgtcctggtcatggggctcagtctgtgggtgggtgatagaagagtaaagcttttgtgtttttagggtggggaagagaagagagagtcattgattttagatacaagtggaataccacgtagacctggcctctgggtggtgatgaccttctggggttgatgtctggagacggtgcggttttgggatgggggagcagacgagggagagagagagagagagagagaaagagagagagagtgtgtgtgtgtgtgtgtgtgtgttttacagcaaagacctggatcctgaatcttggggagaaaactccttgcattgtacatattgggctggttacatggctgaagttcaccgtgtcattttaggcctgtttctggcttccacactggtttgcaatgtcatcctagggaagtcagcttgtccttggtaggatatattcattggtgagttcactcaagagactcctttttgcgtttctttaccttcaacgttcgtttcctaaaattgattattccttcataaagttgccagcattttcaacatgcttcctagatgctggatattttattatcgtttgtcacggatcaatttatttttttggcccttaaactatcacattttctgcagttaaatttgcttaactttctaatgcaggggcagaatgtaacctgcaggttgtggctttagaaagcaatgtggaactcggggccatggtaagcaagttggtggtggttttttttaatagcacatctcatcctttgatgtcagaacactgtctacacactctgattcatttcagtcagtccctaaaatgtgaagatgaaatgttggggagacagatcctctggcctgaggaagctagccgtcttgtttgggagataagaaacatcaactgttttgaaaatactttggttctatcattagagagctgatcaagtgcagtaagaggcaaggtcagactgggctgtattatgttttgatttggagaaactatcacgaaagaggtaacattgagtcagagcctgagagaattgtggagaatccctgcaggagtaaataagaccatcccaggagggctctcatttaaggcctcgtgtactgtggtcatttgaccttggttcagatgccacttcagtttagatgcatttaaaagcagagaaaacattggaacttactgtgtagtattgagtgagcattaattgagatgtgtgtgaaccattgagcatgatacctggcgtgtcgtaagcaccattatagcaaacttatagaaagctgcattatgtcactatacacctaggggagtggctttggggggaaaaaaagcaaaaatgccaccaagtactggcaaggacatagagcagctggaactcttatcccttgccagtgggaatgcaaaatggtacaaccactttggaaaatagttgagcagtttcttataaagctaaacacatgttctcatacaacgcagtaatcccacccttagatattatccaagggaaatggaaatttatgtgctcttgggattcataatggcattattcatatttgccaaaactggaaactacgtaactgtcccacgactggggaatggatgaacaagctgtggtttgcgtacatggtggaatgcagcatgtggcgggatacctcctgcagtggaaaggagacaagcacggttcacacaatgtggatggatctctgtacattatgtgcattaagaagccaggtccaaaggctacatactgtatacttctattcatatgacattctggaaaaggcaaaactacagagaaagcagatcaaggattgccaggggctggagaagagagttaactacaaatgtactcaggggagttttggaggatggtggcactgttctatatcttgattgtggtggtggttgcatgactatatgcagatgtcaaagctcccagatctggatactaagaagagtgaattttactgtatgtaaattatacttttaatttaaaagcagagaaaaaaaatcataagccaagtcagggaagtgagaaggatcttgttgtatgtggagaaccgtcatggaacaggccagaactgagcacagatcaggttgaatgggtaggatgaactgtgactccagaggcattgaaagggaaatgtttgcatggggcgtggtggaacacagagagccctcgggaggcccgggtagcaggggggcaggatgaagggggcatttcgtgttgtgtgagggatgagtagcgtggggagatgaggccagaggttccagccaggaactagtgcagttctctagtctgtagataaggcctgaacacagcagttggttgtaggattctggagagactggagcttagacctgattacattatatatgcactgtcttttctcagagatggggaaactaaggcatgaaaacattaacttttattttggaaaaaagctaaacatagaagtaagagggaggcctcctgaggcactttgccaaactttatgcacagcaactatgacctgcaaaatctttttagcctgggctccctctcttgacctgagactcttccagggagcctggtatccacaagagtggaagcagctggtcagggccacggaactggagatgccccatgggacagaaggcctggggctctggcaaagtgtcttgtaagtgttcctgtcatttccctccacgtaaaccaagtcaggcttgcaaatcagcagcctttcaggtcctttctctccttctggaagctcttgcatgttgcaaccccctacccaccccgccacctcccatcacagataaagattttgtaccatcagcctgcaagtgagttggatgaatgccatctgaaaggctttgttcgtttgcacacgaggtcgtgaatagctggcaacaaagaggattgaaccttggacctagtgtgtctgagcagtgccccagcccccatgccgctttggatttcagtggcctctgcagcaatttattattcttacatcagatgtttgaagtaggtgaaggggcaggtggcatgtgtctggtgaggttgctgacactgcttttggatgagagagagagtagtggttgaaacagagcattcaaaaaagcgtacactttaacctgtaatccgcaaacattcctttgagtttacccagccgtgggaaaggacgctgtacccctgccctattggctgcaccctttgctgttgatgtgaggctttatttacctgggaattgacagggttttggtccatgattgctcctttctccgcaatcacatttaatgcccatgatatctcatctttgcacacgaaggcaaagccttctactgctttttctcttaaagtgttcagcactcccctgagtttattagaaggatcagaagaaagagaccctgagtgtgaggctaggtcaaccggagaaattcacccaattatttcgtttctttgtttggatccctgcttttcatttctacctattctgaaagagaggcttaaaactaaagtccggttagttgaggatcagatgtgtcatacttttctcagaggggaggggacggtcactttgctctaagtttgggccatgaggtccacactgagcctacatggggtagggggaaaccgtgaagtgtgcagtgacctgagggtgccagatcaccccgagccgttgtggttcccactgggcaggctgtacgtggtgaaggtgatagactgcatgtctcatgcaggccaagtgcctgtcggtcagcttgagggagaagataccttgtctacctccccccacctgcaggctggctggctttgggtgcaatgaccctcctcttccttgaatcgctgtttcattgtggacctgttggaagtgccagcttggctggcctttggctggatccctgtttgctagagctttgttcctactctggaggagtcagctgctgtgccttctgggactgccaagagttgccaaggggagtggggagtcctctctgtggggtgtcgtctgaatccagcagccgcaccacccaggtgcttccctcctccccactcctaggccaatgtccttagtttctgctcactgatcagacgattatccttctccaggatgaccaccatcatctcatagtccttcctcactcccttccatgaagtgcttctccaacccattgtctctgtcatagtgaaatgattctactgttagtatcaagattttccactagtgctaataacaatccctgatgttatcaaacatgtaggatgggccaggcattgtaccaggtgtctacagaaatcctttgtgctgactgttgaccactatccccattctgtaggcgagagtgagccttaggaagggcgttggacgtggccaggatcacacaccatgccttgcactcacctctgatctctgagggccagggcctccctgtatacaatgatctctgcatctcttcttccagcagaagactcaaaagaactttcagatgtgggaggccaaggcaggtggatcacctgaggtcaggagtttgagaccaccctggccaacatggtgaaaccccgtctctactaaaaatataaaaaaattagccggtcgtggtagtgggcgcctgtaatcccagctactcaggaagctgaggcaggagaattgcttaaacccaggagatggaggttgcggtgagccaacatggtcccactgcactccagcctgggtgactgagtgagactccatctaaaaaaaaaaacacgaaactttcagatgaataagttggttctatcagagatggctcttaaagctcaaaagctgttttaaaaagccctgtggatgcgcaggctctcttagaccctttttctgtgttacagaaggggatataataccccaaatagggttttttttggtacaaactgtggatagtactagattttgctccatacagagtcctgttgactgaactgccctttcatgttgtgtctccagtgtttttatgggcaacagccatatacagtctacttcctatctattgtgaagttgttgttgaggatttcctgtattatttcactctgcattcatgtctcagttacctttgatccctagcaaactgtcccaagtggaatggcctaacccaggaatgatgtattatttcttacagtcctgtgactgtctgggcggtccttttgctaacttccccagggctcacgtgtgccttgtggtcaagtgatagcagcgttggctggctggtccaaggtggcctcacgtgtcctatagtatttgctagctattgtctggggctcctcaactctccacatgccccagtagcatagaccagcttccttacaccatggtggtctcagggcagcattctaagagggcatgtccaatgtgcaggtgtgtattaagcccctccttgcctcgtggttgctggcatccaattggccaaagcaaatcacatggcctagtccagaggccgactccagctgtctgtgcagacgtggcaaagaaatatggccacttccaatccactgcagtccagtccccaaaatccattcttttcatggcacattttggaatctagcagctgaatttcagtctctcttaagatactcatgactttatttggatggtgagcatatggttggttggagcacaggcttcaaagtccagcctgaattgagattctgacttgctctctgaccattgtgcctttggcgggtgactcacatccatttcttcatctgtgaaatggatatgatgatacttgccttcctgagattgttgtgaagttaattgagactatacatgaagtctctgggccataactgatctcattacaccttaattcttgtttctattacttattttacttctgtctctgggaagttcagagtttaaaaattcaacttgaccacagcatctttacttggtcatttctgcaaccaccatgttccatttcttttgtgtttctatttagatcttttgttttaagctacccaatcctttttggaataatatggggtattattaaagtaagactaaccagcaaaattctgtaaaaattaaaaaaaaaatcttggcgcttccagttcattggttttgctggtaagattcaggattatagtactgttgaacaagcttgtatagacgtgaatgagtttccacattcttatagatttgactcaagtgatctttgcagattttcacaagcactgaagactaaccagccttcctttaagtctcccagcacttaattcatctggtccaacacatgccgggttcttcagggtgttaggatgaagctcctgtatctgatcacctaccatattccacacattttccatacactctttctcatcctctgagaatttagcattccgggtgatgctactaagatggatgaataatttataaagttttagaattctaaatatagttctttctagtttcccttagggttcagaaaacaatatcccaaaatgaaggcctcagaagcaaaagtttttcactttctcctgccctccagctgccagtctccttctccccaaggctgcccttagaagctagattccctccatagaagctagaatccctcttccctaaaacaggtcctaggaaccagaacttgctttccccaaagccagccatcaaccctgaaaatgcagctctaactttccctctgccttgctatgtaaatactgtttataaaaacagtatgtgacttaactgtttgactgtaggtcataagacccacccctccactccattccagagagggtcttgccccaacccagaatgaaggaatgctgctcagagaggctgagaagaatctagatggacaggccttgctgggcttccccactcggtctgttggcattggaacctaccatttttgtccagtcacatttccacatgactgtccatactgtgttgaacttaagcatgagaatggacaatttcccctgtaactttgggtcttcattctgatggctcctgtgtgtacacattaaatcaatgtgtatgccttttctctaattaatctgactttttcgagttgagttttcagtgaaccttcagagggtgatggggaaagttctccttgacccctgcatttctaagtcagtggacacgtgaatctttggcttacagaaagataagaatcagctaaacatgttctttgaaactccgcattaaaacaacaacaacaacaacaacaacaaacttttgtcaaaggaattgttaaatcccccaaccttcatgtgcagtgaggtgagatccaggccccacttggaacaagttccatggagtgcgcacatcttgtgggccactggccactcctgaattccatggactccgtggggctgaggtgcagtggaaagatgagcagtgactgttcccagtgctgttgctcatcagagagcatgggatgaggtcactccggcgatctctcatgctttagcgtttccagctgtatgagggaggtgtggtgtaacttctcaggcggttgtgtggctctgggctcagtttttgttgagagccttctgtgtgtcagacactgctagcatcatcatgtatgtccttttatttaattcctccacatcacagtggatagaaaacatggttcctattgctacgagctccagagcaggaatttgaatttgccttcgaagcccgagctgctcacagcagctcactgtcttttcagctttcccatcaggatcaaatgagacgaagtgtgtggaaaggagaagcaacctttaaaagtagatcttggtaaaattactgttttctgaagttggaccagggaagctaagaggaaagagggacagtccccactgactgtcttggctgctgtgggccaggcctgtgccagtcacttggtgtcagtgagcttattggatttagctttcccaaccacatggacacggggtcagtctgtctgtcccagaactggccgggggtggtggatggagcctggactctgggccagtcacagcctgatgtgacactggatacactgcctgttagctgtgtgctcttgactttgttttttttgggagggtctcagttttgtcatcttttttttaataaaaggggtattaaataccatacctcaaagatactgtgaagaacacatacgtaactgcaatcgcacacgtgtagctcctctacaatgcctggcacttggaaaatccctggtaaatgccagttctgtgagggtggcatcactgttgctgttatttccatgttctgggttgggggcagaagggccgtcgggcccatggggaagtacccagtagaggccggtgctttgctttctctccttgtgtgtgtgattgcccgtacatgcactgtcagcacccgagttccctgtacacatttactgctaacagcggtgataagcgcacaagatcactttggtgtttgacccgtttcttggagaaagcaaagattcagtagggaaagtgatgtacatagaggagatgagcctctcagcaggcttggcggactgcatccgatcatgtgatctctttcttgcccaggacagcacggtctctgggccctttttcttttttttttttttagacggagtcactctgtcgcccaggctggagtccagtggtgcgatctcggctcactgtaacctctgcctcccaggttcaagcgattcttctccctcagcctcctgagtagctgggactacaggcgcccgccaccacgcctggctaattttttgtagttttagtagagaggtttcaccatgctagccaggatggtctcgatctcctgaccttgtgatccacctgcctaggcctaccaaagtgctgggattacaggtgtgagccagcacgcctggcctctcagccctctttctaattccaagggagaagggaggctacctgagattctacagtagtgcctggaccccaaaccttaaaagcagaggtcagctcacacctgtttctagaaacagcttttgtgtcccctgccccataggttcctgtagtggctttgggcagcatttggaaccactggccagataagatcccttaatgatgtgaaatactgcataaggtcgaagttccaactttaacatatctgggctaaatttttaaaactattcaacaattcatgaagataattaaagaacatgtgaaagtctgagaaggagagccaacactcatcattctccactcttaacacaatcatttttattccagtgcctttcattccaggctaatccatatggatacagatttttatatagttgtttcattgtgtacataaaactttgtctcctgctttttcatttaacgtaagcattttgcatgtggctctgtgatctttataattttaatgggcgcatagtattctttgaaggggctgttaacagaaattaacgttgtattggtgaatgttctaagtttcttctgttttttctcttataaataatgctgcagtatttgtgcataagatttattccttattttaggttagttcactgggataaatttacagaagtgagatttcttggcttaaagattttcagtcgctttctagttcttgatgttggatgccaagccaagttgctttccgataaggtttaatttacactgtgtccttttgcttttaaaataaggtagtgagacatctgcagcctggttgtgatgccaagtattgagatagtatggagaatgtcccagctgttgaaggcagagaatggacttacaaataagtggcgccagaggtaggggatctcacagcttgtccctgggtggcactggtcaacctgtcccagggcagcactcgagagggagggaggccctcggagtagccagagcccctggagagggctgatagatgccccacagggctggaggtttctgtatggagtcctgctgtaggtcactcatattaggcatgatgtgaatgtgctccactcagctactgtgatctgattgaaataaccttttaagaaaagagcttgcaactgtggaaagaccactgttttggatcaggttgacatggagtctgggctttgatgggactgtatgaaccgccttaacccctgtgtttacctgtctttaaagtggtctaataagccatgacagtgtcctctgcacaaatcctttgtgaaagaacaatttgtaattaataaaaaaaaaagaccttttgaaaaaaatagattaagacaatccttatagggttttggggtaatagtcacacagctaatagctgctgaaccttgagcaaagaaaatgttaatgagaaaatgtacattttaaatgaataaaaagaaacatacagtccctatgtatttcttgtttgttaggaactttttcaggcactcctccccgcagcgtcactcatgagtttctttttcttgggtgcagatagcacacattttgcatggtgtgcctcacacggtgtttctcatctctagctactttcaccatctttctaaatatcccacgtgggtcatatcattttaccaactttgaaaggatttgtcaggcctttttcaaatgcctgctttatcagtcctgaggctgcacagccttggccttgccatggagagatggcagcaggacagtggactccggggattcagtgagcacgcggacatgtcttgtctctgccttcttgctgtgaccagtgggtgtgatgtgctggtctctgccatctgctgtctcccagggcagcttgggaaagcctctcctttcccccaacttccttgctttcttcccttttcccaaaatccagatctaattctaatggtacccaaagagaagtcaactgaagtttgaggtttctccctttgaagataaggggtaattgctgtacagagaacctcagaatgggggagaattgctgtagtgggggagtcatgaggagtaaaagagagaacatgctagtgctaggcctggggtggatgttgaataaacattagtccctctcactcacacttgggttggctgtacctgggctgtactgccaagaatttccaactctgtaatgatttgtgatgagataagtcaggggagaagcttaattacaaattttccatttcgtttgtaaccctcagccctcttggggctctttgcatatcattctgagactcttttttttttttcttggagatgctcttcaaaacagagtcaagtgttttatttttttggtggtggggggtgacagagggtctcttactctgttgcccaggctggagtgcgatgatgcgatcctggctcactgcagcctcaaactcctgggctcaggtgattctcctgcctcagcctcccaagtagctgggactacagctgtgcatccccacacctggctaatttttaaaattttttgtagaagcagggtctcaccacgttgcccaggctggtcttgagctcctgggctcaagttgtcctcccaccttggcctcccaaagtgctaggattacagtcgtgagccaccactcccagcatggagccagttctgactcagtggttacagagcaggcctaggaaggaaccagttgtatggaagttaggccctcatgggaaggatttaaccaggtggtcatgggagatggtggcacctactggtgacaaggagcattgcactttagttctgtgagacctgcttgtgggctgaggtgaagtggggaggaaagcagccttgcggggatattgacatggaggtcagggaactgccgagcgtggaggagcgccgtggtgatgggaggaaggggcggtggagcagcacgggtgtgaaatgtgcagggctgcagcctggccggctgacgaggctgcctcctgctggcctccctgcggctgctccactgtggcccttgggccccgctcatcaccaagtgctgcctgagggcttcacctctctcctcccacctttttttcttacctattggcaatgattatttttaaatttttaaaatgcaattgatttttacataaatcacatgggaaataattttctaaaataccccccccttttttttgtaaagagacattttctagtccagtgtgcagaaattcttcatttttctaaagtaaaagaacctgcttcagctgtggttgggaaacccagaacaagaagtgagctgcagttgagagagggctttgtgtgccaccccctgactggggaggcggtggactcggagcaagtgttagaaaatggagccataaaagactccttaaagtgtcgggcgctcagctaacttagggctagaattatatatcatctcttaaaggacctgctgttcttgccttcaggaatgggaagttatcaccaggagctaagagctgacctgcttcataaactcttacttagacctaggaatgaggaaaagctgcatgcgagtggcatcccttgtgctcgctttctctgggctaaaacgtttaggatggtctggcagctcttgaagagaggatggtggcgtggaatagattcctctgaggccttgcccctcctgtccccggagctgagctgattattctcattggaagattggctttcgagcatttatcaagagatttgtacctgagttttcttgaacgaagagggaggcaagagggcttaaaatttccattaaaaatgaacaggcacccaggaaatacatgattgacggatgttggcccaggagttttcagtgtagttgctttccctttaggtaaataggattatgcgcacatttttgtaattttttacaattttatttttttctagaacagttttagacttacagaaacatggggaacattgtgcagaaagttcctatatatatcataccaagtttccctgttattaaaatcttacatcagtatgattcatttattgtaaagaaccagtattgatatgttattaactaaagttctctctttattcagattttttacaacatccccttgtgttctttttctgttttaatatgttatccagaataccacattccagttagtgattatgtcttcttactgtgacatttttttagactttccttttttgttatgaccttgacggttttgaggaggcttggtcagggattttttagaatattcctcgtctggggtttgtttgatgttttttctcatgattagatgagagttatgggtttgggagaggaagaccacagaagtaaaatatgcataaatttgtaaacaagttgttgaatgagttaattatggagagaaagggaagtttagtacccctgaatagtaactggaagaggagtaaaggctggacccccagattggaagaaggcaagtttaatgttcttaatgatgggacttaatgtctaacttgtgtcatgccttatagttcaaaggggatgggatagagtggttcttacattttcatgttatatcttgggaaactgaggctcagagaagcagcctgagttgcctaaggtcatagagatagaccaggatttactggatatgccagtgcatttgcaaactattcctagttgcattttctatgcccagaggttctagactcaactggctgggtcaccgatggccatttcatctgtgcgtagctatagggatttaaataggaggatttttgttaaatgaagacaattgaccgactgtgcgtggaatcaatgtgcaggatgattcaccaggctttctgcctgttagagaagttaaatggttgagaattaataattatgcgattgtagttcacgacttcagcacaagtcattgttacagttctcaaatgttgagcagccccacgttattccccaccagtgtgtttttctctgaggttacacagtaaaataagtgaagtgctgacctttatcataacatattttttatttgtgagcaagtggagtatgtataaagcagtttgtgactttgaatccaaaatagaaatttgccctcctctcattttcgcagcattgagtttcataaactaagttggagcagtgaaagtgaaactggaaatgcatggatgaagccagtggttctgaacactgagaactgcctgggagcttctagaaaaacccccaaggctgggtcccattccctaaagttgtaattatattggccagggcaggaacaggccttgggaaatccaaaacttggcctttctgtcttgttcctcactctgtactctacccaggtcttcattcttaaacctttcatatcttttgattcttgcctaagtagaggttttgggagctgttgggctggagctttcaaagcttgcagtaggctgatcttacttctctacctatattttacctgttctccctaggtgatgaaactaggagggcccatggctacttctgctacatggggcacaaaacatgcttcagaaatatttgagagactgaatgaagcctgtctctggtctctagggtatattacgttccctttctattctaatgatgagtaggaggaaagataccactctttcttgtaaaccaaactgttcttgctttcaatggggatttttattaagaagcaaaaactgatctcttttataaatgcatagataccagtgttttacacagtacaggcttctggttttaagagaacttttgccatggttcagagtgatcttactagcctagtatattggtttgttttacattgctataaaggaatacctgagactgggtaatttagaaagaaaaaaggtttatttggctcacggttctgtaggctgtacaagaaacatggcaacagaatctgcttctggtgaggacttcaggaaacttttcatcatggtagaaggtgaaggggagcaggtgtgtcacatggcaagagagtgagcaagagagagaggggaggaggtgccaggttcttttaaacaatcaaatctgtgtgaactctttcctttaccatggggagagcacaaagccatgcatgagggatccacccccatgacgcaaacacccccaccaggcctcacctccaacattggggatcacatttcaacatcagatttggaggagacagctatccagatgaaatcacctagttaactctggtgttcttttttcaggaccctttcccagtgagttaaaattaaatttgtgagtttattaataggtcacacagcctatttggaaagtaagtttttttgccttcttgtgagaagacctgaagattattcctctacactaccctggtggaacgccaaccttgaagaattagaaataagtccttctgcttctcccatgggtcactttatagggaaaatgcttgatcaggggaggtcttggtctttagcgggaaactaagtctactctgtaaaaatttgctttcgagtgaacagtattttagttagtttgtaatgtcttagctttgcagcttagcttagtcttaccttttgagaaatgggctgtgaaatataaattattacatcatttaaaaatttctggcaacctgtttttttccccaaaacttgagggttgctgtgtggattggctgtagtggtaattactgaaaagtcatcaaataacagtgaaaactagacaactgattagaagggaatcaagtagtcattcagatggtattttcggtaatttaatctgcctctgaccatatgttctagtcagctgaaataatttaacagtgacaacatatatttcagcaagcagagattaaaaacagcccatttattttctgttttctcccgcagtaatatttttatgtctccgttaacaaatatgatgttcgccatttaaattatatggaagcagctttggatgatttagcaatatacataacatttattctttgttattatctagttttatgtatgtaagcatgtttattttagtggtgtttcataattcaaaaatgttaccagaggtggtaattgtatttatattggacatgggtaagacatcagcgtgagatgaagccacatttttgctgcttttgtgactcaattcttgggcttccaacacctcacagcccctgccccccacccctgtcccacacaaatgactggctgggtgcagcagtctctgccactagcaagccttatggcattgataaatgtagtggttttagaatattctaaatattaaccaattttttttattatcctcctctcaaaactggaggctagtctcagctccaccaaacccgatttcacgtgagctggacatggtgacatggttcattatttcttatgaacagactgtgacagggcaacagtgagtgatttccaagactaggccataaaaggcatcaccgtgtttcccttgctcttgtatgtgccctcttcctcatattcactggggaagccagccgcctcttgggaggacacttaagcagccctactggatgggccccagtgaggaactggggcctcctggccacgtgagttacccatcttggaagcagaccccagccctaggcaaaccttcagagaacagcagccctggccgaaatctttgcagccccattagaaatcgtgggccagaaccattcagattcctgaccctcagacactgtgtgaggtaataaacatttattgttttaagctactgagttttgcagcagttgataagtcaggtagcccttctggatcctttttgccaatcctctgggaaacgaatggttggactgcacagtgccctgcacgcatagattcgatcaatagtgcctaaggggcttgctcatcttccagccactgtacctcctcatccccacggcgcctttcctcctccactcccctgaccacttgcctttggcaactgagccaagaacacttcttatttttttcttatttggatcagagacagattatactgggaatattctattaacaacgaaacctatatttacacttaattagtttccataactatttaataaactcacctattgggtttactgcttctgaaaatagtgtcatagtatttagatgtcattgctattttatgtacttagagataggatgaatttgagctgctgtgctctctgattatggcaggtaagtagacgtcgctcagccatggattcccgtctgattacactcatggccctggtttaattccatttgtgcctctgttgtgtgcatttgtaagaacaatttgggagatacatattttgaggttttaggatacataattttgaaccagattaaaatgtctaataacaataatcactaccatctggggtaagttagtaagtaggagaagacttagagttctctttctctggcccagatgccatttacaaagggagcgaagaccacagcgctgtactttagggcatctaggtctttccagaggctgcgtgtggatgcatccaatactctagaccaaggggtgatgccaggcagggcagcagcgttctcctgtcccatgtttctcatttggttggcagggcatcctagacctctggttaaacttccctgatggaatgcagtatttggtcagagctgctgagccctcccttgtctacactttcctgaagcaccatctgtctgtggggtaatcattctgcattcactgtcaacatccctcctttgagggtggtggaaacaaagcagagatgggtctgcatcctgggaaatcaaagcgggcttacaagatcacaggctttgaattctctgcaacttttgacccagcataaaccacatcatgacttgtctaatctcagtagtttatacttgtcactaaaaagaggacctgtctgtcactgcatcagtttccccttaaaagggagaaaacacacagatctgttggtagcacagccaggataccagtggctactgggcgcaagagccttcttcatacatttgcattcagtacatttccatttttgagcggcactgatgctagtgtaaataagtcttataatgtatgtaaatgtatgggagggggattgtaacgaaaaacttccactgcagagtaggcgaagccagtacaatcaatctgagtaagtagggcgaggatttttttttttcagctgcatttattattgagcaactattgtaaggccaccagcgcacttggtaccataaggatacagaaggaatatgacagctttccttaccctcaaagaacctgaaatctttttggatatcaaacatgggcgaagcaggtagcaaatgtaaaagacccccaagtgctaactgaatgtatcacctacacaagaacactgggcaggcagggacccgctgtgcaagaggcattgagcccagcctcctaatcttagagaagttagactccaacacccactgccattggcagaggcgtggctggaacccaaggctctggctccgaggccagtgctgctccccacgtgtcatgcggggtctcctcctttcctacttgtccctgcagcattggcctctcctctcccctgcactgacacctcaccttccctgagtggtctccctcctgctcaccagtagctttaattacccggggccttttcacaaccccagatttgtgcctccatctgtttgcagatgcctcctcttggtatctcacagtagcttcatcatttccaaaccaaactcctctatatttcctagcactgcttcttaccctccccagcaactgtcttgcatttcttctcggtggacatcacacctgtgtaggaagtgctgcagtcagaaacctggggccgtctttgattcttcttccccttcgcactcctcctgctgcattgccagcccctcctagctgcacctgtctccgctctgtccctccgggacctggactgggtccagcatgccatcttcccattgctgcattactgaaatggcctcctgggctctcttgtgccctctagtctgcccccaccttatagccatagtgatatttctagaatacaggtctcagactatcctgccgcttccgtgccctcctgtttttgatctttcccttgttccatctgtctggtacacccaccaccgctagtccccattgttccttcttgcctcccttaggtctccaccgaggtaccacttccgtgtacagccttcctgggggccctgttctacgcggggcctgtgcctctgggccgttgttccccacgcttgtctgtgggtgtctttgcacagcacaggccaagatgcctggcccctgctgtgtctctaggagctgactttcttaataccaggccaaggccttcggtaggggtggagagaagagagtgggacaagacaagcatctacagaccagtggtgggttgagtgtgggtgctccatcagccagtgaacctagtcagccatctttgtaggaatttatttctagtgaccagacatattctgagatgaatggttagtacaatgtcttaattgaactttggctatttagttgagggagggaggaagctatcttatctagaggcagtacagctaaatgactgagaccataaactccagccctgagctccccagggtgtggatccagcctcatacgaacactaaatgttcagtgccttggcttcctcacctgtaaaattggaatagtaatagcattgcaggaagatgagcatatgtgcagtgtccagagtggggcttggcacctcgtaaatactgtgttaggcagcagtcaccatggtggttcctccttttcattgtcctcccctccccctccttcccctcctcctctgcctcctcccctcctcgtcccctcctcgtcctcctcctccccctccctctcccctcctcctcctttccctctccccctcctcctcctcactgtcctccccctccttctccttgggggctcctcttccccttccccatttttactgtaggagcaggtatttaagatgataatctgcaggttttggcctgggagtccagaacaaaacagtcctatgtgagtgacctcctagaaatgtattcttgggtttttatgacattttgagaatcaggctcttataatttagtttaaatcgagccctagcctgtcattcccactctgacttacataaagggccagatttagctttttaccagctgcgtaacctggacaaattgcttagcctatcttatgtgtcctcattgtaagacaggaattataaaatgcaggaatgagagagggtcaatgcacaatgcttggcgcatagtaggtattcgtaaatggcagggcttgttccatctgcttggtaccttgtcatgccctaattatatgggcatgaactcaccctgcactagttttatagtaggcatcgttgattggaaggaagaagggaggttgaggagtgctcaccctgcactagttttatagtaggcatcattgattggaaggaagaagggagggtgaggagtgttacctgtgggcaaatcaatcttatttgtgggcacaaaaaaaaagtttattttctgggaaaacactgatggttgacctgcaaatgtcagataatgactacagatgatgactttatttttacatgtagaaaatatgctagagtcaccagccccactggcagtgttcacttttgattttattcagctacaagtttaaatgatttgatccattagctggtgtacatagaaggccagatgctggggtgggggttgagaggtgggaattatcagccacaatgctacaatcaagcctcaaaataaaaattaatgcgtaattaaaagtctgcagagtgtgactgtggtaatttcattacttgctgatttcgtattcacatgtatctccttactttgtaaagccagttggtgggttaaattctctcaccgttgcctatctgccagggttcccgcaaaatcagtgccagtagtaaattgaaagtttctttatagccaagtaatctcaaaagccaagttataaatatatcttttcaaaacttttttgcagtaaaaattatttaaattgggatacagctgcattctaatacatttgttgcagcgtggggtaagacttgcaaaagtacatggggcacttaaaggccaggaaggtgttctgctgggtgggtggggcttggacccccggctgcagaatggtttctctcaccagcccgccaaggctacagttcctcccttcctgccattttcacggcagccctgatgtgataaacccagctgtatcgcctcattagagaagcaacggaagcaaaagctagccaagagatgggggagtcttaggcacagtttctgtctaattaccgcacctcttgagtaaaaatgcagattattggcaaagcaagttgcatttggaaaaaatgtgtcatttggcccaggccctgaggtttacccttctgcagatctcactttacgttttaagtaaagaaccaaaacgtctccagtggtgaacgtgcgtgcagcacacagtccgcactggtccagaggagtgctggtggaataaacccggggagagctgggttccccgccccgcagggagggattactgttgcgtatccgcctaatcgcatctgctcaggaaaatggccagctgacaatgcttggctcacaggagtctggtgggaaaattactagccatggcttatttctgatttgggttatatacagaaacctttcttattttagtcacagaaatcagattcccagtggtggaaaatatatatttagctctgtggtcgtgcagttgttatttagtctgatttaatgttgataaattagagtaaattgtttgcccagatgagttgaataaattctgccagagcttatatcttattctgttttcacattgagtccttaatatgtatctctgtttcattggcagtcctattagagtaagtcctagaaaaagcttggtggccctaccccctgctcctgtgttagtcagtggaattaaatcatttaacactctctgaggggagctcaaaggagcccttagggagaatctggtcctaagatgtccataaaccacctaagatgtctggagagctaccttcattttaatggctttaatttaaccactctagaattatttcatttaatccactttccctatctcgcttccccaccctcacaaatccccaaagccctgggagtttttggagtatttccttcccacagataagcaatacaaatataaaatgaagagagaaatgcaaacccttgggaaaggtcatgcccatacttttctccccttgcatcttgactccctaacaatttctggtgtgtggggtctttaagatgtgccctccctcctgctcatcagtgcatccccagggccaagtgttaactctcctaagactcggtatgtattgaactgatgaatgaaggtgtgcttgaagaacaagtcaactcattcagtgtctttgttcccctaggaggactggaatgaaattgaccccattaaaaagaaagaccttcatcacagcaatggagaagagaaagcacaaagcatggagaccctccctccaggtactgccaggggccaggaagccatcttgctttgagcacgtgattgggagtggactgagcatggctcttggagcaggtggtctgtggggagaggctggattccataggtcagcaggagacaccgccctaaagcactgctttgccaacttccatcggacccattagtgggtggtcaagttaaaacttttataggaggtgaccaaaatgtgttgaaaagaaaataaaaatagactaaagtagaaagtatatattagtatatattagttcatgaaatatttttaatagactttattttttagggcagttttagcttcagaacaaaactgaggggaaggtacagagaattcctgtatacctcctgcacccccacccccaacacacatacaacctcctccattgtcagtatcccccaacagagtggtacatttgttacaatccatgaacctgcattgacacgtcatcatcacccgaagtctgtagttgacattagggttcactctcgatgttacacattctgtgggtttggacaaatgcataatggcgtttagccgccattgtagtatcatacagagtcgtttcactgccttaagagtcctccgtgctctgcccattcatcctttgctccccccagcccctggcaaccagcgatccttttgttgcctctgaagttttgcttttctagaatgtcaggcagttggaatcatagggtatgtcagcttttcagattagcttctttcactgagtaatatatatttaatatatatttattttaatatattaatatttaatatatatttaaggttcctccatgtcttttcatggctggatagctcatttcttaatgaattaacattccattgtctgggtgtattagtttgtttattcacctagtgaaggacatcttggttgcttccaagttttggcaattatgattaaagctactataaatatctatgtaccagttttcgtgtagacataagttttcagctcatttgggtaaataccaaagggtatgattgctggatcatatggtaagagtatgctgagttttgtaagaaactgctaagttgttttccaaagtggctgttccattttccattcccaccacagtgagtgagggttcctgtttctctacatcctcaccagcatttggtgttgccagtgttctggatttaggccactctaataggtgtggagtagtatttcacttttgtttttatttccaattctctaatgacatatgatgttgagcatcttttcataggcttatttgccatctgtatattttcttttctgaggtgttcactccttttgcgcatttttaatccagtggttcattttcttattgttgagttttaagagtctgtatacatttaggataatcgtcctttatcagatatgggttttgtaaatgtttctcctagtctgtggcctgtcttctcattgtcttgatagtgtcctagaagattttaattgattaaaatctggcttatcaattatttccttcattgtcacgcctttggtgttttctctaaaaagtcttcaccatgacaaaaaggtcacctagattttcttctatgttatcttctatgagttttatactttggtgtatttacttatttatttgagacagagtctcactctgttgcccaagctggagtgcagtggtgaaatctcagctcattgcaacctccacctcccaggttcaagcgattctcctgtttaagcctcccagtagctgggattacaggcatctgccaccaagcccagctaatttttgtatttttagtagagacagcgttttgccatgttggccaggctggtctcaaactcctgacctcaggtgatccgcccgcctcggcctcccaaagtgctggaattacagcgggagccaccacgcctggcctactttggtgttttacatttaggtctgtgattcatttggagttaattttgtgaaaagtgtaagagctgtgtctaggttcttttttttttttttttttttttttttggcatgtgagtgtccaggtcttccagaaacatttgctgaagagactctcttctctccgctttattgcctttgctcctttgtcagagatcagttggcaatattcgtatggttctatattggagctctttatttgcttccattggtctatttttctgttattttgccactaccacactgccttgattaccatgacttcatgtaaagtcttgaagccgagtagtgttagtcacctttgttttctttcaaggtagttttagctattccagatcttttgctgttccatataaatttgtaaattttagaatcagtttgttaatatccacaaaacaacttgctgggattttggctctaattgcattgaatctatagatcaagttgagattaactgacattttgaccatattgtcttactccccatgaatgtcaaatattttttcatttaattcttttgataccttttatcagaattttgtagttttcctcatacagaatttatacatattttgtcagatttgtacctaagtttttcattttgggagtttctaatgtaaatggtcttgtgattttcacttcacattccactcctttgttactggtatataggaaagcagttgacttttgtatattgacctcacatcttgtaaccttgctgtaattgtttattagtcctaggaaatttttgttcattgtttcaggttttctgcacagacaatcatgtgatctatgaacaaataggattttatttattttcttccaatctttatacttttttttttgtcttatttcattagctaggacttccagcacagtgttgaagaagagtggtgaggggtcatctttgccttgttcctgatcttagtgggaaagtttccagtttttcaccattaagtatgatgttagctgcaggatttttgtaggtattctatatcaagttgaggaagttctcatacattcctagtttgagaatttgtaacatgaatgggtgttggattttgtcaagtggtttttttgcatctattgatatgatcatgtgatttttcttgcttagctagtggacatgatggattacgttaatgggttttcatttgttgagccactgttgcataactggcataaatcctacttgatcatggtgtataattctctttatacattgttgaatttgatttgctttattttgttgagaattcctgcatatggtcatatgagagctattaatcagtacctttcgtttcctttttttttttttagagacagggtttcaccatgttggccaggctgatcttgaactcctgaccccaggtgatctgcctgcctcagccctcccaaagcgctgggattacaggcgtgagccagcacacccagccatacctttcttttcttaaatgtctttgtctggtttttggtattagggtaatgctggcctcatagaatgagttaggaagtatttcttctgcttctgtcttctggaagagattgtagagaattggtataatttctttctttaaatgtgggtcagaattcatcagtgaacacacctaggccaggtgctttctgtttgggaagattattaattattgattcaatttctttaatagatatgaccagttcaaattgtctatttcttcttatgtgaattttggcagagtatgtctttggaggaattggtccatttaatccagcttattgaatttatgggaatagagttgttcatactattccgtattgtccttttcatatccatgggatctgtagttatatccccactttcatttctgatattggtaaaatgtgccttttttccttttcacttagtctggttagagattcattgattttattgatattttgagagaaccagtttttgtttttgtttttttctgtattgattttctgttttcaattttattgatttctgtaataatttttagtatgtcttctacttactttggatttaactttctcctttttctagttttttcaagtagaatcttagatgattgcttttagatctttcttattttctaatgtatgcactcagtactataaatttctttggaagcactgcttttgctgcatctcacaaattttcataagttttgttttcatttttatttactttggaaatttaaaatcattttttcttgagatttcttctttgacccctgtgtcatttagaagtgcgttgtttagtctccatgtactttgggatttcccagctagctatctttctgttattgaatctagtttaattgtattgtgttctgagagcacacagtctgatttctgttcttttcaatttgttaaggtatgctttgtggcccagaatgtggcctcttttggtgaatgttccatgtgagtttgagaagaatgtgtactctgctgtttttgactgaattagtctatagatatcaattatatctagttgattgatggtgttgttgagttcaactctgtccttattgagcttcctcttgcaggatctgcccatttttgacagaggactattgaggtctcaaactataacagtgagttcatttatttctccttgcagttctatctatcatgaactgcatggacatttttatgcctcatgcatttttatgctccttttaggcacatacacattaaggattgttgtatctttttggaaaacagacttttaaaaaatcattgtgtagttctgtcttgatcccttaaaaattcctatgatctaaagtctacattgtcagaaattaatatagctattcttactttcttttgattagtgttagcatgatagatctaacttttcttggtaaaggccattctttatcattttacttttaatctatgtgtgttgttttatttatagtggatttgttgtagacaacatataattgggacttatttttcgattctcacaatcttggtattttctttggtgtatttagaccatcgatgtacacagtgattgttgatatatttaaattcatatttactatatttgttattgttttttatttattgcccttattctgtgtttgtacttttacctttcacactttttctgccttttgtcgttttaattgagctttctgtatgatcccattttctctctcttctcagcatatctattatgtgtcttaaaaaaaaattagttggtcttctttcagataacactatactttttcacaggtagtgcacgtatcttataacaacaaagtattcttgattcctccctcccatcacttatatcattgctgtcattcattttacatccacataagcatatgtatataatatataaaagaatacatgatggaatatattgttgctattattatttcaaacaacccattatatgatagttcaattaagaataagaaaaataggcgaggagcagtggctcatgcctgtaatcccagcactttgggaggccgaggcaggcagatcacctgaagtcaggagttcaagaccagcctggccaacatggtgaaaccctgtctctacaaaaaatacaaaaattagccaggtgtggtggtgcgtgcctgtaattccagccacctgggaggctgaggcaggagaatcgctggaacctgggaggcggaggctgcagtgagccgagatcgtaccactattctgagcctgggtgacagagcaagactacaactcaaaaaaaaaaaaggaaaagtttttattttaccttcacttattccttctttgatgcatcctttcttcatgtagatccaggtttctgatcgatgttattttcttatgttaaaagagctgcttttaacattttttgcaaggcaggtctactggcaacaaattccctcaacttgtgtttgaggaagtctctatcccttcttcatctttgaagatcaatctttttttttttttttgcgacagagtctcgctctattacccaggctagagtgcagtggtgctatctcagctcactgcaagctctgccttctaggttcatgccattctcctgcctcagcctcccgagtagctgggactacaggcgcccaaccacacccagctaatttttttgtatttttttagtagagatggggtttcaccacattaggcaggatggtctcgatctcctgacctcgtgatccacccaccttggcctctcagagtgctgggattacaggcgtgagccaccgcgcctggcctgaagatcaatcttaaatggtacagaattctaggtggtcattttttttttctctgagccctttaaatatttccctctcctctcttctttcctgcatggtttctgagaagacattagttataatccttctctttgctcctctattgataggtaaggtgtttctttcaattttttttctttatctttgattttctgcaatttgaatatgatatgcctcagtgtagtttttggagcctttatactattctgtgtgttctctaagtttccttaatttgcgttttggtgttcaacattaatttggggaaattcttagtcattattgcttccagtatttctcctgttcctttctctctttcttctccttccgatattcccatcatgcatatttacaccactgtaattgttccacagttcttggatattatttcaatttttttcatcttttttgtctttgcatttgagttttagaagtttctaatgtcatgtcctaaagtttagagatttttttcctcagcatgtcatgtctgctaatgagcccattaaagacattcctcattctctacagtgtttttgatctctagcatttccttttgattctttctcataatttccatttcgctgcttacattatctgtctgttcttgtgtgttacctactttttccattagagtccctagcatattaattatagttgttttaaattcctgatctgatcattccaacattgttctatatctgagtctggttctgatacttgctgtgtctctttaaactgtgcgtgcgtgcgtgtgtgtgtgtgtgtgtgtgtgtgtgtgcgcgcgtgtgtgtgtgtgtttaacctcttagtgtgccttgtaattttatgttgaaagctggatgtgatggacttggtgcacggaaccctggtaaacaggcctttagttgtgtggtgttaaggtgtagtgggaggggaagcttgctatagtcctatgatttggtctcattcttttagggaacctttgtgtctgggctgtgagcctcacatttgcttctcagcttccccctctccacatccttaggtgatactaaagtctagcagaggctggttatttcctgttcctcagattggacaggctctgataaatgctagcagtttagtccctgtttaaatagtttctcccgatggcaggccttattaataagaacacagtgccctggcttctttcaaaatggttattttcccctctcactgttgtaagcatgaggggatatttcttcaatattcactgtgaggatctggtagagctccaggaggtaaaactcacacaaatatagctgccacacccccatgactgggtccccctggagtttttaatctcttaggcttgtccacagtgagcctccaggaattttccactacagtttaggttttcctacccccgtagtggatcttcaggggtttctacttacaggcttctgctccagtgaattgtgattccttgtattcacctgtccaatttggggggctgtggcttgtgacatttctccaacagatccaaggcagatctctaagaagtgctgatttttcattttattcagctttttactgttaggacggaataacgactttcaagctccttacatgcctattgggaactggacgtccgtttatgaagtgtttgctttgctggcaagagtgtttgctggtgagagtgtttgctggtgagagtgtttgcacgttgtgttcttgactgtggttggacaagcgtcaccccagggagtccaagcccctcctttgtgccctccccatgcgttgtcccacctacaccagatgcaggtatgtcactgtctcctccaggaactctgactggacgcatgcatgcagtcaatttgtgtgttaagtcggcctccctgtcatctttccagctcctggatgagtcatgaagccctgagccacagttctttcatatgtaaagtaaacattacccacacaatggggagcatctgaatagaatagttaatattcctttattataataataggaagctaggatacacacttctgttgtgtggattaatgagagacttcctatggattatcttctattaaaaacatacaagtgttctgatggttttcaggcaaatagagagagggagggaaaagccatcttcaggtcataggctggatttgaccattgagagtcataccttacttaaaatcatttgagtgctcacattgactctgcctttcatatccttaactattgcatacagttggttttcttatcttcaaagagatcagaatgtactgatttgcctctcttttgagttattagtagtaatttttgataaatgcacaatgtctttttattttgccaaagggctttctttcctttttatgttgaaaccatttttcttactaaaccaacatacacataatttttttgttgttagaaattattttcttgtgattgaaaaatacattttccctaagcatgaggaacacagctaaagttttatggtttgcaagaaaccgctggccatggcacttcccagtgtgtcagtggtgtgttcaggaagctcagtggcttcctgtgttctgtgtgttgggcatgtagcagttgtagacagatgggcgggaagacatgacaccaagctggatgcttttatggccacagaacccactgacagatgaaggagccagatctaacagggcagagcagtgatgttccaggccaacagtctccaattttctgatcgcacactctatgaacagacgtatatttagaccacctcccacacacatatgtattaaaatgcttacttaggaattacatgcatattgccgtacagatttattgatacattctaaatgaaatgggatagttcccttgaccccttcacaggactcagcccacagctctcagcccctcatgggaggagcagcatgcaggtgagtgggtgcaggggctggggtgagtgcttttgggcatcggcaggagtagaactctgtgcagccccccggcagcatctgggtggggctacctgtgacccctggagccctagagggcatatgttacagtgtgctcttagatttgctgtccacagatgacttaagtgttagctcagtgcaaggtcagtgtgacagccttttgcatccaccctcttggtacctgaattctcgtccggtgtccaggaagaatcaagttgtgcaaacaaattgaaggatggtgaatgtggaggactttattgagcactggaagtggctctcagtgggatgggaagctagaaagggggttaagtgggaagatggtcttcccctggagtcctgctgtccccagccaaactcttctccaaagtcctgctgtcaagctgtccctctgaaatcaagctgattctctccaacatccggctgtttcttctctccttctctattgctttgctggtagggcctggggtttttatgggtacaagatggagggtggggcgggccggggtggttttggaaaaggcaacattcgggcaggaaaacagaaatgcatgttctcactttgggccctacggttccaggcttgagggtgtggcgtttgctagggaccactctctcctacccagtatttccctgcctcctgtttgtatcataaagtgtatttaaaataagctattataaaggatgaggaaaatacttgacaatgtctgtcattttctttctttgccccagaagattgtcttatgtggccccactttggagactaccactcttggggctgccgtggtcacaaaaacccagattattgttttaactctatttcttgccttggttcatcgtactttggggaagaatctggaatttgtataaagtataccacccaagtggcagtcccagctggaagtcatggaatgggggcaagaacaataacctgggagcacgggatctgggttcggaacaaggatgatggccgggagctctaggctcagctgtgccaccagtcctgtggccttagacaagttaaggagtatttgggttttgttttccttgtctgtaaaatttagatacattcttgctctaaaactctttgattctgttaactgtgtcttaccatttccctttaatctctattctcagattggaatcaccaattttattttcttttacatgctgtaaaaatatatctctgtagttccccccaccctcataccacatttcaggtctactgtggatgagtttttgcccataaactctgtgacccttgcttctatttcagcatcatgctttctacttggaaccactgaattttttttttcagtgttggtttttaaaatattgtcttcaaatagagtatgtatattagtcaatattttgtattttggaaatctatctgatagagaagaatgtcattttttccccttggtgtggaaaaacttctggattgaaaaataagtttctccctgtaattgtctctgaatctgaccagccagccagctggcagaaggactggcaaaggagcgggggccggaagaggagcaggggccagtagaggagtggggccggaagaggagcaggggcagctgtaggggctagaaggccgaggtctgcctctgaggacagctgttgatgaggttcttgttggagatctctcaccctttggtcaacgtggccttttggagcagattttctctttgcctttatgagaccttagtgtcattcttgtattccttagtaaccttgtgtaaagggctgaggcttaggagagacgagggtagggagagagttcagaaaggagagtcctaaggccgtctggattctccttgagccccctccccatcctggtcctgggctgtgtcttcatcacagccacccctccccgatgtgctgttggttcagttaccccagacagtggatttctcagaacagaaattgctaatgttcacgtaaagatgaatgaaatgggaatgatgaaatgtgttaagagaacttaaatccagggtgtgaattgccactgatcctaacagagacgttttagcttttctacttcccacctgccggaagaaagatgagataaaccacttgtgttatttgttcagcattgctgcagcatcagagaggagtgttccccgaccctttgtttttctaggtgacttaatgggttctggcattgtgcatttatctttttaattgtggtaaaagatgcgtaacactaaagttgccattttaagcgttgttaagcatacaggtccgtggcattaagcgcattcacagtgttgtgcagtcatcaccaccatcaattagagctgttttcatcttgcaaaatggaaactgtacccatgtagtaccaatgtcccattcctccctctcccaggccctggtattcctgtttctatgaatttggttcctctgggtccctcatatgagtgcagccttacagtacttgtcctttatttctggcttgttcacttagcataactcctccaggttcacccatgttgtgggtcagaattcccttcctgtgtctctgtgaaccatgtgccctgtgatacatgtcgtgtgaggtggaaccgtgtgacacttgtggggagcgaagtctacgtagttcttcatgagccaggcctgaggccagtgatctgcacagtgttgtcataaggaaaataagtggctgtcagtgtctttagggaagcatcttttaaaaagcaagcaatgtgtgtattgtacgttttagaaattcagataagcaaaaataagaaaattatattcatacataattctaccatccagaaacaaccaccattcctctcccactgcgtgttcctccatacttgccctgggcgtatacccaggtgggtgtgctgcccccatagctgagacgaaggggtctcctctgcatgggatgcgccaagacccacgcacttgaagcctcaggccttgcacagtttcttagagttggctcctgggaccaaatgctcctgaagcatctggcctctctgacaacaggtcctgagttttatcccacattcaaagttcaatcttttcgtgaatttctatgaaaattcaggtcatccacaaggtgactagcatttcagtagatttgggggatttgctgagacgtctctccacacacgcccatctctctttcagagccccctctgggctctgactccctgatcgggggccaccctcctctctcttctctcctgaaacggggcctttttctatgggcagttccctaccatctgcttacagctagatttttacaaatacagcactgtggtgtaccatctctgcttgggcgatatatcgggaactccttttcacatccataaacatctcctatagcattttaatggcagcaacatctcgaccgccatcggctcattgaacttattttttgttgtgggacataaagaggggttccagccagtatcctgagaggtaaatctttgtttaagtccatgattattttcttgaaatgaattcctaaaagtgaaattgcagggtcaatggcaatgcatgcattttttaatattagttgccattttatcttccacagggggcctattttcttactctagccaacattaaaaaatcttcattgtccttctcctgttccaacaagcaagaaagtggagaccaagggctgagatcagtagccagaaatgtaatggagctgtttaaaaatagttatcttaagctttattagtcgaaatacagtgtctagaagcagtcacgtgacatccagtgttctctgggctcccaccccatagctgaagtgtttagttctcttcagagcacagagtgttcagggatgctgataaactagagttagtccggctgacagtgactcagattttgaggaagcggaagcagtgtccgatgaggaacatgtgcagtaactgtggatgtttttacagaagggcttccaaggggaagtgggatcatgatgtctgaatatttgaaaggctaccatataaaagaggctgaagactttttttctctttttatttgagacttctgtttcttttatttgagcagaaattagagggaagcatttttttgtttctgttgttgttttgagacagggtctcaccaacccaggttggagtgcagtagtgcaatcatagctcactgcagcctcaaagtcctgggcttaagcagtcctcctgcttcagcctcccacacagctaggactacgggtatgtgccactatgccagacacatttttaaaattttttgcagagacagcatctcgctatgttccccaggctgatctcaaactcctgagcccaagtgatccctattccttggcctcccaaagtgctgggatcataggcgtgagccaccgtgcccattcaggaagcagcgtttgtttttatctgaggaagcccccaccaacagttctcgctgtccagtgaaacagctgccttttgaaacggggggctccccatgctcagcacctcttcagctgtggctggacattagggactgtaatggaaagattttcacacctggagagatgatgtccacagttccttctgagtccaacaacaggtgatgccagtgtttcagagacaggaacacctgctctcaaagtcagagactcagtcactccagggtggagacaggactggcactgccacctgaaagggggctgggcagctgagaactgcacaggcatgcagggttgctttttggtgtttcgcttcaattttccccacttaaaagtgagttgtcgggtgcagtggagggaacacagactgggcataattaggacctgggtttgagttgtggttccatcgtcttacagctgtgatatgttggataagtttaacttctgtgccttagtttcctaacttgtaaagcagaaaccctcatatttgacatggttatggtatggtgtggacaaggtcttgtatgaagtagcagaccaagtagtcactggttaacagatgctgtctttctctccttctgtctttttcatctgttggctgggattctgggcagtagattcactttgatattattactgatatttaggatgaaaaagaagattggtcaagaccatgtacaataggctaaatttattatggttaggtagtacaacatataacgaaaaatgaagaattttcatttcaaatttgaagaagagatataggatgattcatacatgaagatttattgcactttatcaatttgatactgttttgtggtatatttttagttgttttgatagcacagataattttaaacaaatgaaaactatttcctctataacatctgatattttcttaggttttcttttaaatagctttttatcacttctttggatttcctggtttttttgtccttaatcatggatgtgtgggattccctatttcaagagacggtttctcacaggtgaagaaaatttcctgtgataccacatatccagtgacaaataataaaacataatttatgggcctttgtaattgaaatggatctatttgtttgtaatcctggccttgtcctcgtcttttctttcatggtgtagcattatgaccttctagaggaagaatattaggattttttttcttttaagcacagtaaaattacattcaatttgagatcaaccaaataaatctgagagccttgtcctttgatattaaatacattctgtttcccttccttggctgctttcccagcggttgctctgttttacgtggggtagctttagatttgtttaagctgtctttcctggggaggatttgaatgaagagttgcagtacagcagtgaatacctgtatagaatcctgaagcctcctgcagcctgaatccactgagactctcagtttcctgcacaacgggacctgcatccaggaagatacctcccctccccttgtacacctgcgggtggtagatgacagctctttgcccaagagcatatgtcctgatctgctgctgaaggacagtcgcaactgagagtcctctaaagaccgcatttgtgcatgtgcctgtgcgtgagcctctgtgtgctggggtttgcatgcgcctctctgtgctggggtgtgcgtgcgcctctgtgtgctggggtcttcatgtgctttgtgatgttaattctttgaagggtcagttttataggtttctgtcatcttttttttttcaaatataaggtttagtaaaaacaaaaattttaagaaagaagtggcattgtttggaaaggtagcattattttaaaccaacatttatttgaacaagtcatccaaatgcaagtagtcccctgatgacaaaagcgtctttttcaaaaagttcacttgaagattggttattaggatcccagaatgaactgtcccatggaaatggtgtcctgagtggcacttaggagcgctgtctggctgtgtctctggctgcagccaggtcctagagtgtcagccacagagctgatgctggcggggccccgagcagccttcccggggcctcagtgcctatgctcagcctccactcccaggcaccatggaccgttacagtcgccagccactctctgctcaagggacactgtcctgctctccagcctcgataagatggggagaaaagttcccaaaactaaaccaggaaaaaacagattctgaaaaggtagctataactcagagcctggtggatgggttacgggagggagaagaaattctgtacccaaggaagtagcaaagcacaaaaccttgtgccctgaatgatagcgggtgtgatgaagagtatcagtggggaggcatgccgactaagtcaaagatggggaagagaaaaaagaaaaagttgctgggcctgaagtctgtgtaacccagggagcagtggccgggtagtggctagtcaggacagtgggcagggatgcgtcctgcagaatggaccggcagacagaagtggtgggaagttcacctcccacaccagccttagggcccccttctcctgcaggggtccagagccaggacttgtcaggccaccgtaggtctgctctgtctctccaggtcctggcccttctctcccagaggcagaagaattaacctgggcccatcccctctctgactgtacacattgtttttcatggctacagggataagaagggaaggccttagggccatcagtccaaaggtaatggacaaggaatctcccttcctcttgcggttagcccagcccttcaaatggactggcctccatttgccatcagacatcagatgcagctgcgaggtggccaggaggggagggacactctccccacagtgccacaggcctctgggaacagtgtcagaacaagttgcaggaacgcctgtagggcttagcaggatgttcattttcattactgaagtgcactgcttagcagcttccgggctgggcccccatccaccatagaggggagcagagagagctgtggcagcctattccagtgcgtgcggaggggtcagtgctgaagatgacaagcataggtctgtggacacgaggggaggagagagagcaagaagagcatcccagctctgcggggagaagaagtggagcctgcccgttcccattgggcctccatcttctctgtccagacttgatctccaaactgaaaagggtacagcaaacaaggttagaagggtattgaagtctgagtcaggtggagagagacaggactcattttaaacggctttcagtgaatgtgtctccaagtccggaccaaggtcaagacagggagggcacagccagaacccgagaggtggctataatttctggggagtgacttgggagtcactgaggtgccggcagagcaggaacaaacaccattgtctctgtgtttgttgctgtgttcagtggcagttagatgtggttaaacttgagctctagccttggtggaatttcaagttattagacagaagagtggaagcacttataaggccccctggcaagagggttttagaaaagctgtggttgggatagagctctgcgtgagggggcaggaagaggcttgcagagagaggagaaagaaaagagagagggtgcagagaggcagcagctagggaccccagggagggctcctggaggaggtagccacattgagaggcagctcagctggcaggaggggtagacacatacatcgcagtggccctgccttatctgtaagtatgcacagcatcagcggtgcgggcatggctaggaagaccagctttagtaagagttcccaggtacaccttctggggttgccgatgggactgacaaaacagtaatgaagtattagccaggttagtggaagcatggcagccttcctgagaggtgctgtgcccgcaccgccacagattccaccgtggctcctcctggaggaggagggagcgctggggaggcaccactggccacacaagccggaggtgagcagagacctggacgtgagtttggggcttgcaggggctgggctggcttggaggtgacatggcatttggctggggacaatcctcagataggggcagggccttcctgagcagggggcagatgtgcactaggctgtacacacttgcaccagggtcgtcagcctcctcactttcgtctcctgtctgagcatccttcgttccacagccagaggcacattcctggagtgcaaagtggatcagcactcatttactccaaatatcctgtgcactctagaatgtggggagtaaggttcaagtacttcagcccaggctagaggatttgcagccactgggcacagggccccctcacctcctgcctgccgtccctccctactgggtctcttctgtctctgggtgtcttctgttacatgcctcctgcatctggcaggctcctgctcacgcttcaagacccagcccaagtgccctttctccggggctttcttggaaccttggcttggttatggagctatcccatctcctcctcacttttggatggcgggtctttccagtgaggtgtttgttaatttccgtacatttgcttgggcttggcattttcactgtactgggctgttctgatcaacttggggaaaatagagggtggtggactgtttttctccaaaattaagacccaaaataaaatgtctgtcttatgaggtcacccatacattcctcaggacggcaagtgcgagacgtccctttagtattcttccaaccctaggattgagagagggtgggtgtgggtcttgacaggagatgggaaggtacagctccacctggggacacaggcttctgcattcttgccccgtccagcacacaagctgctgtcagcaggcaggccccgcttctcctcatcccatccccactgagcaggagaagttccgcatctgagtgggagcccccagaggctttgtggccctcaatagccctctgggtgatgcagagagcaggagaaaatggtaaaggaaggtgcccatggcatgcacaggtgaggggcagagggctggtgcttcccgtctctgcacagtcctgagaactgggtttctcagacccagtaccgccaaggaatgtgaaaaacagcttaagtggaaaacctagggacctaactgatcatgatatggctgatagtaaaactaattttctcttagagtaggcccctggcacttccattttgtagtgggctgtgtctggactattcctctttcaagcactaacacccctggcttcagagcaagcctctcttcctccacactccacctgacatgggacctgtctcgcatctccccctgcctgaaacaagcagagaatgacattgagttgttatttccaggtgtttcttgggagcagcagatggaaatgaaaggatacaagtgtagacgtaggtgaaatcatccactggccccgccttctcacttctcacagcgctatggggagggcgggaggtactcgtgggtaacagcagggcatgaattcagtgcatccgcaggtctgtacccctgctcgcctgggcagtgcccacaggacccccataaagaaagcagggattccctctatgcttcctgctcgcccccccggggtcagttgcagagtgggacacccctcatgggtgtcacagagggcctggtggctgggtggttcccagcagccctttctgggtgagggcatagggggttacatcagagaggcagggacattctgtttgtgttcggtcatttctgcctgtaaatatcagttaattttatagttagtagtgtaggacttttgctgtgatcatctcatttagttgttataacaaccccagaagtggaatattatttccattttatacaaaccagagtgtcagagggagtcagtgagccaggctcaccctcatgcttggattttgtgctctgtgtgtgtgtgtgcatgcgtgcgtacatgcgtgcgtgtgtgtgttctgctgctcctctgctcaagtccttgaatccttatcagtgacacagcattggcctggacccctgttggccagctctgcaccctctgttcccccgtgctccagccagcgatctgactgatggggcaggcaggctcgggagggctgacaggctttgcggtggaacacatttaaaaaatgcctgcaaacgagcgaaagaggcgtaggagtaagcgtccggcgcaagaccacagcacgtctcatatgcggctgtatcggcacgcagcgatgagatgtgtaagaactaacacgaagctgcgttcctcccagtcacgcgcaggattggattccttttcacggtcagcctccggtaccttcgacccaggacgagaccctcagtagtaaagcccttaacaggtgcttgtggactgcgcatgtgggatgctgaggtgctgcgggcgaggctgagtctgtgaggtgaggagctccatcttcacctgggtaggaaagggagcctggagcaatacgaggagtggcgcgggcaggacagcagcccaggagagtacgaggagtggcaggggcaggaccagcagcccaggagcgtacgaggagtggcaggggcaggacagcagcccaggagagtacgaggagtggcaggggcaggacagcagcccaggagcgtacgaggagtggcaggggcaggacagcagcccaggagcgtacgaggagtggcaggggcaggacagcagcccaggagagtgagacccttgtgggcccagtgcttctcagaggacatggccatgcatgtgtggagcagggcagtctgtgggaccacctgagggtttgactgggactagcgcagacctcattccagcccaggtaggtcggcatggggtcgcagacaggtgacttgttctgtctgcggaataatcagctgtaagcttctcatttttactgaatcaggggtttcaaggctggtaaggtcaaacaattccttctttggtttcaaagaccacatctaagagaagtctatcttctggaaagaaatttcctcaaaaatattttcataaccttatttaataagcaaacttttcgcagccctttttaggataatgctctctttcttttctcatgttatttaaatacctttctcatgttatttaaatgtatgttttattttcctgtcatctttggtgatgaagctagtttctgcctcctcatgtaaaatgttatatctttgaagtattttccgtcagctgcttctgcttagccaagtccactttcccgagattctcatatatttttattttctaaagctgtttaatttccagaactatttttaaagatttttaaaaagatgataaaagcacaagatgatgtatggatgacatgtcatatttttaggaaggcaatatattcagacgttttgttggttgttttgtggctgtttctctctaacctctgactcataccctactctgtgtacctctcgccatgtccctgtttgcgtggggttgggctgggacgcgtgtgccctctgcaaaccttgttctccatggattttcctgcctttgcctctgggggtagcttcaaacctagcaattctatatagtacagaaataaccaattttagtaatggttctttagcttagcgttttccaaattatgggttgtgacccatcattaggtggtgaagccagtttcgagagatacctaaaacaaaaatagaatagatctgttcctcgcatatagtgagggtaagtttggtattgtgagacttttgtatcagttgggtgtgtatgtttgcattgtgacacctgggtcacagtgttaaaagtgtgtcattgtcaagcaaacttgaaagcccctgtagtattccagtactgctaagcttttatgaaagaaatactgttgatagtctgtctctagtaaaacagctgtgtgtctcagggagattgccacaagacaaggcagggcccacaccagggtcctgttgaagacgctcctgtgtcaaaggaggcggcagggcagggtaccgctcagtaggctcatgtagtctttgggtgctgaagaaagatgatatttttgtgaagtttcaagggcttctccaagttcatttttactcatgattcaaatctcagttcagatattctttctgcagggaagccgcccctggtttcccagtctagataagattgctccattagatgcttcattcttcaccctcagagcacttagctcagtttttattgatacatttattagtatggtcatttaattcttttttttcttttttttttttttttttgagatggagtcttgcactgttgcccaggctggagtgcagtggtgcaatctcggctcactgcaacctccgcctcccaggttcaaacgattctcctgcctcagcctcctgagtagctgggattacaggcgcctgccaccacgtctggctaattttttgtatttttagtagagatggggtttcaccatgttggccaggctggtctcgaacgcctggcctcgtgatccacctgcctcggcctccccaaagtgctgggattacaggcgtgagccagtgcgcccggcctagtacagtcatttgattcttgtctgtctccctctacctcctagaacatgaagtccacagcatgggtcacgggcctgtgtgtgcttattctccctgcaggatctagcatgacacctcatgtggagtcacctagtatgcaccgcaggccagggtctgagctgccctgtgaatgactggcattagacatcttgcaaaccctgtgctgtgatggtcttattccagaagggctgtgggggtgtgagagcacaaagagatgtatgggtggaaatgggattgaagcttctagagctgtgcagaggccttatcccatggccactgctctccttgcacacaggcccacaccaaccagagtcctcagactttgctgtccccagcacgccggtgagaagcaagtaggctgtaagcagagttacatggtaggatgaaacctctctcgggtggtggtctcttctctggctgcgcatgggactccgtcatggttctttattccatagttcaaagttccgtggtgcagggtattcaggacattaaatacgtttgttagaaccagctcattggaattctgccgtaggtgctgctggtttagattttaacaaaagcttcaaagcctcttttgtattagtccgtgaaaggataaactcactggtgaggagtagaagctgctcgctcttgagcgcaggtaggtgttatttttcttctcatccttgaaaatatatgagggtgaaggcaggaagatgaggagagagtggaggatcagtaagtatttttaggatggtctttgcacggaaaacatgtttccagtaacatgttttggaaacattttatttgcggcataagaagatgctgacaccttggccggctcccacaggcagctgtttattggggccgtggtatcatcgctgtagccaggctcgtgggttttggaactgattttcgatttgagaggccagacttctgtgacaccccccaagcatcatttccacggcaaccagctgtgatgagatgggggttctgacctcgcaggaccattgcaacaagaagcagatgagcttttagatagaaaatttactcttctgtcttgaacaaattacatgtaactgattctcagtttcctcatctctgaaatagagaaaggaacacaatggcccttcaattgtgtaatgagggatttctgttgggaaagtagatatggaggtacacatgctattatcataccgtgttttcaaggtcaactgcacgacccaagggttgacacgctgcaaaagagctgtctcccccttgctgccctgtttcgtgtagctgccggcagccctgccttcccctctccaaccttggctctgacggccaggctcttgcttgctccttagtcacactggcctcctggctggttcctgaatgggcatgctcatgtcgacactaggacctttgcactgcggtgccctattctcccggagagttgcatgcccacaccctgcctttgttcagttatctgctcaaaatcatcttgctaggccttaccagaccaccccataaagaacaggaaccctgtactccctgcccccataacagccttatgtttcttcatggcagttccaaccactggaaattgtatgagtttcatgtgagcagggttgttggtggtgtttattattattttttagtttgtcatatctatgaagtggaacattgtaggccattaagtcctcgtgaagaaccttttgttattctatttacttattttgtaggaaacttaatttcaaacaatgaatagcgtatccgagatcatataggtggcaaatggcgaatggtgcttgattgaaacccaggttgacacagaatcataaatgttctccttgcttcaagtctgcctctccttccacctgtcttctgctgtttgagcatcctgcctttgtgcatttctctggctctgcctttattacacctgggctcatcctgacttcactcgcctagcagtgctctcctctcaatgctccttggtcgccaacactgcctctgccctagggtagagctcctcagtgcagtggtgtgttcttggagaaccttgtgcctggcattctagggttcaggccaatgccaggggacaggcaggctgccttggcttcctttcttccaggaagagaacaggtatgatgtgtgtgttaggaatggccaggcccctgctgtgcatatgaggacacctctgagagccacatccttcactttctccccgtggggtcaggcatactaacagctgcaaaaaggaccccttgacaaggtctcaccaaagggtattttgatatcctgttctttaggggttattttttgtataaacatttatttttgtgttacctgatgttacatgatggaataccttatgtgcagtttatacatgatcttcttcaccctacctgagataatgtcaacattataatccctggaaaggtgggacaagctgagaacatctccttttatagaaaacatgaatgatgccacagttacaggtactttgatcttactttgttcactggacagatgcctgtacaccaggcctttaactttcatgctgtaaatggcaaacctgcagtttcctattctctgggttgtagacaggatgatgcttgcttgtgctgttttcagctagtttgttgtttaaaatggccactatataaagaagccatggatgtgatttctggagttaacacttactgcagtctctgtgatgagcacttggtcacattttccctcatccctaccctctgctctgctctttttagggaaagtacggtggccagactttaaccaggaagcttatgttggagggacgatggtccgctccgggcaggacccttacgcccgcaacaagttcaaccaggtggagagtgataagcttcgaatggacagagccatccctgacacccggcatgaccagtaagtaccccactaagcacctgctgcagcttcatttgctttcacacaaaccagtacgtcgctttcacctgtgacactagaacttctccattactctgggaaattgaatgtgtgttgtaaaactaggaaaaatcctgaggtatatggcaatggaacttcatccataggcagtggaaggatggttctagattcagctctagtctttaggtgccctgtggcagtgtgcagaggctgtgggtttctggccagagcgtggaagtcagaaagagagttgtgtgactggctttatatttagtgatcacttgttatttttatgatccattcacaaaaatgcaaaatttgtcattgttcccaaccttggaggaagaaaatctaaattcctgcttattgtgacagcttatattggaaatgttctaaagattagaaaggagaaatgaactacccagcacaatagatgttaaattgagcagaaacacaggagggacaggtgccacatctccacaccctgtactaaaggaagggctcttgtccacatctttctttctatttttagagatagggtctccctctatcacccaggttggaatgcagtggtgcgatcatagctcactgtaacctcaaactcttgggctcaagcaatcctcccatctcagcctcctgagtagctaggactacaggcattcaccactacatccagataatatttatttaaaattttttatttttattttttggtagaggtgaagtctctccatttgctcaggctggttttgaactcctggccttaagtgatcctcccgccttagcctcccaaagtgctggaatcacaaacatgaaccactgctctcctgacctccttctttttctttttctttttctttttttttttggagactgagtcttgctctgttgcctaggctggaatatagtgatgtgatcttggctcactgcaacctctactcctctacttcccaggttcaagcaatttgtggctcagcctcccgagtatctggaattacagctgcctgccaccacacctgactaatttttgtatttttagtagagatgggatttcaccatgttggccaggctggtctcaaactccagacctcaagtgatccgcccgcctcggcctcccaaagtgctgggattacaggcatgctccaccttgcccacccctttttattcttcaaagatcttgagagtggagggtactttggggtctatgaagctcagctcaggaggttggtaggcattttaaaaagagtatttgtcaccacttatcaggaaagtgatatgcataaccctcattgttatcccatacctgtaagtttgctgataagaaccttgattgggaggtctttcacattggaattctcagtgaattagtcttgtttcagattattaaaaaataaggagctgcattttgaaggcagctgttttcctgggtgcttggtatatcttcctgctaagttagagtcattcattcatcagtgaatggaatatagattacacatctaccatatgtcagactctgtgctcggatcctagcatttcacccagaaaaatctggtcccattccagctgctaggggtggcaggtgcaccaggaagtgaggtcgtgtagctccatgggttgggcagtctactttgcatgaatacttttgaggcactcaggagggtgggagggtcaggacaggtcccaagagcggtgaattgggtggggacacccaggaagaaggaagtgcagaagccctgccaggaaagcatggggctcccagagagccagcaagtgtctaatttcacgggctggagtttcagggattgatgggggagggagagctggagagagacaaatggccagtgaaactacattcacacacactgcatacagtgaaagaagatttttctctcttactctcaaggactttatggacagtgtaggtgccagttaactgccaggagcttcctttcttaacagctttctttgggttctagtcagctctgttcacctattccagctcatatttaagaaatatgtagctttacagtttttttagggccatggaaaagtgtgtgtgtgtgtttgtgtgttaatatctgatacatatgagtatatgtaaacatacatatcttatataatagtaagaatctcatcattttcctaactccactccaaaagattgtctttgattaatgtttcctgtcatccattaatttcttttctaaagccagctctactcagtccttatgctgtcctggttaaagtcagcttgactaactgtttagtactgtatctaaaataaggggtgacaacctggggtccaaggacctccagggagccatgcatgggctttgggatgttgtgaaagtgttgaggccgaagctgtgtgcaagatcgcaagtgtatatgtaggtgcgtttctggggacagggtccttcactttttccagagggtcccaggtgtgtacttccccaccaccagcccatccccaggctaaccaggccaagcagcccatgccaggtgcttctccggcccccacccacgtaatccacacaaccctttaagataggcttgaagcttatcttcatacacagagaggaaacggaggtgcccggaatgttgataacttgcccagtgattaagagctactgactgaagaccagaaagcgtccgtgtagcttttaagaagggcttggcctaaactcaggggaataaagtctagcagaatctagtgcagaaatcttccctgatgacttcagtcgactgcttggcatgacatctccatgagatggtctgaatttcttttcaccatgtgggttaagagctagttttcccacaagattttatctttacatacttaacttaccctgtgagctgagagaagaatggtgttctttctcatggctcatcagcatgtgggctggctttctcatctgcctcccttgcaagtccctacaaagtccccaaaactatatgtacgtatattttttttcaaagtttttgaaatatgagtttgtccaaacagatgtttgaatattcatcccacagtgtgggatgcattttaggtgggtttaattttagttccagccagtgtgtcatgttcatttgcatgtgttaaaggggcagctgggatgccttccacatttgttggatttgggctaaattaaagtctatccatagtcaattggatgcctagagctgagccgatttaatgtctcaaagtgtaagctctagaattaccattcttgttgaatgtcaggttaagaagattgggttacctctttgaatttctctcccaatatatctaatggggagctatttcagaatttgacctttctgtataaaatgttttttgtctctgcagtatctaccttcgtgttgatcaatagaaattcttgcacagtagaattcagtctttagttttgataaatctgaaagcagtacaggtggagggtaattaagaatgaggtgtttggagtcctacagacctgggttgaaaatctcagaccctccagttcttaattctgtgacctttatcatctataagatgatagaacattactccatctgtaacctatgaagattaagcaacatgtttacatgggctggttgcccctcccctgagccacctcagtgaggtatcccttgaccatcttccctaggagttcaaccccctgacccccactccaaaacttcccgtccccctttcctgcttgatttttctccacagttcctctcaccacccacacactgtgtattttacttatttttttcttccgaatagtgagttattgtatccagggttgttattcagacacctccgggcactcagtaaattcaataagtatttgctgagtgagtgaattgtttagcagagtgcctggcatatattgagtgcccaataaatcatgcaagatatgaagaatcataaaagaatacaggagaaggaaagggggatatttaagtataaaggtcctgtgaactcaagatgggccacacacaaataacctcattgtgtttgtgttctcccaggactggaaaactgcgattataatccaccccttattaccctgaaggatagatacaaggaataaggcttcagagcctcccaaacaaacagacaaacaaaaaactctgggctatgctttatttacctttctagatgtatatattgtaccaagaagaaatatttacatggaatcaggaagcacacaaaagccagctgtgagtgaaatactaaatactatgtataagatatattaggtcctcttagatattagaaagatgatagcccatcttattttttttttcttttctttctgcaaggtctcactctgtcacccaggctgcagtggtacaattttggctcactgtagcctttccctcttgggctcaagtgattctcctgccccagcctcctgagtagctgggaccgtgggtgcgcatcatgacgctaggctaagtttttgtagagatggggtcttactgtgttgcccaggctggtctcaaactcctggcctcaagcaattctcccgccttggcctcccaaaatgctgagatagtaagtgtgagccacggcattcagccccatcctagttttgaaagcaccatttcttttctttttatttttaaattgatatatcatagttgttatctatcttggcggtacatgtgagattttgatacctgtctacaatgtgtaatgatcaagtcagggtaattgggatatccctcacctctaacagtgatctctgcatggtttctcaatttaaaaaaataatcttcttgcttggaaatttcaaataaattatcaagacttaaaagcaaattaaaccaatgggaattctgaagtttcttttttgtagtaagtgtttgttttttctctctctctctgcgttgggaagctgttcttactgtccaggcagaaggtaatggaaagtagcattggtggtggtgagaagtggtctggtgggctatattctgaaggtggggccaacaggatgtgctaatggactggaggggggtatggcttggaagagggtgccaaggattgtggctggcacaagggaagacctgcagtctcctcagctgagatatagggaggctgtgagtggagcaggtgtagggaaatgtggacatgttaatgctgctcagtgtaggtggacctgttttgtaggtggtgggatatgtgtctggtgttcaggaggaaggtcttagcgggaatgtaaatttggaaatgttcagcgtatggatggtatttaaaaccgtgaggctgggtgttaagcccaagggaatggatgcagacagaagaggcccaaggcctgagccctggacgattccaacattgagatctttagctgtgaatctggagccaacggctgacacttgaggacagtctaacactgtagattgcgtactattttaggctgtgttcccgtgatcaggagatataattttatgaagctatgcgactgtgaagctaaaaggagcctcaggggagtgtctaattcagtggttctcagccttgagctgtgccacccacccagagcgaagatggaaatgtgggggtggaggatcgggggttgttagaatacccgtggggtgctcctggcatttaccaccagggcccaatgaagccacatatttcgtatagcccaggttggtctggcacattgaagagactgtcctacccaaatggccacagggcttcctgtcaagccctcatttacttatttccccccattagttaaaaaaaaaaaagcatgttgaagttgtttttttgttttttctgttattgctctgagtcatacctgccttctccatcagccagccctcaaaagcaggttgaaagccatcacctcctgagccttgtagcccatacaggccccacaggaagtctctgtccctctgactagcagccgcatggaagtatgagtgtgttgtggactgaattgtgccccctcaagtttcttacgttgaagtcccaaaccccagagtgactgtatttggagacaggtcctttgtggaggtgattaaggttagaggaggtcctaaagggtggcgccctgatccacctgtcctacaggacaggtgtccttataggaggaggaagatggaaagagagatttttttccctaccatgtgagcacacagcagaacagggccacctgcaagccaggaagaggcctcaccaggaaccagatctgctggtaccttgagctgagcttccagcctccagagctgtgagaaatacaaatctattgttgggccaggtgcagtggctcatgcctgtaatcccagcactttgggaggccaaggcgggtgaatcgcttgagtccaggagtttgagaccagcctgggcaacatagcgaaaccccatctctacaagaaaatacaaaaattagctgggcatagtggctcacacttgtggtcccagctacaagggaggctgaagtgggaggatggcttgagcctaggaggctgagcctgcactgcacttcagcctgggtggcagagcaagaccttgtctcaaaaaaaaaaaaaaagtctattgtttaaggtcccgtctgtggtattgtcagcccaggctgactaatacagagtggaaacgatacagcatgaccggcaggccagtgggaggaccggccagccagatcctgaaatgacttgggtaacacttgccttcattttctcttaagctcttctgaagcctctccccagtgttgtctggttcagaggttcctggggtaacatccccttgatgccttctttagagtgtgctgcgcttaggaagtgagtgtcgtcaggctggagcgtttccgggatccaaactcctttccaggagggttttgattgtttttgcctggaaatgcatctgataagaaaataaagtagaggaacccaggaagtttatgaaatctctttctctctactagggaaaacttgggacagtttacattgaaattatttacagatgtaaaatgaaatcaacctttaggggggaaaccattttctttgttttcttctttcccctgtcaactagacaccgttccttttgacttgtttcattaaatcctttaaaaacaagaactgcttgttaaagaaacaggtttcctttgggtttcaaacgtttagttattagaaagcttttctctgccttgccaccactacatttaaaatgtggggttttgaaacatttttgtgtctcacgctgaaataccactgcctgaaccatttccctacaaaggaaccttctttgagaggagtgtgtccaagttgtacatctaatcggtttatctttaagtcaagaatatgttgtttttactctagttacagattatagtggctcaccctttgtttagaagaattactaaagaactctattttgaccacttttgaaatgtctgcctttaacacagccaaaacataggtcaaagctcttaagggtgtattcttttatttattttttaggggcatttaaagagggcagacattgaaggcctgggttgtgctgtttactctcactggaatgtcagtattgatatcagttgttttaagagtggctaatcaggattaaggattgtggggaaagataaaatccaaacttcccattcttattctggaagaacaaacattgctgaagccaagtgaaggttttcagcattaagtcagccagcttggagggaggctttggctaaggcaactattaggggactcagagttttctttttaggggggcagaagatctagggaaatccacacagctccccagtgggagtgtgattggagacccaggcagggctggagctttgtccttatgttgtacttctcggcagctcgcggcgtctcataaacatgcgccgctggcctcctgagattcttgtgacggaaccgctgctccatggtagagctggcccgagcacccactcctcccgcatcaatttgctgcccaactccaactctgtatgccgcaccacagggtcctggtggaggagatgggaggccacacggggtgtcacaggtggggacaggcgcttctctaggcttagctgttctggctttgttggcatttgtggccgtggggcaggtggagtttgggtgtggtgtaacagtgaatgtttaaaagcttgttcaataatcacagtaacaaagcagttcattgaacattttttggtatcaaggcccatgctcagccttttgtgtgcattaattttatttaaggctgggcacagtggctcacacctgtaatttcagctctttgagaggctgaagcaggaggatagcttgagaccaacctgggcaatatagtgagaccccatcttaaaaaacaattactctagtgtggtggtgtgcacctgtactcccagccgcttgggaggctgaaaggggagggtcactcgagcccagaagtttgtggttgcagtgagctatgatcatgctattgcactctagcctgggcaacagagtgagactctatctctaaaaataaaaaattttatttactctgcatcacactcctgtaaagtgggtagggatgctatacttctgatgatgtcgtataccagttcccagaaggctcggaactcagaccccacttccagaaagtagaagagttgcacacaggagtcaggttcggcaggatgtgagctcagtttgcagagcagaggttgtttttctcatttttcacattgtcggttggaacatgtttggggagaggcaggcagctaggatatcccggggcctcataaggcaccaccttgtatctagagagccttagtccccagggattttacagttactaagccatgaagttttatcacttgtctatgaggcagacgagaaaggtgagccacttgcctgagttctaacagggctcactggtggaggaattggagcactctgtatcctgggctcagggttctgtctaacagttgtggctcccttactgtccgctcttcagagggtctttcatactcccggcttttaggcatgagtcttggcatgaggcctgaatgcacctaaaaaatggaagagatgggtgttggtaacttgcagccaaacaacctcctaagggaagctggccacacgttgatgggatgctgagaaatggagaagaaatggggttgtttttctttttccagcttcagattctcgaagaaaatgtattggaagagtgcactctatttctgttcccttggaacattgctgatgccgttcaggaagtgagactgcttgtgtgttcagtcagtgtgacatctctgcctgtcagtgtgacatctctgcctgctgttggaagggtgctggcaggctcagcgagatatacgagatgtggggagtgggaagtggccagcaataatggctccttgcttaacgggtcccccaccaactcatcccaggttgtaacttgcatctgatatgcacagttcacaccaaagccatgtcattattcatcagcgtgcttgtttatgttttgtttttattttttgtgtctttataaaaccaacttctggtttcaaccacagaccgttctttttcttcccttgatatgtttcctctttttttttggtctatttcaggccttctctctgtctgaattaaagaatgcattgagactggtataagtagactgtattgatttgactgtagagatttcgtttgtgtcgatgttggcatctctgaagggcccgtttcaagtctccttttcaaagatcattagcaaacgtattctcaaagcttaacccctgagtggctgcccacatgtgtggctcagtttccccatctgtaactctgggttatggtttgggcaaaagcacaatgatgctaaatgagttgtgtgatttgctttctttactctttagtcttttctttctgccatcatcctgggaatgcagtgatgaccatgaggatcgtctttgttgtcaagaaactgtagtcttcccggagaggcagacaaggaaacaggcaattacgtagcctagtaaggataacctaaccacctctagaccatttacaacagagctctgttctttctattttagacctgtttgtgagtttctgttattttcttagtagactggcccttttatcattatgaaatgcacttcttgtcagtggtaatgcttcttgttttacaatatcagtagagctgcaccatctttctttggtttcatgtttttgcatggtatacattttcccatgctttcactttcaaactttttatgtccttatatttaaagtgtatcttctgtaagtagcctatagttggattttggactttcatctgctgtgacaatctttatcttttatatggtgtatttagttcttttacatttaatgtaagtactagtttattggggtttaacaccaacatctcactggttgtgttctcttagttccacctgctttgtgtttctttttcccttgcatcctcctacgttttttcttctctgttggtttgctaaattcttgactagtaagtccacatgtagagcctaatgtaaatgaataattttattacttcttagacaatgcacagaccttctaataatttaccttccacttaccttcagccctttgtgctcttgttgtcatttagcttaattctttctttataaactctataggatatcttttattgttttatgcagtaaatatccttttgatttattcacatatttatattcccattgctcctcatttcttatatttctatttttctacctaagaccatattccttctgtatttcattagtatttctattagtcccagtatgttggcaatgaattgtatccttttgtttgtctgaaaacatcttaactttacttttttttttttttgagacggagtctcgctcatgttgcccaggctggagtgcagtggtgtgatctaagctcactgcaacctccgcctccccagttcaagtgattctcctgcctcagcttcccaagtaactgggattacaggcacccaccaccatacctggccaattttgtatttttagtagagactaggcttcaccatgttggccaggccggtcttgaactcctgacctcaagccatctgcccaccccagcctcccaaagtgctgggattacaggtgtgagccaccacgcccggcttacttttgtttttgaagagtcttttcactgactgtgaaattctgggttgacagtgactgtcagcacctttacgttgtctttcagttgtcttctgttttttgttgtttctggcgaaatgtctaccgttagtcttgttctttttgaagacatttgacttttccttccagctgccttttcagatatttctttttttcagcaattttgccataatatgcctagcagttgttttccttgtgctgaacctgtttgggatttgtggaatttcctgactcttgagcttcatgccttgtcagttttgccatgctgcagttctgtctcctcttcctctgagaccctaatttcatctttgttagataattctgcgtttcctctgtccctcataagctcttttctgtactttttattctttttgattccctgtgtctcagtctggatatatttctgttggcctgcttcctgttcattgatcctttcctctgctctgtctagtctgcttttaaatccactgctgaattcttcatttcagtgattgtgttttgttgtgtatgaataaataccgagatatttcagggctctcactgactttttcctccaaagaggatttagttttgttctctggcaggcagttaaaatagggcaggtcaccttaatcaagtctggaattgagctggtataaagctgggtttcggtcttttgtgagagagctggtgagtttccagttctcttttgccactaggaagtagccctgtgggattcgacctggaagtctgggatatgtatcagagcccagtttcctcagcaagccctgaagtccatttctggcctccacagctccacagcacctccagaagctttcacttggctctgcacctacaagaccatcgcttctgctcggctcagtcggccgtttggctctatgccgtttgaggggaagaggatcagagaatgttggccttcctctctaggtgcttctcctttctggaaacctgacctcacacctggctgctttgctagctctctagtgccttcaaatagattcttcagtgtatttcatcccgaatttctggttgcttttagtgagtaggttggtctacagcaaggaactttactgtcactggaagcaggaaaaacacctgagtgttttatttggaattcaaatccactctgaatttggcagtttataaattttgccctgagcaataatgtctatctcgaaggagagtaaatggaaatacaggcttgaagttgggatgtgttgcttttattaatagctcaaccagctgttagctcccagactgaggttaaaataatctctgtaaaccctgggtttcttatctgtaaaacaataatcatgcttgcctggcctgtcttacagcatttttattaggctcagatgtacacataaactacatacattaattacacaaattcaggacattaatatagtgactagtggcttgtatatatatcagctttaagtaaagaatgaactgttattttgttacactttgctctcaaaatgtgtgtgacatggctggcagactttcagcttccagtatgtgaatgcctctgtcacactgagatggtattggattgttttatcatagaaccaaaaacagttgtggaaatagctgtgaagcagtgatcctacctatttcagaaagaaattagaccaggaaaaatggagtcaacagagttttgcttgataaatgagatcaatcttcgagtcctaacaaactgtcctacttcaactatccatttaaaacccatcactttgccccccgtcgtggaaccatgaaactgaaagaacaactttctttttcagtggaagggttttgtatattttaggaaacagtcaaaatactgtaaaatttattttaactttttttgtcatttaggctacgtatttcacttgaatatggtttcggagattacttgtgatgtttctaatgaacttaaaagaagcagcattgtcagtttatggtacattcattattaagtcaaaacaccgatctgttcactggtgtaactgacaattcacatatactttggagttgtctcaccccgttgcccaagctggagtacagagatgtgatcatagctcaccgtaacaaactcctgggctcaagccatccccctgagtagctaagactacaggtgtgcgccactgtactcagctgatttaaaaaattgtttagtagagatggggtgttgctatgttgcccacactggcctcaaacccctgacctcaagtgatcctcttgcctttacctcccaaagtgctgggtttacaggcatgagccaccatgcctggcctgtactctggagttgttaaatgttaatggtagaacctatgagggcccataatctccactgccatctgtaaaatttaaagttcagacttttatagtaacgactatcttaactatattgaataagccatgattttcttcatctgacaataatgtgagaaaatccacacctctttggaaattcaagttatttaaaaaaggaaatatcccaataggaatattgtacttggatttaaagttttatattcactgaagatttatttttattcttggatttatgcatttatttagcaaagatttgagtgctaactacatgacaggtgtttttctggtcactggggaaacagctgtgaacaaaacattaaaaaaaaactctgccgtcatagagctcacattaagaggatgggggagaaaacaataaaataaatcattaattatgtggtttttaaaaagcatgttaaatacagaagagaaaaaaaaagcggtggaggttaggagtgtgaaagagtcaagggttttagtactaaacaggtgatcagggaagatctcactgacaggaaggtgtttaggcaaagacctgagggaagggacgagggagtgtgcgtttgaataactgggaagagagttctcatcaggggaggtggcaagggcaaaggccccaaagaggtagtgtgccaggcctatctaaaggacagcaggaagccagagtcgctaggcaggtggccatgaggaagagtagaaagaggtgaggtctgagaggagtcaaggcaccaagccctaggagcctggaggcgcatggtaagggcattggctttgtctctgtcatagtccgttttgtgctgctataacaaaatacctgagactgggtaacttacaaagaacagaagtttacttcttatagtatggaggttgggaagtccaagatctttaagctggcagggctcacattgtctggtgagaatctggtttctgctttcaagatggcgccaagaacagtggatcttccagaggggacaaatgctgtatcctcacatggcagaaggcagaaaggcaaaaaagggacaaactcccttcattaagcccttttaaagggtcttcattcctttcacaaaggaaaagccctcattatctaatcacctcttaaaggttctgtcaccactacattggctgttaagttgcaacacctgaattttggaagagactcattcaaactgtagcagccattgagtgagatggaagccattgtaggtttgggagcagaggaacagcatgacctgaattaggcctctaaagggtcagttttttaaaaggttgctgtgataagaccaggtttactgggggtggggtgggaaatacaaggccagaagcagagaaacctgttgccgtgatccagccaagatgacagtggctaagaacaggggactaacaatggaggtggtgagaggtggttggattctggatgcctttggaaggtagagatgacaagatatgctgaatcggatgtggaatgtgaagaagagagggctgaaggatgccactgagtttcttaaccaagcaacttgaagaatggacttgtcctttgctgagcagggagcagtacaacctcctggttaaggtgtggatgctggcaccaggtctcccatgttggaatcccagttatccctttagcagctgcacgatcttggcgtgtcagttagctccttcgtgatataagttaagggtgatgataatactcatcttatgggctgccgtgtgaggactaaatgggttaacacctgtaagtgacttagcacagtggctggcacatagtcagtactaaacgaatactagctgctattcaggaagcattgctggaaagattaggagggaagttttcatccaagtggaactgtccagtaggtggatgaagatatacaaaaatctggaattcaggaggcaagcctggggagaagttacacagttgagattgtcaatgtttatggatggttttaaaatcactttgttatctatccctgaatgtgtatttttaaatgtggaggtatttctggttaccaaaataggcttaaagcaggagtccccaacccctaagccgtggaccagtggtgacacatggcctgttaggaaccaggccacgcagcaggacgtgagcagtggatgagcaaacattaccgcctgagctccgcctcctgtcagatcagcatgggcattagattctcataggagcacgaaccctattgtgaactgcacatgcaagggatctgggttgtgtgctccttattagaatctaatgcctgatgatctgaggtggaacagtttcatcccaaaccatctcccctctccaccatctgtagaaaaattgtcttccatgaaactgttccttggtgccaaaaaggttggggaccgctggcttaagggacactgggtttgttatctgttgcctcttctttatgatgatgattgaatttcctctggcatctttgccatggccctttaaaccaaatcttttttattcttggtaattctttaagtgcaaaggccaaggtacttgttcttgatattcacatataagtgtcacctgttgaagttggaaaattccccgtatgttgctctgggctagaataaagcaatgccctggttgcctaattctgcttggccaacgtgtactggcgcgtgggaccatgagctgcccaagtggccttggtggctttctgttctggcatccctctcaaattaaccccttcctctcattgccactcttggtccagtcccttgtcctcccttctgagtcactggacctgcctactcagatctctcagtacctctcccaggcttgtattctgcatgcccctcccacacaagaactaacctatggtgaggacacctggatccccctcctgggccctgcatagatggcctgcagtagccggtcctgcctccgccacccacttacctttcttgagacttctgacgtggatgcattccagatgtgggggcattctttgcaaagtgcttgtggctgtcttcattcatggtattctccactgcccttctaaacctttctaaatgggtgtgtcccttaaaacacaatttgcctagattcttccaaagaactgcttctgactggccccctgccatgggattgctgcccttgcttgagaccttgccacccccaaccagagcctctgtgcctgggctttcttgttttgtagctgtgcatgatttctccaggtatttcgtaagttgctttgggacagagactatctgtaattagacagttctctaattcctcacttaaattcttagggaattcagattgttaaaaaaatatctagagagctattaatgacatatacacaatttgtgaaataatgtttttaatcttgagacagtaccttgtactcaaacacactaatgtttttgcagcagaacatgaatatgcataccaagtgggataaatcaggagaacagtcatcaggtcaggttttactgccacataattcagatcatggcaggctttgccaccaaatatgatacagatttttttccaaggtgtttttgtttttttttttaatgttggaatcaaagattaggaattatggaccctcgctaggtaaataaagaagaataccattgattctgctgccacatgataaacagcccactccggaggcaccagagcctacttttgggttgctatgctgtagatgaggggagcagggcataaagggagttgaaactcccgggatggtcttcagcttgatatcctgcagggcctctggtgcacaggttgcccttgagattggttagcacccagcgtagctcctggtaggctttgccactccctcactgtcaccacgtgctgggtgggctgaactagatctctctcggtagctgcttttatggaatcactcagttaacccagttgactgtagaatcctgtctgcaaagaggcatcccctggaggccagcgcatggtggtgccatcaaacgaaggtacttttgttagggttggtccattcttgggcttaatcagacccgccctaaggaaatcatggtatgatgtgacggtgatgctaatgatctgccttctattgttggcaaaccttatcttggccaaatattagctaaaatctctgaattggtctgtgtttcacctagatactaatggtctacgcagtgggctgttagcaagcttgtatcatgaactccccaagttctcctttctttaaatacaccgaattactcaaaactggttttttctttaaagaaaaagctttttaaaagtagatacgtgtttgttgcacacaggaagaaaagtctgaaagcttcacattgtctctggtgaacatccttcctaatttgtctcataccctctgatgttcgatgtatgtcattttctataaatacaatgacagtaaaatgacactgtatttgctgtttgcctgcctacttttttttcattcagtaatacataggaaatattttctaggactgttaaatatataactttcccttataaaagctgtatatatcccattttatgtttatttagctagctctctggtaatggactgctagattcttttcctttttaatgctaacgttgggatgaatattttcgaataacctccttgcttactcatttaaaaggagatgctatttgagatgacagtgtgttatttggttctgaaaatgtaccagaatttactcaatatattgctgagtttggctactgctttattttaggttttgaatgaagattcatagctgaaagtgtctgtggccagccagcctgcctgccttcttttcctcctctctcccgtcttccttccttcatctagctttggcttcaagattatgttaactttgtaaaatgaatttagaacaaattcctaaatttctttagatgcttcagaaaaactgatttgtaaaggagttatttgtttcttggagctcacctttcaaagtcatctaaacttagagctatttttattttcattacagtaatcctttgataaccttttaaaattcttccatgaatattgacatgtgttcagtttttctatgctttacttgaattaatttgatttatatcttcccagaagaataaatttcccttggattttcaaatttattggcatagtgttatatgtatatgcacttaaatctttattaattataaacttttcatttttttcttctttaaaaatgccagtgatgtgtctctggtttctcctccttacttctgtcttcttttcatccttgacatcaagtgctgggattttatatacatttcactgcttttctctttttttttttttgagacagagtcttgctctgtcacccaggctggagtgcagtggtgcgatctcagctcactgcaagctctgcctgccgggttcacgccattctcctgtctcagcctcctgagtagctgggactacaggcgtccaccaccacgcccggctaattttttgtatttttagtagagacggggtttcaccatgttagccagaatggtctcgatctcctgacctcgtgatccgcccgcctcggcctccctgcttttctctttaatgcattcatgtctgcctgttgcctctgctttcctctgcactccccctgccccatgagagttgaatgttgaatgtttactttatgtctacttaattggtttctgagtgcagctttggctgagtctcataatacgaaatatagtgtgataattttggttatttttaaacctacttgtaaatgaccgctattattatttctcaccactctggaattctgtttttggtttcttttttggtacgttgcttatttaggaaagagtttcaaaatcgtaagaaactgatttttttttctttttatctttttaaacttaggtcattggagatttttttctcctgactttattgctgtggagtcagacattacaactttataattttactattttgcatatatggagggttttactttgggcatgagatgtagctacctttaattgagattttcgttccaggtgctatgctaagcaatttacacacattactcatttaattctcacagcaaccctatgaggcataggtactgttgttattgttactaagatttgatagttagagaaacagaacttgccccattaaccaggctgtggtgaggtctaaacaacagcctgcccccagaggctgcaatctttacttctcatttctatgaatatttgatgggtattttttaaaagctagtaacatctatactcatttccaaattcaaatatacatgttcaaccaacctgatcgattacattcaaaacctttgttattgataaaagcatttgaaactcaacattacagtgctaggagtttctgcttatttctaagcatgaggggcttagaagatatatattcatggattatacccttattgacataaaattaccccactttatttgtttttcttttctttttttttttttttaatagagatgggctctcactgtgttgcccaggctgtccttgaacaagttttccttttttgccatacattttgctttgcataaatgttaatctcctactttatttcacttactcttgatacatttttgtatcttactgattttttttcttttttggatgccattttgtcttaggtttatcttttgtaacacatatattttgatttttaagccaacctgatggtctaaagtttaatagactcttagccattttttttttaattttattcatttactttttttgagatggagtcttactctgtcacccaggctggagtacagtggtgtgatctcggcttactgcagcctccgcctcccaggttcaagcgattctctcctgcctcagcctcccgagtagctgggactacaggcacccgccatcacaccgggtaaatttttgtatttttagtagagacagggtttcgccatattggccaggctggtcttgaactcctgacctcaggtgatcctcctgcctcggcctcccaaagtgctgggattgtaggcgtgagccactgtgcctagccgaaaagttcgtctttttaaccacaggccaaaacagagcaattcagtgtatctgaaaagagtggtgtcctaaaatgtcaccctccacagaacttaagcttttctcctgtccacttgggacaatcagaactgctcaggggtcccacagactccattatctggcccagcttttgtggggagaactgcaagagtagggtaggaaagaaaaccaactgcctgaataacctctaagaagggtgctctaaaggattcaccactttgagacaggcagagcagataaaaatgaaagcacatctcttcatggaacaatggaagtaaaaactaaaccctcagcttggaaaccagaactcacgtatccaagaggacgatggtgggcaccaggaggcagagggagttactggagttactctagcaggaccaagggtgccacttgtcccaggggagtagcaagagggaagaaatggaatgtgcagtgttcacattgtctgatgagcagtgtgagcttccatccagaaaaggcagcttgtcccctggcatcgggaggaatgaaagtttaaaggacaataataatttagtctctctgaaatgactctagccttaaatggtgagtgggacctggcagctgaagtgcagccctcggagggcatgacgagagagttcagacggcttcatccagggctgttattttctcaactttcaatagctcttgactcttgaaaagttttcagctaaaatgtagtgtctgtaaaactggaggcactaaagggcaaatggtgctctttgaatgaaaaaacatttttattccatcaaacagtggcttgctgaaagcttcaaggggaaacctaatgtttttccccttctgttggagaatactcacgtattctgggcagcattttctgtggccggtgccgaagcgtggagtgtttggtgagcgaagagtgtgtttttggattctccgcttggcctgagtgtgtgtgcatgttttttgcctctggaacccttggcttttcaatgagattagaggacttcaaagggagtacagtaaatacgataggcttgagtttcctgtgtcacagggaggataaacattttgttttagaacatgcttccgactcctatacgttgcagaatgcagaagcctgcggtattcaagaaagctattttagacgaataatttcgaagtgagacaaacctaaagttattaattgagctaattcaaatctcctgttgaccagatttttaagaagcttgatttcacagaggtcctgcagaggttttttaatgtcttaggatttggttctgtttagttttgaaagacctctatagaaataaactctgtagctattaggactaatcagaaattagtggatttggtggaatattatgccattatgactgtttggaggattattaagggtatgttttaattaaatgaacattatacaacagctaatgaacttttttccattttcctttttttggcttccatttccagtttacattctatccagtagcctgcctagactttctgtagacaccatagcaacacatcttgaaaatgtgaagctgaacatcttgtttgggatgggccctagtggaagtgccctgaggttgagagatgcatccgcagcccagtttggggttggactgaggagggcctgtttcccgtggccccttctgccttgtggtggatccagtctccagcttgggctagatcttttcagcctggtcatgttgggccttattcccagtggcttaggcttgactctctctgtgttaggcttcatagtcatggtagactttgaggaacacagcgtgggctgggccacttcatgtatggtgaccacagggggtcagattgtggtagagaggaggaatgggaaatcaaaatctggaggaggcagagtttttttgtttttttttttttaacctctgtgctatatggtccataccagagttccaggtctaaattcaagttatccagatgagtctaattatggctccacattagagaactgtttcactaataacacctctcacttttctgtgtgtttcttaaaatgaagtctaagagcaacctgtataagccttgccttcaggggccttttcgaattcagattcccaggtatcacccagacctacttattcagaatgggatgggagaagcagtcagggcctaggcatgttcattttcataagctccatgaatgagtcttatgctcactaaactgtcagagctttgtgataatcagaagtctgtggccttaaagcaactgcccttaccgcagaagcaaatcagagtcctgaatgaggagcatgcgcccagcctgcggttggctctagcctggctggagccccaccttcacagcagaggcatatatggacattctgtgtccattctgtgtccatgggcagctgcatcaggctgccaggatggtcagtgaaacaacagaccttcctgcccttttctttcccttgaaatgggaatggcgtaagcattttctgtggatgagggcaaggaaacagaaggcattcaccgcctctattgcatcaccagctgtgtccagagccttgattccagcatcctgaggtgctaacaccctccccctgccaccgaatatctgtatatgaatggagaaatgggctagcaagcaacagactgtattttaatatgttcctttgatttttcaaacttctggccctgctggctaatttaacgcccccacaggctctctcggctcatctcacctggctgatgggtgcacatggagactcgcagactttcaggtgctgtgttggctggagaaggaaaggtccacgtggctgcagggctccctgggctgctccatctttccgaacacatgcggaggcaggtgccttgacctggctcagaggcaggggcctcgccactctctcccaaagttaggggagccagtcatcgcacccgcggacatttctccccctccccatttcactcacccatctcatggttgagaaaactgcctgtgtttctccagctgtagaatttgcttggatttttaaccatttttccttatgtagggtagctgaaatcaatcactctgtgactgaagaaggtggaaaaaactgcagggtgtaaacctaaagaaagcagaaggaaggaaataaggaaggtaaaagaagaaattaatgaactaaaaatccagtggagagtatatataaagcttcatctttaaaaaatataaatctctaaaaatgctgattaacaaaaatagagaagaaacattaatattaggtgtaaaaaagcagatataactaagatcataagaaaattaaaagtatacttttatgtaaataaatttgaaacttacatgaaattgataattttctagggatatttaagttaccaaagtctcttaagaaataaaaaaatgaataagtgcaaaccatcaaaagaaattttcagcaataaaaaatttgccttcccaaaatttcacaaagctcaaatgggtttgcgtaaaacccagactgtttcagagaatagaaaaggaggaaagctaccctatttccttcagtagtatctagctatgaaaccagaaaaagaaagtataagaacagcaaattgttcaatttatggttatagactcagaaaatcctaaaccaaatactagcaaatctaatacagctatatatatatatgctatataatacagctatatatatatatgctatataatatagctatatatgctatataatacagctatatatgctatataatacagctatatatatatatgctatataatacagccatatatatatatatacaagaagagtttgttttaggaatgtaaaaatgattgaatatcagaaaataatgtaatatatcttctcagtgaattaaaggagaatagctgtaggtcatattaatggatgcaggagggaaagcagtgaaattcagcacttgtgagggagtttccttcacctgatgaaaggcatctgtaaaacatctatggcaaacacaaagcttaatgataaaaatctgcttgtgttcaatttaaagataggatcaaggcaaggttgttttttaccacttttaaaaattgtatattgtgttgcaggccataatcactgccatcttaagaattgcaagatgtgtaacgaatggaaagacagggacagaatgtagatgtattgatttgtggaaaatctaagagaacctgcaaactgactatcagaacaaataagagagcacagtgaggtgttgaatacagagtccacatacaaaaaccggtatcagtaacggccaattcaaaaatgtaataggaaaagagactcctttcactgtagcaagcagaactgtcagatatggaggaataaatgcaaccaaagatgtgcaagactttcatggagaaaattgtaaaacataactgaaggatattttaaaatatccagtattgtagaaatattaatttccttcaaattaactcataaattcagtgcagtgtcatgcagggttttttcatggaacttgaagagctgattcttaaattcatcaggaaaagcaaatggtcacaaatatccactggcatcttgaagatcttcgcctagtaggggccatgaagagttactgctgagccacattcattaaggcagcatggtacaggtgcggggttacacacatagatgaccagaacagaaacggatgtagacataaataagtgtttggcgtgacagcagtggcgttactcatcagtgatgaaataatgaactattaaatcatgctggggacaatggattatctacacagaaaaaaaaagagattatggatctccttcatctatatatgaaggatagcatggaacttgtctacatccatttctgttctggtcatctgtgtgtgtaaccctgcacccataccacgctgctttaatcactgtgactctgcagtaacgcttcatggctcctcgggcatgttgccctactatgtgttgttcttcaagactccagtggatatttgtgaccatttgattttcctgatgaatttaagaataagctcttcaagttccatgaaaaaaccctgcgtgacacttcactgaatttatggattagtttgaagaaaactaatatttctataatactgggcactttttaatgtccttcacttatgttttgtaattttctccatgatatacatggatatacataatccttcaatatttatgaaggatatataacctgttataacctgttaaaagcatttgtaaaagtttaaacatttgaaataaaattcacaatatattaatgaccttcggttaagaaagcttttcctgaacattgttaccccagggtcacagtttgaaaactcaaaattaaaacgtaggtttgacaaaaagcatcataaacaaaattaaagcatctgccacagagatttttgcaatgcttctggctgacaaaggataatgtccagagcatataaattcctacagccaaatagtaggtaaaacctaatcaaaaaatggacaaagaacatgaataaacagttaacagcagaaaccatccagtcagctcctaagcatataagatgatatgtggcctctctagtaatcaggtacatgaaagttaaaatgatgactacttcataccaatctggttggcaaaattttaaaacatggtgatacctagggatggtgagaatacagagcaggatgatctcatgcaggtccgggcaggagtgacactaggtccagccacttgagattaagttggctatgtcaggtcaagttgaagaggttcataatgtatgaccagtagtcctacttgtgggtaaataatgcagagaaactttctctgctgtgtaaaaagacagtgtccactgcagcgttgtttctaatggagagaattgataatcagcagaaaagggatgacgtgtggtgtgttcctccctacaatggaaagcagtgtagcagtgagggtgaatgaaacagagctgtgtgtgtcagaacagatgcacctcccaaaaagtgaaaacaccaagtcacagcacagtgccatccctgcaaacttcgaataggtgcagaaaaatgcttggtataatttatgaatacatacatgggtagtttatttaaaatacacatagtaacaatgaagcaccaaattcaagatagtgattgcccctggggaagatgaggattgaggtaagggctgtaattattccctgtcatcctgtcatgtgtcattttatttaaaatttttttaatcaaaggccagtattgcaagatattaagacttggcaagcagagtggtacatggatgcttctataatatctctaaactttatgcgtgaaatatttcactcacataaacacacagtgatgtcagttgctgccaagaggccacaggaggctcattgccttggtaaatttgttgcagtctaagacttgcccctcagctttgcaaacccagaaactttttttttttcttagttttttgcctgcagatgaaaactaggtttgtatctcaggggcagactcaaactcaatttacaaatcgaatgtatccagactgccagtatgataatttgtaaatacatagcacagtaatcaggaccttggaaataccacgaccttgcatgatcctcgtgttgtttgtcctggagtttttccacgggaacctgagccacagcccaaatgcctgctcatagacacgcagttagacgtagctgctgtggagaccagcatttcggagccccattgccagcagatttgctcctacacaggactccagtcctaatcagaacacacaactcccttagagggactccactggaagtgcctgcctccttcagggaggaactgagcatgccccttagcactggatacccagaaagtgcctgtggaggcttggcattgtttataactttccttttttatttttgacagtatctattccccatctcttccgtgatagaatcctgtctttgtgtaggcataaactaatgcttacttaataatcagttaagttgtgtagtattttccttacaaaatccgaattacaagggcagttcagggagatggtgcatattcatctaggagtttttccttcccatgaccctctgtttggtcttcgtggctatctcataagaagtgtggtcttactgttggccacatcccctctctgggccttgtagaggttcttgaactctccttcttaaagagagtttatttaaatatgtttcctcatcttctcccacctttgcatctcctgagcccttcttgcaggcctgggaacccttgtccctttaactgacagtgtattctctacttggagccgctgctgcatgtggacttggaagatgtctcagagcctgtctcatcggctgcctctccaagttgctagagaaagctccactctgacctcccagtcaccattgacacacagctgccaaatgcaaattataagcctgcattcattaaagtgaccttgacagttttcagagtcctttttcacacgtttttatttggtgttcccaataatcaggcaagatcgtcagggccattttcacagatgaggagtgatgttagttgtcacacattacacagtaaccaaggttaccaagggccctttgcaaaaacactaggtcacctggggtgagggtggggcatggcctgcccagggtagagaaggaaacctatttctttgttcctcccaacaccgtgaaacagccttctgtgttattggacagaagctggagcttcccagtccaaagagcttgcgtttggttatttcatcaatgtcttgatcaagcccaggtataacgtctgccctaaagacagagtcattcttctaccctgagagactctctatacaatgtggtggtttagattcaccagttttttccatttccagctaaccaagagttcaggtactgaaagccatctaatctcagagaaatttaaagctaaataaaggattcttaaaacagatctttacatgtccagtttttaaagcctccattttaccgaacaggaagtttgcagaatgatcacattagcaccagagccttggacactcaagtgaacttgagcccacaaagtcagcccgaaaccccgcccactcttctcagagtcactgcttctagcctgcgtcgtctggtagaacaaaccttactgcacactgttcctgccgctgacttcaaataaactgcagtttctactcgattcccaaagaaagctcaagtatgaaagtgcccctggcagccagctcccctgttgagttactatattgggtgttctttcactagttctggagtagtgaagactggttggcagggatatggctctttaaatacaaaatttattctttttctttttaaagacatgtttcaagccgaccccaccttcttggctcaatgtgaggacttattatctaaattcatgtacatacacacactcactctaactctgggatgtaaaatatttcttagtttttactttttatctctctttgccttaaaaaatgggatccctcttaagtttcctgaatgccagttctcagcaaaaatggatgccttatgaatatgtagatgaattttaataaaatgatacgaatgcagcagctctgcgtgttctgaaaaacgtttccagagccccgtgagactttcaaatgctcctgggagatgaggcttcctgcagagaaaaggaaaccgagagaataggacatgattggatcggttccgtttactatgatgtagcatgaaaaaatgctgccttatgtctctttttaaattctcctatagctgcataagctcatgttcagtaagtcattcaacctaggtctgctcgtctcagcaattcccgctgtgttaagtgggacctaattgcagaggatagctgcctcctaacgcggagtccttatttcattagcattacagattgggttcttgggaaggacattctttggtaatttgtttacagatgaagtcttgcagattctcacttccttaatctaacaatctgctaattcttaaaattggaaaaaagaaagaaaaaccagcctgtcagtctacttgtcaggaaagacttagatgtcaggagctctaatgaggtgcgatattaattcctgcctgcttttttcccccagacaaccgtgaacagtttccccccaaaaactagtatattatgcaatttctcatgattaattaaaacaataactataataaaagaagcccattttgtgattctgacctaattgctttttaattgcactgcttttcatgtttattttcaaaattcacttctctgaagtagtcacgagggaaaacgagtgtctgttgagcactttctctgaaggtgcggccattgctgtgaaattgctggtcattgtttggcagctgctagaccatccactttagttcttaactccttaaatgtttttagcgatggctgagttccaaatatatatatttttaatctatctccttcgtccactgatttcccatctgagatattatctctaattttgggggcagataattcatggctctggcaaacaatattaagagctacagtgggcttatattagggccaggcacagtggctcacgcctgtaatcccaacactttgggaggccaaggcaggcagatcacgaggtcaggagttcgagaccagcctggccaacatggtgaaaccacgtctctactaaaaatacaaaaattagccaggcatggtgatgggcacctgtagtcccagctactcgggaggctgaggcaggagaatcgcttgaacccgggaggcggaggttgcaatgatccgagattgtgcctctgcactccagcctgggtgacaagagcaagactccgtctcaaaagaaaaaaaaacctacagaataatttttttttaatgtattggtcccctggaaggcataagagtgaagggaatgtttccctccccatctgaaggtttgaatctttatgtcagctgaaataaactgacaatagattaataaatttgttattaatgtgcaaatgtgcacaggagccacacaaaatatgagactcaaagaagggccagatggttgaagcttaaatactctctgcataggggagaggcaagtgagggatgtaggcaattttagaagagtaaatgatgtttaggggagatgattaggatggaaatgcagacaatagccgggaacaaatttcctccacagggtctcggggaggtggcaacaagttatgggaaggcgaggggcagaactctattgtgaacagaggttattttatcatgcagataaatctctcaggtgacagcctttagaagaataattgaaagaatacgtgaaaaggctctccaagagtggggtcttggtgtgggcttttagtttcttctgctatatgagttaatctctggttaatgtagattccagagagggggtccaagacaattgcacatcttctggatgaacttccctcagtcagataagagaacttgagacaaagtccctccctgtgcttctgaagggaagttggagggggtggggaggagaaggtcagagagagaccttggttctgaggcttatttctgaggtctgtgaatctccttctttcaaagcactcagcatgccaaagcaatataatttggggtatcattttcggagccccagcaaagattttctgctgcttcaattccggtgccagtgtgtttaactgctagagttgcaggaacattgtgcagataataaatgccagcatggaggaaaccttggcatgggacagacaaacaggcccctcttgccgcctcacaggcaagactgttcatcctcaagaccacggggcatcaacatcaccatttaagaaccatttttctgaaaccaaagcctcttttccaagctggtatcagtagtattaccaatttagtaactctgaatggagtcaaaccagaaattaagtgtttctagaagtcctcgtgggctgtcagtcctgcccaggtgtgttgttctctcaggattctctgggaacattgctctgtactaggatgctcttaggtctgtagaccctgctttgaagggttcctcctgatgggttctgctgagcccggtaaacctttactgcttatttctagtatatgatactttagcatcttccacctatagctatcagctattttttaaaacagctattctgactgagcacagtggctcatgccggtaatcctagcacttcagaaagctgaggtgggaggattgcttgaagccaggatttcgagaccagcctgagcaacagagtgagacccccatctctacaaaaaataaaaaaaaatagctggatgtggtggcacacctgtaatcccagctacttgggaggctgaggtaggagcatcacttgagcccaggagttcaaggctgcagggagctatgaacatgccactgcactctaggatgggtgacagagttggaccctgtctcaaaaaaaaaaaaaaaaaaaaaaaagctacttactgttcttctagtcttgtgtctgtctgtagagcccaaatttgagaggtgccatgttgaaatctgcacctgctttgtaggtctggcctctgaatcagcttctgtgcagaggtgatcccagggttcttccctactgctggaagaggagagctcaggcaggctcagggtcccattgactgtaccctcactccatctccccatcttcatctcaccactgccctttggggtatttggggatggccttccagggcaagggacatgcatccctgctgtcccaggaagggaaaacctccagtgggtctgctgttcgtggtgagaaccaagttccaaatatcaccggagtaccacatgcttgttgtaggcaatgtagaaaacaagaaaagagcagtggcgcacagttggttctgcccttcggaaattacgactgcaaattgtgaaaagcgcatctctagaggtgtatctgcttgagagtagaaatgggatttcactgttttaaaacacttttttttaacgtgttagaaagatgttctcaatatgttactttttgccgaaatcgttcatctctcagaacgtaactccggttgtgtttttctgtttccttatgtcccgttggcagttcatctcagaacaggccaggaacttctgcagataacaagttaatcatagcatgtccatcccagttggtcagtctgcctgttctctgaagggctaaacaagctgtggctgctctgggggtcattgttcagaggaccatctttctcttcctgcaggtgtcagcggaagcagtggcgggtggatctgccggccaccagcgtggtgatcacgtttcacaatgaagccaggtcggccctactcaggaccgtggtcaggtgaggccaggagatgcattacctgtcaggggtgttaagacattagctgtgtcccaggcacagtcagaccagggctgtcagtgggggctgcagacagggtctcctgactgctcagcacagggtgcagtgtgtagctcctccaaccaagggttaggaccaacatatgagaattttctaccccaggctaaaagtttatacccctaaaagacctataaactttatcttcttgtcttttcttagcgtgcttaagaaaagcccgccccatctcataaaagaaatcatcttggtggatgactacagcaatgatcgtgagtactgacactgattttatccctgtgtctggctcttctctgggcaccagtcttcctgtagtgggggtgctaatgaggcgtgaacaagccagaaatcagatccacagaaagaagaggtgcctctgtgatgccccaaggagataatcggcccttagatgattgagaatactatggttgaatgcaaagccctttatgaactccaggttcaaaatgctctgcttcttttcttttcctagctgaggacggggctctcttggggaaaattgagaaagtgcgagttcttagaaatgatcgacgagaaggtaagattcttcttaattcagcgccaagacagttgaattctgacttttcctgtaataacataaagaagtgctttagctcaaagagcaattaattgtctagcttttttctgtctccctctaccagagccgcttgggagacttctcccagcaaacacaggaaagacattaaaagcttgactaattgaaattattagtatattagagcaggatcaaattacattttcatttatgtatttagaaaattggcttctttctttcacaacctaggaagtcttatcagtcccttgaatacaaaagtttagaagaaaaacaaagatttagcaataagaagttgaatgactccatgctccaggcatctgataaaataaccgggattcaagtttgacagcctgctgaaggtgaaccatccaaaatggggagacagtactgcaattatatgctcatgcgattttgcaaatgccaacctcggaaccttctgtcagtcttatctgtgctggagctgagctcatgaggactcttttattggcagttagaagagaggctgtaaaggaggaaagtagtacactggagtgtctgggaaggaagctccaatcacaatgtaattaacatccagtgtgtcagtgctgttagagaccctgaagactgaattgttaggctcctccatggttgggagaaatctttcagtataggaaaatcacagagctttggaacccatgccacatttgctatttaagtctgactgttgatccaggggtggtgattgtattccttcatcagtgtaaaactctttcttctcattacatatgcactccagctggagtcaaggagtgaagtttttcttaccaggaatcttattggccaacacagtgattgagcctgttagaacagcatcatattttaaccaactagggtcatcaacctagacattcaagatacataaacagtgggataagccttgccttctaaacaagctgtttgccagactcacatcagtccaccaagcctggaataaaccaaaaagggggcaatttgctgccccctaaacaccttcaaaataactttatgaatttaaacccaaagtatctgccatcctaccccatcacctggcacaggctttaaaaaaaaaaaaaaagagaagtggggaaggaggaaagagagatagtgttggcactgtaaatcacttatgagccttatctaacagtgtctttgtctttaaactgcttagaaatcagaacaatgcttctcagtattaactttccgctagaatgttcatttcggttgaacccgtgctgatacgttgtttcggggaaggcatgagaagggtgggttgggagaagccagattatggaaagcctatatggaacagctgaagtctgtaacaattgaatgagaaaatatgtgcacacttgcacacacactcatgtatatatgtacccatgtgtgtgtataagatcccatctatgtaagcatacacacaaagtgcttgtagtgatgctactagatgacaaagtaaattaattgcctaaaatattatggtagtgaaagcagtcttaggatcattcttctgtggattttattgtgcattgattcttaacctagcaatttattagaagcacctagggaatttaggaccatgtcttgccctcattcacaattaaatagaaatttctggatttctctgggtggggtgtgggcagctgcatttttaaaagctgctaaaatgatgccgatgtacagtggaagttgagagcctagtactttcattttacagatggaaatactaaatctaaagaggctaggtggctttctcaaggcccttacagctatttaatgacaatagtaggaccaaaaccatgttaataatgagataaatctttttctctgcatttgtggagatagtcaagtggtatttctttttttaatctgttaatatggtgaaatacattggttgattttcagatgttaaaccagctttgcattcctagcataagccccagttggtcatgatacagtatccttttaatatatttttgttaaggatttttatacctgtgttcatgggaaacattggtctgtaattttcttaaaatgtatttttccagttttggcattatggtttactagccttataaaacaagatggaaagtgtgcccttctattttattttctaaaagagtttgtataatattttaattatttcttttttaaatgtttaatagaattagccagtctggaccaagaattttctttatggaaagatttttgataactaattcaatctctttaatggatataggcgtattcagatctgctgtttctttttgtgtctgtttcaagaaattttgtattttatcaacgtttttatatttattggctcaaagttgcttatgatattgtctctttttttactgtttgtcggattagtattactattttattgattttggtaatttatatcttcttattttctttatctgtctgctgttcatcgacgctgttcattttttaaaagaaccaatatttggcttttgtattaggattctccaaaaggacagaactaataggatagatgtatatataaacaggagtttattaaggaatattgactcacacaatcacaaggtgaagccccacaataggccatctgcagccgaggagcagggaagccagtccaagtcccaaaacctcaaaagtggggaagctgacagttcagccttcagtcagtggttgaatgtccaatagtcccaaagctgaagaacttggagtccaatgttcaagggcaggaagcatccagcgtggaagaaagatgtaggccgggggagaccaagccagtccagtctctctacatccttctgtctgcttttattctggccgtgctggcagctgattagattgtgcccacccagattgagggtagttcatttacatgtggcgtaatcattggtgtgactaggtttgggtctgctcttcggctgtttcttctctatttgtaccatgtgcattttgctttttgtaactgtgttcctgctttcttgccttcttttggattcagtgatttttttagtattccatttgaattattcttgtagcttttcagcaatacttttcatgtatgcacagttgccctgagaattacaacatacagctctaacttacaacagtctgcttaagagtcaacatcataccactttaaatttaagaattttacaatagttaaattgcatttccatttcccttcctatgtactatcgttatcatgcttttcttctacatacatcttaaaccccacaatacactgttacatttttacttcaaatagtcagtatctattaaataaagagaagaatatgtggatatgttaagcttatcctcatattttccatttgtagtatctttgtttctttccatagattggagtttttatttagcccgaataattttctttagaattttttctcataggcagcacaatctcaggttttatctgaagaatttttttctcctttgttattggaggctattttctttcagtggaatctgagttgacaattaatttttctttcagcactttaaaggtttcactccaggcagggcacagtggctcacgcctgtaatcccagcactttgggaggccgaggtgggcggatcacgaggtcaggagtttgagaccagcctggccaacatggtgaaaccccgtctttactaaaaatacgaaaattagccgggcatggtggcatgcgcctgtagtcccagctactcgggagactgaggcagaagactcgcttgaacatgggaggcggaggttgcagtgagccaatattgtgccactgcactccagcttgagtgacagggtgagactctgtctcagaaaattcatactgttgttcctttgtatgttatgggtcatttcctctggctgctttttgtctctatatctgttttttttttttaacaatttgattatgatgtgcctagatttagttttctttatatttatcctgcttcaagtttgctgatgtaaattgaatatgtaagatgatgttttccaccaagtttgggaaatgactggccttttatttcttcatgtatttttttctgactcattcttgaacttcagttgcacatatgttataccacttgttattgtcctatagatgactagacttttcccccttaattttttctctgtccaccagatggatctatttctgttgttccatcttcaagttcactagtcattctgccatctccattttgctactaagaccagtcagtggatttttcatttcagataatttcatttttaagttctggaatacccatttgattcttttttatagtttttatttctctgctcagattccccacccattcactcattaaaattgttgcctttgagttattaaacatatttataatagctgcttttaaatcctcccctgctaattccaacctctgggtcatctcagggtgaacttctgatgactttttttctctttgatgtggtctccattttcctgtttcttctcatgtgtagtggttttttattttataattgacattgtggatgatatgttgtagaaacactggattatgttatctttctctaaagagtattcatctttgttatattgggcagttaaattaccagatgatgatgctgaacttctgtaggctctttttgtactttgctaggatgagtatggtttttttttttcgtttgtttgtttgtttgtttgtgacagcgtttctctcttgttgctcaggctggagtgcagtggtgtgatctcagcccactgcaacctctgcctcctgggttcaagcaattctcctacctcagcctgccgagtagctgggattacaggcgcacgccaccacgcctggctaattttttgtatttttaatagaaacgggtttcaccatgttagctaggctggtcttgaactcctgacctcaggtgatctgcccacctcagcctcccaaagtgctgggattacaggcgtgagccaccacgcccggccatgagtttgtttttatgagtcccttattcttgatacatagtctatattcctatgtgtggtctttctgaagttcctgtagaagaactgagatctttaccaagcatgtcacacttggcagaactcaaattccaaactttgttttctctgcagtagatagcagctgaaactcagttttttctgccttcttaactgttgcttttcatgttggacttggttcctgtgtggttcagaagtcagccaaagatttaacaggaggttattgccagatttgggtcctacctcctttccaggatctccttcagtttccagataccagaagctctgaactctctatcctctaacaactcaagccaaaaaaggctacattgcagtggattggagcgcatcctcgtggaaaacgccgtataaacacggagcttactcagtgttattttcttattttaaggggttggatcctatctagtttctgtctgcttctggctttcaaattgctgctttttatattttgctcagagtttataattgttactggagcaaaggtttgccccatacaagttgttttgcaattatcacaacttaaaatctttagtctttttccctgttctagcatacagccacataggaatcactgaaaacccattttgactgtggaaaaaagtacttagcagacttgtcctcaccggttatgaatagttgcatcatcttcacatagaaagcccagcatatatagcaaaagccatttatgaccacaacatccagggataaatatactattatttattttattttattttttatttattttgagacagggactcactcttatcacccaggctggagtgcagtggcgcaatcatggctcacttcccaggctccagtgatcctcccacctcagcctcccgagcagctagaaccacaggcgcacgcacaggccaccacccacggctgatttttgaaatacactatttgtattttgtgtcataatgaacgtgcacattattaacacatcacaagtatataaattgtagaatttgaccaatagtataactaattttgtgtaaaaggcagacagcagggctttgcaacttatgttatttagctcctgataagtcttagaagacagagatagtcacaacactgttgcaaatattatcaccactaaaatcaacaccattagcactggaagtctctgggtgacaccttccttagcccagttagttagaaaactgctgctgtgtcagaggaatgtagttataaaagttccacattttggttagttgataaaggagacttcagtaatgtaaagggcctttctcagaagacggtagttctaagaacgttgtcctcccagtcatccaatataactattaaaattaaaagttctgacaatagtctgtctcatggagcagttttgatctcatccagcaagtttacagtaatgtccgtgcccagaaagcaggctgcagagctgcgggcagggaggcgtcgccggttggcatggggttgtgctggccctgtggcttctctctcctgacgtgctttccaactcgcctctgcaggcctcatgcgctcacgggttcggggggccgatgctgcccaagccaaggtcctgaccttcctggacagtcactgcgagtgtaatgagcactggctggagcccctcctggaaagggtggcggaggtgagatgacgggggctgggaggggtgtcaggtcgtgggtggttggtagaggggacagaagggagcatggtccaggggaggtgtaacgcagggagtagggcgtcagggctggtaggggctgagctcgccgtctgcagttttccttgatagaaggaaaatgcctttggggcattgtagaaagactgttttactggctgtaggaatccatcagtaggaggaaccatccgttgacaggtaggaggcgaggatcagcagaggctggtgagagcctgattagttgaaggcagcccttttcatgggagcagtttccttccccgcctacagcttcgcagagtgcttagaacattgcccggcacctagcaagtgccatctcttgcagctcgcagagcggggcgtgctggggaagctgtccctggggccacctctctgctcttagtgagtagggcaggttagcccagcaggcttccaggctcctgtgggagagggttgtggctaggaagcatacagggaccggtggggttgtcagagggtgatccgcggctccacttctgcaccttctgctttctagaaacatcattgctaatattacatttggccttttttcacttctctcgccttctgcttgttttattgacttttctttccttcctactaagaaagcacttccttgggggcgataaagcaaacttaatgaaaggaaatagaaaatgaacaagtagttctgcctaagcatagcaaggatagctgatgggctgtgagtcatggaatactaagtaaccacaagctactaggaattatgaagatcatattcattaccctttatcaagttggggctaggccttttttatatgttacctgtaatgcacttgttatctccgtttgacaggtaaacaggctggggttcagggaactttaataatgcacgcaaaatcatacaggtagcagagccaggcttgcaaagccagtttcattaaatccctatctgagcccctctcttaacacatgtgcatacagctatatccaagaagaacccaccctggaatccccacccaccccaaccccacaacttcttgctctccctggctacgctccgccaggctgtctctcagggaagcgcagtcaaaaccaaaactgccatggcagtgtttgggtgtgcgaaggtcaccgagctcagtggtcagattgtcagaactgcttcgaacgcctgctcctaaattaaggagagaaagtgccaagcctattaactttcactaaattgagccttatgaaacaaaatgtaaagtagattatatcctttaactcatacacctagaaccagactgagccaggcaaggaaagttgtgttcttctctgccctcaatgcaccacacagcctacttttccctgtagatttgcacctgggtgttacagagctttgcagtgtttgcgtgttcctaattagcatgttccttcacctgttcctctgatgtagtatgttcttagctctgctggttctgttactaagttgtatttctaaatctttcttctggctaataagggttctctaagtggctcagggaaaacacttgctctttggttaactgtcagcatggggcacagtccagggtctctcaccagcatccgtcatttgagcttaaagaggttagagatgttaaaaggccttatgttcacaaactcttaccagaatgatggcaatgtggcataaagacatggctcaatctagggggattttttttttttaatagaatcacaggggctggacgcagtggctcacgcctgtaatcccagcactttgggaggccgaggcaggcagatcacctgaggtcagaagttcaagaatagcctgaccaacatggagaaatcccatctctactaaaaatacaaaaattagctgggcgtggtggtgcatatctgtaatcccagctgcttgggaggctgaggcagtagaatcacttgaacccgcgaggcggcggttgtggtgagccaagatcacgccattgcactccagcctgggcaacaagagtgaaactccgtctcaaaaaaaaaacaaaacaaaaaaacaaaaaagatagaattacagatgaggcaaacgtagaatctggaaatctctggttgatttggttaaccttctgctgtgataatattgatacttaccacatctctctcacacacacacactcccacatagaaatatattcctaattttgatgtatgagcattttagcagtgactccattcctgaagtttactgcagctcacaaatcactaatggtatttgggcaaacagaaaaggacccttgggacacagcaacacagtttttgcctttagctgggtgaactgatggctacctgtcccataaccatgggtgtctccactcctagagtgactcctgctacgcacccactcctgacctccctccctgcctcccagcaggccacagcacatctgtggatggccaagagcaagaccttctgggtctgggtggggaggctgggttcttgagggcctagggtagtaggtagtaagggccagttgggtttgccctgtgcctgcctaatactaatgccttctgtggttgggcaggttttttgttttgctgggattttgataactactcctctctttgtattttaggacaggactcgggttgtgtcacccatcatcgatgtcattaatatggacaactttcagtatgtgggggcatctgctgacttgaagggcggtaggtgtctgtcatggtgcccctgcctagctcgtcccgtctacaccagcatctgatcaccactccctctcattgtcaggagtgacagtgacaacagtgttcacgccgtagtgtgtgttctgagtaaaaaccacctgtgtgcttaacgagtaggacttcataaagagaaaaaaaaataggcttgctcccttaaagagcttcctgggtttccctttctcctcttccttgaccttctgtcacttttgcgagccatgtggttccatgaacagatatggcgtcctttatgaccagagatgatgaagccctccttgcaggaatctggggtgagaagcttcacggagctgaggctttgtgggattcaaggggctggagcctgtctttgccttctctgctcaccctggctatttctctgacagcctggtctctttctggttgctcagatggagacctgtgtcatcctcaaccccctcgccctcaccaagcccacgtgtgaccctgttctgctgatacagccccttgcatgtatcatggtttcttgtacccctctttcccagcccaacacctgtgcctacatcaccctggtccccttccgttggaatgaccacaccagtttcctgtatgtcctcaccgcacccaccctggagccccaagagcactttgtctgtttaccctcttaaaaattatcaaagacctcaaagagctttcatctgtgtgaagatgaactattctagatagacactgggcagagggttaactgatggtctaacatcaaaaaagaagacagtaaaactataaaatagggccttgaccaggtgcagtggctcacgcttataatcccagcactttggggaggctaaggtgggaggattgcttgagcccaggagttcaagaccagcctgggcaacataacaagactcttgtctctattaaaaaaaaaaaaaaaaattagctgcgtgtgatggcatgccagctactcggggctaaggtgggaggatcacttgagcctgggaggtcaaggctgcagtgagccacgatcaaccctgggagacagagtgagaccctgcttattcatacacacacacatatgtgtgcaagcaagccttaaccccagaaaacagaatacttggactttttagggagactcagccacggtcctagacattgtgggctttggccccacctgcctcttgcaggccccgtcatcatgggcaggccattttgcctctgcttctcagcttccccctctgggaaatgggatgataattgtgctggccacacagggcataatggaattagacatcagcgggagggcgggcatgcttggaggactgtacctagggtgggaaacataacattcaggaacgattcccagcaaatggtgagaagtaaaatgtttggggacattaaagaggagggatccttagatagctagaaagcctggctttcagaatgttgtatttccccaagtattcgaagagctgagatctaccaggctctatttctcccaaagcagctgcgtatgtcagagcaggggcaagaacagccaggtgttccgtgtgggggtgcaggtcttctgggtcagaggaacggggccacgttcaccctaagagcattttatgaaattcctttagaaaaaaaatcaaggatgccattcttaacagatctttaatctgctatagcctctctctttggaccaaattaataaaataaataataagataatagtaaacatcaaaaaaacaaaggaaaggttatgtcagctaatccttaaccttctctgttagtgaaacagccaggacattgtttttctggttttccttcgtggcctttgaggcaccatgataagagccagctcaggggcccgcaggggtctcctctctgtgcatttctgtccccactgcctgggcccctgtccatttccctctctctttgcctgaggccactctatcctgcagtgagggagctgggaggcctctttgtccagagccataaattcttggccagcccaggacactcagaaaccctcacccgccatccttcagtcactggggctgtcagggcggacagactatgaattcaaagcatgcagacaaatccaaacttaggcattgcaaaagccctgttgacaaaaagcctgatggcagagagcttaagaggattgaaagatgcatgccctagagtcattaggttttgctgtcagacccttggaattggaaatgcagcaccatgagccatgtgtttgccaagaagtggcctcctgatgcaccaggacagcttccgcaggtggagcctgctggcctccaagaggcactatgtgtgtgaccctgggagcaagagcgagacctgaggccctgcagatgcccacaaccaagtccgggtacagggtctaggctcttctatcctcaggggtctgtggattccaaaaatgaaatgcaacaggtgccaaatatatctgaaattgaagcttatttgcccagcttggcaacttccgctggctcattttcccttaaagttttcatattcccagcatgttcccactccattcttgctgcaaatacagtctgaagtttgctggcccagggaactgacaaagcctcgttccctccccagcattgccttcccctggggcagtgttggaggtaccacggcttgattttcatgttggatgctctttttcctcacatccttacagcccttggacatgccctggttatcaccacacagaccccagttctctccccatatttcattttttcctatgcatttcaatattagaaaagcctgactcacattttctttagggaggggcagggagaagatttcaacattcaccctcactgccggtctctctcttcagctacacccacgcccccagtccccttctctctcctccacaccttcttttttggctttgttttggttttcattgagttctgtccaaacatcgaatatttttaagctgtgaggaatgggggtgtcgggaggaagtggccagtctcttgtcaacaccctgtttcttttcctggctggcaggttttgattggaacttggtattcaagtgggattacatgacgcctgagcagagaaggtcccggcaggggaacccagtcgcccctataaagtaagtgccagcatccttcagggtgcccctcccagatgagaccccaggttccagcttctttgctgggcccgcaccgcctggagacccagtgggggctgttcaccttctgccctccggtttcccctcgtctcagctcaaagatgagcaccttccaccaggtcatagaataaaatccttggagatttcttttccacagttgaagtctcacataggtttataaggcctatctgctaggtctgtgcattcctgtatgttgataatgtagagcgtttctgtagcagagcaggatctccgagctgaccccaggcccaggaaaaggggcttggtgggcagcaggaggcttactgctgctactgcccagcaggcctttgctctcctgcagaggaaggagcccatgctcatgaagcccatgcttttaagattcccaggccgggcggtgggctttctggttgagagtcaggatgccttctctagctggggagagaagggggccacctcttccaagttggcacacggttaagtgagatagcattcacagagtacttagcgctgaaatatatttgctgacatttagccaacatctgcagtgtgccatagaccttcccagcactttacactgaattcgcacagcatcgcttctgggaacaaagtagggagctcagtgtacatctgttgtcaaccccttcctgggatgatgaagtgaggagcatggtgggttcccttgtaggaggtggagtctcatctatgatagtgataatgagagctggtgctgtggagcatttcctaagcgtgctcagggctttatgcccatgattttttgcaatcctcgtagctaccctataaggaaactgacacacagaaaggccgagttctttgcctatggcagcatgtcagtgagtagtgatccagccccagcagtcgctcccacataggggaggctcagtccagcccctggcactgtgggaacatccaggcagggacagtgggggaggcatttgaaggcagcagtggtgaagcagagagagtggcatgctgggcactgagcagaaaacagtggcagtgtggctgttctgaagatcagcttattgttagggaatcaaggcttggccttggcgcaagggtgctggcaatctaaccttgactttgccctctcctccctcccccctcttctttctgcctctttagaacccccatgattgctggtgggctgtttgtgatggataagttctattttgaagaactggggaagtacgacatgatgatggatgtgtggggaggagagaacctaggtatgtacaagcctcaaatctcaggacagagaagtgcctcagctctgcaaaaggcagggtgccaattggaaaaaaaatttaaaaggcttcagagtgaccattcactgggcttaatcgatccttgcaaacacatatgtaacaccccttttgctcttgaaagtctcatgagttgggcattaaaatgtgcctccctaggttagagtggaggatgccagaatacggataaagtctttgaagggaaatgcaaactctttcaaggcgtctgaacccaagtgtttggaatgttgcaggcttgcaaaaacagagggaaacagtccaggagctcagattcatgctgagtggtggagagtggaaaatgaaccccggcgaggctggtgggattgattgaattgaaatcatgaaaatccgatggggcagggaggccttggcacttaatcccttctcgactacctttgcgaatggttctcatttgtttttctgtttgtttgtttttttgtttttaaataccccatgcaaattatttttacccaggtttaggcacagcaaaattttgcacattgtggtctatattggtagccttatatttactgcataaaagatgaaaagatgtgttttgtttgtttagggtttggagtgggggagatcttttttgcttgtttcaattaaagccttttgtttcaaatgcttgacattctgagcgaattctcctgggctgctgagtgttgttaacttacattcgtccttgggtgagtgtaccctggaggacaggggagaaggaaaggggaaaatgaggccactcatttttaatagttttgagactttgaaagtttttgttactttaaaagaaaagactagcctagcctattatttttccattgttttatgatgttgaagtcagtgataccatctcatctttgaggatttctctgccttggtttgatgttgaaagcttctttaggctcgattactatactgcacgggtggagagaccgtgagtcaaactccttttgggttgttttaaaaaaatgatacattaacctctagggaaagcttggattgaagtcacttgagtacaaaaggcttcagaattgttaaccctctaaagagagttctgtcaccctgttccatgggtatcccctaatggtttagtggaaatccagcaggccagggtcgcccagtagggcagcgtatcgtgtaggtggccatttctcaaaaacagtgtggttttcagaagtttgcatactattagctgaaatgagacatcagccagcattttgtgtcatcgtgtaggaagagtgttgatttacatatctaaggaggcattcacccagagactggggggtagatttgttgtaaggagctgctttattgtggtttggtgtttgtatttattatgtagctgtgctagaaggttctagggtctgagcggttcaggttggggtgaagatgaaccctgcaagcaggagcacatctctgcccaggaaggctggggcatctgtccctccgtgaggggctctcctgggttatgccaaggacttggactcccagtgaggtttggagggctcaagagcttcacgtgagaaggccatgccgtgagcctttctccttagcactgctctagcttctgcttctgggggccgtgcacactactagccattgccaacctgaggggcctctgtgggtgtgcattgggagaggtgtatggtgcagagaggcccgagtaagatccaaaaccacctcctcaacgtgtgccccgctggaatgaccagagcttcccattttcctaatcatgtaagtccttatgtcatttaagcaattaaaatggaggaccaagaacctaacccttaactctaacaatgggggtaaggctccttgggggcatcatctgtgtttctctacatccctgtcatgcaaggatgatgctaagtacttccagggaatcatctgtttgtgctttcttaacggagtgtggtctgcagaggtcatgacaccttgcccagggtctcagaaccaagatgtaaacactaactgcctaattaaaaagccattgagttttactgagtaattatcctcaaagttatagggttcaaatgaaatcaacgctgaagatactgtagttatacttagccttgaaaatctcccacaaaagccctggaaggatcccttgttggcttaacagattccccatagagaagccaaggggatttcctagcccctaattctaaatcttgtggtgaggcaaatggatatttaaattttattttctgaaatagagacaacttcttttttttttttttttttttttgagatggagtctcgctctgtcaccaggctggagtccagtggcacattcttggctcaccgcaacgttcgcctcccgggttcaagtgattctcctgcctcagcctcccaagtaactgggattacaggcatgtgccaccgtgcccggctaattttttgtatttttagtagagacagggtttctccatgttggtcaggctggtctcaaactcccaacctcaggtgatccgcctgcctcggcctcccaaagtgttgggattacaggcatgagccactgcgcccagccgacaacttcttaggttgtgttgggaactgtaaaaagtaaagtcggaaactttcactgcttatgcttatgtgattgtaaccatacattttctattagtacaagagagttgcttattaaagccccgtaacagctgcatggatcacccattcctagtgagtgaggcattagtttgctggacccaagtagaaactcatggtgttctgacccctgtgttgtatttcctgccatgtgcctggcattctgggcacctgttgccataactaggttgactgcctgcaggatttgccatcaactcactgtatggtctgtgatggacccaccctatttctgatcaatctgcattggtgacagtgactgcacactctgtagatactatatgtgtatatttttacttcttttaatttgttaattgacagataataattgtgcatattcatgggatacatagtgatgtttttaatacatataatgtatggtgatcagatcaaggaaattagcatatccatcatctcaaacatgtagcatgtttttgtgttgggaacattcagtatcctcctcctggttatttgaaactctgtatatattatgggtccctagagtcaccctaccgggctgtagaacacaagcaagatccctcttctctagctataattttgtatccttgaaaaaatccctactccttccttcccagcctttactatcctccgttatactttttacttctatgagatcagtgttttttagcttccatgtatgggtgaaaacatggtattcaactttctgttcttacttcacttaatttcctgggaatactatccagccagaaaaaaaaaatgaagtcctgtcattcacagtaactgttgatttttgtcctgcctccctaacatgttcttagggatcttagataatacagaggaaaattcccttttgtattatacaaacctggtaaagaaaaactgttttttgcctttcagaaaattcttagtttttttgttgaatctgtttcttgcattcagtcggacccctgactcagactccagtcactcacctagtcagtggtgataagggcaggtacctggttggaaggtacctgtgtgtcacaaaaggcacaccagtcagtctaagcttcgactgagttccaatgctcagggcagtctgtgtgtttaagtaggtgtgggtagtgcctagacctacacatctcattcctcctgccggtcagttctgtgttgaagcaagtcaacagcagccttccccagggagcattcctacctgggccagctggttactgactggtccaagcctgtgagcagcgtgcagatatcaatcagttacttgactgtccttggtcactaccatagtccataaggcagtccctaagtccatagtccgtaagtccaaactctgcctggagacttgagcctgctaatacacagggacttgtatttaataaacttttccatttgagggaagggattatttttccctggatgagaaaagccaagatgcatcctggggttcagtctgttaaaaataagttttagagaaagatggcatatatggttgtctagaatatgtaacaataaagcttaattgtacatatttatataccttcagtgttgccttttcccacggtgttgatacgaagcaagtgcaaatgatcgtgagccagctagtgaagaattcagcacaagtgttttgtcactcagtagttacgatgatactggggtatacatgatcttatgccaagaggcctttatatttacagtagaccaagaagcattcttgtctcaaggtgtctactccacatctgaaaaatatttccccgtgaacattttttcttgattgtattgtggtccagagatccaagtgtgtcaaatgtctctcctttagagagttctgcatcaggttctggaaggaggaaggtccttatcagatctccttcagcagcagagggcatgggagccccatgatgggatggtcagggggcctctgtacctgcttggtgtgtctgctgttgcagaggtgcgtcccaggctctgtcagtcacctgtgtcttgttcatcgtctcagagatctcgttccgcgtgtggcagtgtggtggcagcctggagatcatcccgtgcagccgtgtgggacacgtgttccggaagcagcacccctacacgttcccgggtggcagtggcactgtctttgcccggtaagtagtgaaaggctgagcggggtccaaaacattgatgactaccctgaaagcaggacctgaccttgggctgtttgaggacagatgtccttcagtgggtgtggtgcatttatacaatggaataccacttagcaattgaaaggcgcattccacggatgcaggatacaacctgggcgcctttccagggcatgatgctgagtgagagaagcagttacatacatgattccactcatgtcacagcctcataaaaacacagctttagggatggggccagaccagtggtggccaggagctgtgatggcaggaaagcggggagtgtgactgcagaggggcagcaccagggatgtttggaggagggacggagctgttctgtctcctggttgtggtggtagttggacaaatcttcatgagtgtgaaggctcttagaactgtacaccaccccccaaaatgttatgggaaaattttttaaagaagaaagttcattttataaccattcaaggtgcaattaaaagcaacattgtcttagtccattttatgcgtctctaaccaaataccacagactgggtaatttaaaatgaacagaaatttatctactcatagttctggaggctgagaagtccaagatcaaggtgctggtgtctggcgagggtcttcttgatgtgtcatcacatggtgggagggcaaagagagggcaggaaagagcaagagggggccaaattctcccttttataatagcatcaatcccccccatgagagtggagccctcatggcatagtcacttcttaaaggtcacctcttaaaggcctcacctcggctgggcatggtggctcatgtctgtaatcccagcgttgcgggaggccgagatgggcagatcacctgagtttgggcagatcaggagtttgagaccagcctggccaacatggaaaccgcatctctactaaaaatacaaaaattaaccgggcatagtggcaggcgcctataatcccagctactcgggaggctgaggcaggaaaatcgcttgaactcgggaggtggagtttgcagtgggccaagatcgtgcctctgcactccaacctgggcaacagagcgagactctgtctcaaaaaaaaaaaaaaaagcctcacctcttaatactgttataatggcaattaaagtttaacatgagttttggagggaacaaacattcaaaccatagcaaatattaaagtcaagctgtactaattgtgtataccacaagacatcgtgacacagagtcacgattcttgatggagagtagatatattttagtaaacatgaagatgccaacggaagggctttccgaaagtaaaatagcaaatagccgttctatcaagccaagtgtccttctagggaattctcttacatgctaaagatagaacagcgtacaagccagatctcagggagattgccttctcttgagtgtagacagcaaaacacacagctaaataaggtattttcaaatagtaatcaatgctgtgaagaaggtaagatgcagtcatgtggtcgggcatgattaggacaagcagtaggagaggttttcatggtcaagagaacctttgaggaggtgttatgtgagttcagacttgaaaggtgggaggaggtccctctgggaccccgaggaatcagactacctgcaggaggagcagatccaggctgctgaggtgcgtttggcatatcagccaaatggaagccaagggtagctggaacctagagagtaaggggacagtgcacaggggcagaagagctagacaggcccgggccatgcacctttgcaggtcatgggaaacgttggatgttatttgattctgaaggaaaacactggggcttttcagcagtgcctgatgtctgttttatgctttggaaaggtccgtatggttgctgggcagagggtggccaggtggtgaccctatggtgaaacaatggtacgagtgccccctccactcttggagccagaagcaagggtcctgtgagcactgttgcagtagcccaggccagagatgtgatacagtcatgcacctgtaacagcgtttcggtcggtgacagtagtcccataagattataataccgtgtgtttactctaccttttctttgtttagatacacaaatacttaccattgtgttacagtttcctccagtgttcaggacagtcatgtgctctacacgtttgtagcctagaagcaataggctgtaccatgtagcctaggtgtatattaaggatacaccatctaggtttgtgtaaatatactctatgatgttcacacaacgacaacatcgcctaaggatgcatttttcaggttgtatccctctcattaagcagcacctggctgtacctggagcaggtgtgtagcagtggagatggggtgagatccagctccatggtgaagcaggcagctgtttgctaatagggcggcagagagaagggaggtagagcgggaaattaatttagggtgatgcccaggagctttgttacacaactgcgctggcgtgctgcccctacagaaatagggaaagccttggggtgggtgtgggtgtggggattgctagcttatcttttgtctagtttttttcttgagacagagtcttgctctgttgcccaggctggagtgcaaaggtgcgatctcggctcactgcaacctccacttcccagattcaagagattctcctgtctcagcctcccaagtacctgggcttacaggcatgtgccaccatgcccggctaatttttgtatttttagtagagacagggtttcaccatgttggccaggctggtctcaaactcctgacctcaggtgatctgcccacctcggcctcccaaagtgctgggattacaggcgtgagccaccgtgcccagccatttttaaactttttggttttttttcttttttgagacggagtttcgatctcgttgcccacactggagtgcaatggcgtgatctcagctcaccacaacctccacctcccggattcaagcgactcccctgcctcagcctcctgagtagcagggattacaggcatgcgccaccacacccagctgattttgtatttttagtagtacatttctccatgttggccaaactggtcttgaactcctgacctcaagtgatccacccgcctcagcctcccaaagtgctgggattatagacgtgagccaccgtgcctggccatttttaaacttcttaaaagtacagattatacaatacacctattatacagaagtcagatttttcacatagggaatctgatttctgagaaaactttaatagaaggcaaaataacaagtaatgcttctgaccaaattatcttctctcaaaaactatgtttcttcacaaatgttgaaacttcatttttgttctttattaaaacaaaaatgtgatcttgtacaataagctttacaaaatcaaacaaaaatatggatatatgtgctttttcctggggcagcatgagattctttatatagacatatcagacgccccacaccaaagccattgatacctaccagcaaacagtgagatttcagaaaacagtatgttaaagtactcaagacattgcactctttgttagaagagaaacattttcaaattgtatttcacagcccaggagcctgtattctcaagatttggaaaagaagctgatccagggtttcattattttggggcagcatggatctgattaaaaagccctgctgttgaccttcagccaggttgctctttacctcagttgactcatctgaaagataaagaagtggaattatatcactgtatttctgaggtctctttccagctgcagtttctcttaatctcctatacaggttgaatatcttttatccaaaatgcttgagacaagaaatattttggatttttgactttttcaggatatggaatatttatatgtactacctaatgagatatcttggggctgggacctaagtcaaagtacaaaatttgtttgttttatatagaccttatacacatagcctgaagttaatttaatacaatacttttcataattttctgcatgaaacaaagtttgtgtacattaaaccatcagaaagcaaaggcgtcactgtgaccgcccactggattcaccttgcccgctgcccagatggagctgacttaccaagatgggaattgcaatagagaaagagtttagttcacacagagctggctaagtgggagactggaattttattacttaagtcaatctcccccaaaattcagaggctagggtttttcaaggataatctggagggagctggggactagggagtgggtgctgctgattggatgaggtgcaatcataggggtgtggaaaatggtccttgtgcctgccgagtctgcttctgcatggatgggtccacaggacaagctggagatctggatggagtcatcagaagtgcagaagcctgaaaagacattacaaaaggccaatcttacgttctgcaatggtgatgttatctgcaggagtaattggggaagttgcaaatctgtggctgatttgttagtccaacaaaggcagtctggtacccagacaaaaagagggtttgtttggggaaagggctgttaccatctttgttttaaagttaaactataaactaagtttctcccaaagttagttctgcctatgcccaggagtgaacaagggcagtttagacgttagaagttagatggagtcagtcaggtcagatgccttaaactgtcaattttgtcattgttaaattttttgcaaaggcagtttcgtcactatctcatgttggtgctcaaaaagttttggatgttaggacattttggattagggatgcccaacttgtaatagatgacatttaatatttatttaatacttatttaatactacctaaatacttgcaaatacctgcaaaaacaaggagggcctggacaaaagtgagtctccctcggtgccactgtatctgcagcactgagactgtttggtgtagataccaaataaatacctgagtgaaccaataaataaatgaataaaaggagctagcactgagtagcacatggagatcattccttggggctgcctagttatccttttctattacaaagacagaaaagagttgctttgcgtttaggaatttttaagtgatttagtcacttaaaaacttgagtgatttgaaaacagtatgactggagttgataaaacctttaaatcattaaggctgaaaggaacctaggacattctggaatcaaatcctttcatgtccctgttggggaaatccaggtgccagatgttacaagtatttaagttaataactggttaaaaactgactaggcataggttaaggcataggtcacttagcaaaaccccactaacaatgtttagtggctcttctgagaaatgatatgtatgatccagtatcccccagcactttaagtactcattgttgtatctgtatattttttaatagagagaaagtaaaaattcatcagtctcatcaccaaaccagttgtgccataacactctcataatttgatgaattcgtctgtcagtatctatttctgtctctctctcttgtttgctcactggctctccttctgcctctacacacatatccactatatgcaattctgcaaactattttattttcccacaagtccaggacatcatttctgtcaacatgtaagatgcacactcatgtttttagtggtcacagaatatttcatttgattccttcctcatatttagtcataaagtttctcttttttttttttttttttgctattataaacaaagcagaagtgagcatattttcacatgtatatttcattcctaattgattgctgccttgagataaatttctagaagtagagctgctgggtcagagaataggtgcattcatatgttcttatctgtgttgaatggcattatggataatagtccatattctacttactaaaatgaaaaagtatatatatcaccttatatgaaagatataggccccatacagaaattattttaataatggtatctcagatcagttgaaagtttcgccattttaaggaattattttaaaaggcgagcattacctccttactgtatttattttggaagaacacagtgccttcctatggggttcttaaggagggctagctatagcctgaagtgggagtccaccttatagccgagaccagaatatgggagcaaagaggttagctgtgtgcttgctacttcatggatgctttaagataattcttggcagaatacactgctgatacctatgcagatgatagcttttaatgcatgtcagacattcaagagtagcttgtcccaggggctttatttatggcaaatcatggttctctctatgagatttaagtacatggttttctttccttctagaaaagccggctgggcgcggtggctcacgcctgtaatcccagcactttgggaagctgaggcgagtggatcacaaggtcaagagatcgagaccatcctggctaatgtggtgaaaccgtctctactaaaattacacaaaaattttagctgggtgtggtggtacatgcctatagtcccagctgctcaggaagctcaggcaggagaatcgcttgaacccgggaggcggaggtttcagtgagccgagatctcgccactgcactccagcttggcagcagagcgagactccatcaaaaaaaaaaaaagctagtgcaaacatggcagtctttcagcttagccccgcagaaaagaaagtgattttcccaggaactcttatcttatgtagtctgaactttaatgcagagctgtctgatagtgtcgtagccgtgacggagaaggccgtggggcctggaatctccttgctgtgctctgtggccccggccctctgtggacgcgtaatgtgagagtttttaaagagtaactttcttttgtccttctttaagatatagaccccagtccctcctttaaaatattggctcgtgctgtaatttccactttgccttttgccctttgaccatctgtgtgacaagaaagccattccaatggttcagtaagcacccgctgaggctggctccccacaggtccagctcgaggtgctggtggggacagcccaccctctgctgtgtgccgtgatcccagctggagctgctgcacacccagagggagccgcctcagtcacacgccagcagacaggtgcaaatggagtgatgcagacagaaagaaaggaaatcacacctcaagatttattttctttctagaaacacccgccgggcagcagaggtctggatggatgaatacaaaaatttctattatgcagcagtgccttctgctagaaacgttccttatggaaagtaagtggcagttctgccttctcacaattactggggattcttggggtgtgggggtgggaggtaaggggctgcccccagcgttgaattcagctacccaggtgccaaggcgggaaggggttgtgggcacaggagcatgggcagtccacaccacaccacctgccccaaccctgttctcctcagcagattttcaagtttgatgtagaaagcccatctattcttaaaatttataaaggaatcttatttccctcttctccagtattcagagcagattggagcttaggaagaaactcagctgcaagcctttcaaatggtaccttgaaaatgtctatccagagttaaggtaagtccccagggatctggggtttcactttgtaagggcttagaagccagtaaggccatagaagcagcagaggggaaatggaggtggggctgcaggcatgagattgggcacctgggccccagtgagagcctgtggtctcactccatggtgtggagctgagaatctgctcccaagttggcctgctgctgtctctgtcctgcagagctgccctcccatgcttcggagtcccagaggcagtcccccgggcctcaccttgtttttggcttgttctccattggcaaggtgatgggctgggtgacctgaaggactggtgtctgacaggctcttcgagtgaccaggagcagtccccagcctccgcaagcatgcagtgtctgcagccagccctcgatccccccgccaggcgcctttgcatgcctccgatctgctgcgctcacccttgctgctcctgtgggccagcagataacagcccccacgaggctccctcctcccagctaggttaatcacatgtgaaacggaagtaataatgctgctgccccacgtccctccggaggattcatggcagaaacacctttctgagcattatttccacacccagcctcttgttttaagcgaatacgagctccccatctggagggacctgctgataacctcgtgagaagacctatagatccgctggggtggaggagccatctgcacttcatcttcttaaagggactgtcaggcaggtcgtgccttaatgcggcacattccttattctaaatattcccagagcattttacagcggctcacatatctccagcacagtgcctgcgaacgcaagacttgccaccattatctttccgctaacagctccttcagagcccttgtcacggagatttgttggacagttaggtaatgcggcctctctctgttgctcctgttcgctcacttggctctttggaaccgtttcctctgcttttcaagtaacatgccaggcgccaggtggcccatgccccctaggaggagaacaggagagaacacagcgtccttctccctcggatccctgccgtgcaggacagcttttgctggggattgagagcaccagatggtcaccagcgatggtcacctgcagcggcaagggtgcactggtcacagttgctggttgcagggccctggtcttcttcctgccagctctgtcctctcggccatgtgcactcaacccaaaagaacccattctgcctctgtgtctggccccagaatatgatgtctacacctcctgcctggtgtccctatacaacagattcttgactgtgggcactaaggcggctgctcatcaactctccgtcagccaaagaggggcttcaattcagtggattttaacccaaccatgccactcactttgctttttcagtcacagttgactgccatttctcacagaggtcacccatggtttgtagtgacactgggccccgcacccactgaagaccacatctgaggcactgagcaccatcctggctggcaaatctgcttcccctgtctgtggggggtgagggagacatcagcctcgtgttttgtgtctgtaatatcaccgccgtttactgagtgcctcctacgagccaggcactgggccgtgtgctttacacgaaatgttctatgtaacacttgcagcagatctgggtagcccatagcctaccaaagggcaaatcgagcttcagagaaagtgagtcttgcctgaaagccagcacctggcagaggtgggctgaggtttggatctggttctgaagcacgttgttcttccccgtggctgtggctttgttcacattagaccacctgacaagtctgcccacctttcccgtctttactggataaaggtcagatcctaagtgtattggaaagttcaaggcaacaggatctgaccacattgattttctaaatgacttccaataagactaacattgaagagtatcaggagcttttccttcctttccaaaaaaaaaaaaaaaaaaaaatgacctgatatagaatataaagaatacttctgcaacatacagtcttaaagtgttggaagtccagagcctgggagaaatgccgtgtccctgacacacactacctgtggtaggaagaggcacgatgcctagtcactgggtctttctctcgttcctgtcacctgtcatgaggccactgagcaaaggggctggtggacgggagctggtggtcatgtgcagtgaagcaggtgattctcacgttgtttttcagggttccagaccatcaggatatagcttttggggccttgcagcagggaactaactgcctcgacactttgggacactttgctgatggtgtggttggagtttatgaatgtcacaatgctgggggaaaccaggtatgtgcatggggaagccaggtcacctgcaggcccagagagagcaggagttgggggggtcctgatgttagaagtcccagctgccacctttctcctgggatgggtgatgtctatgaggaagcacctggctcctgctggccacagcctctttggcagccagcaccagggccagatagaatgtcacacactttggtgcatcagctctgtcatcagcttcggaccaggctctgctgcagcggcaagggtgcactggtcacagttgctggttgcagggccctggtcttcctgccagctctgtcctctcggccatgtgcactcaaccgcaaagcacccattctgcctctgcgtctggccccagaatatgatgtctacacctcctgcctggtatgcctatacaacagattcttaactgtgggcactaaggcggctgctagttatagcccctgcctgttagataatagcttaagatagaagatactcagtattaattgcttccattgcacacatacacaccttttctgagaggcataaaaatgcacaaccgccaggcgccgtggcgcacgcctgtaatcccaacactttgggaggctgtggtgggtggatcacctaaggtcaggagttcaagaccagcctggccgacatggtgaaacccatctctgctaaaaataaaaaaaaaattagccaagcgtggtggcgggcacctgtaatcccagctacccgagaggctgaggcaggagaattgcctgaacccgggaggcagaggttgctgtgagctgagatcacaccattgcattccagcccaggctacaagagcaaagctctgtctcaaaaaacaaacaaacaaacaaacagaaaaacccactaccttctcttctcccatcattgcaaaggagagacaaaatgaaggcttgatgggcccagctgagacttcggattctaaaaacagttttcccatgagataataataggaattgggtgaaatgtgagcttcatgcaccaaagggtaatcctgtgtgctcttacccccttcctgaaaacttgcctggcactgggagagcctgcagttttaaaaaaggcaggttaactccgtgtgtgtatcctgaatgtattgatttcttaactttctttaactggaagtatttttgaaagggggcatgtgcttttgtgtaaagctgggtcctcctcccaagtgagtgtccaggcagactgcaatccacaaataccttgactcctttcttcacttggtgatgtggttttagcagttacttgcaatggcctggacatcctaaattagaagagagagaggaacctgcctgcctggggcttgactgggccagtccccatccagcatgggcatggggcaggtagccagggcctggccctggttcccctaaatctccagcccttaaatagaagatacttggcgttgatgagttagaaaatgagagagagcctcattttctcgtgtggttttggtagagttgatcctggattctccgtatcagcgtcaacagtctcgatggttcagaatagctaaatgtgatgctatgtttgggtaagagccaatgggtcaggtttgccgacagatatgagtgtgcttccagtgcctgtgcacgtgtgtgacacacacacacacacacacacacacacaatagcacatatgctcatcacgttctcacacaacagctctcttctcctgattcccgggctcagtccccctctcttccttgtgcacatgcacctagactcatgtgctgcttctttcttctttttctgttactcagatgcagagcttgttttgctctctgtttcgtgtacatgacttcatatcattgatctctgtccttttgataaatattgttggagggttttttacttggcagtactattttgctagagaaagggattagaaggcaaacaaagcaatcccttgccttccagaactcacagttgagcagaggagccactgtgggttatgaaacagaggaggcacctgctcacctctgtgctgtccaggtggctgcgcctcctgttattccggctgccctcacctccatgtttaatcactgggcttccctctgctgtgtggcaggactgcatgccattcccaggctcccagggcctggcgtctgtgtgtagcctctgggctgtgaggacactccccagggagcaggcttcaggtgtgggtgcacacacaagccagccttcagctatagcctgagggaccagttttaggtatttcacactgtagcaggtcagcccccctgggtactcgtcacaggccccacccgtgtcaggagtcacctggagggaggaacccatacagggggagggaagaacaaacagagtggaagacgaagcgggtgaaaggaggaggagccagctggtattggtggggtgggcagaggcggaggggaaggtgccatccccaccgtgtccatgcttctgtgtccttgtagctcctccatccaagaccctgctgttaactgtgttctcagtcactgctgggaagcggggggcccaggggactcactcagaggtgatggagggcgccgtgcggtgctgctgtgggtcccgctgtggtccaggtgtgactggaggaggcgtctccgctggctgtgttccttctacactgataacagcgtgtttatttccatggtttgggctttgttcttgagatctggaaagcagtgagcttggggagagatgttttatgtgtttccatctagaaccatagtgaaaatccaccgaaatgccctcagaaaagtggagctctgtgagggagggggaaatgatgggtctcattctcagcaagctgggtttcatctaaaccggacagacggtgctgcaaggcttggtcgatcacacagcattaatgcagatttcaccaaatgcagacatgtggataattcgtgtagggttgggtgaagcttacctctggtctgtggatgacaaaacggacgaggtgcccacccaggttccgtactgtctgggtgttgggcctcttgtgatccctggccagcctcacctccgtgtttaatctctggagttcccactgtcactctgcagtgttctgatgatttatggaaggttggagaggtcactcctttctgtgtcagcgcctctgctggaaagcgacacaccttacgctacagcacattaaacagaagcgtgtgctcaggccccggccgagagagttcgtcatcagagtctcgggccccagcttcatcccctgtgcgtcaggctctgtgactggctcaccccccgccagcattgcaccttaattaccgcacagctagtaacacgagacagagtctgggccctgtggaggtggcaggtctacgggaaccaaagactttgtctgtgtagctgctgcctgtgaccctcctcacctgccctcaggaggacagcctgtgtcccgccttcagggctgtggccctcaccccccggtcctgcccagtagagagtctccaggattcctctctgcacagtgctgagggcagccacagcacagacctttgacacagagcgcccattccttgcctctgcaccaacttcaggggtcagcaaagggctgtgccaaggagtgaacaagatcgggtctgcagggtgtgtctcccactctgcttttgcttttccttcttgctgttgtgcagccattactgttctcacatgtgggctttcccttcctttccagcagtaagtgctgactccctgctcactctctgtccccctccaatggccacatcctgggattgctcagagaaattttttttttctttttttttttttgagacggagtttggctgtgttgcccaggctttttttttttttttgagacggagtttggctgtgttgcccaggctggagtgcagtggtgcaatctcggctcactgccacctccgcctcccaggttcaagccattctcctgcctcagcctctcaagtagcagggattacaggcacgtgccaccacacccggctaatttttgtatgtttagtagagacgggattccactatgttggccaggctggtctcgaactcgtgacctcaagtgatccacatgcctcagcctcccaaagtgctggggttacaggcgtgagccaccacaaccagcctgcccagagaacttttacaaaatgctgatgccaggtgctatgcccagagagcctgatctaatttgtctagggtcagagggcaccaccagatctctaagagctaacaagtgattctaaatgaggatttggcctgctgtagtggtacacacctgtaatttcagcactttaggaagccaaggcaggaggattgcttgaggccaggagttcaagaccaggctggacaacatagggaagctccgtctttacaaaaaaaaaaaaaagattagccagttgtgatgacctgtgcctgtagtccaagctactcaggaggctgagatgggaggattgctaaagcccaagaggtcgaggctgtagtgagctgtgattgcaccactacactccagcctgaacaacagagtgagaccatgttcctaaaataatgtaaaataaattagggccgggcacggtggctcacgcctgtaatcccagcactttgggaggctgaggtgggtgaatcacgaggtctggagttcgagaccagcctggccaacatggtgaaaccccgtctctactaaaaatacaaaagattagctgggcatggtagtgggcacctgtaatcccagctactcggggagctgaggcagaagaatcacttgaacccgggaggtggaggttgcagtgagccgagatcgcaccactatactccagcctgggtgacagtgtgagattctgtctcaaaaaaataaataaaaatttttaaaaaataggagttgaggagcaagcgttttctagtggaaagatgaacacatcagcacatacaatgtgatgtgagatggcaggatgacatgatgtatgttacaccctcagcttgggagcaccttactgcctgggccagtctggggccagtgggctactatcagtactttccaatagaaccatgtgctatgatggggatgctctacatctgccattcagtatatcagccacattgtggcaactgggcacttgaaatatgactagtgtgaattacaagtttaatttcatttcattctggtgaatttaaatgcaaatggccctgggtgccctgtagctagcacattagacagtacggctcagatattccagctcacaaacccactgtgcgtgagtcctctctgaaccgatagaaagtgatgcttttttgcatagcgtgtgacacggatgagaaacgagagggtaagtaatatttcccaactgaaaatagggcctggtgctttggaagagtgaggtttgttatctggtttccggctgagccttggcagacacacaggaaatgagaaaattaatggccatgccttttaagagtggcagctcaaaaaagcatttcttaaatatttatgaactttattttacaaattcagataattgaaatgcaacagaagaacaaaacggcaactagctctgttgtttgcccagctgaattagtttttctggaatcctgtgtaaagtctgctttacagtaattaagcacacaatagcaaggaggttgtaaaaacattcagacatgatctttaactgggtgtcagcagaccatccagcatccgccaacacctgctgccagggacagtctggaacccttctccataccagcgttgtccctcttactcaggactctcctcttcactgtgagtgggcgtctctgtgtaccacagtttcacacatcctggtggtgtccccagcccctgtgagtgcagggacggaacaatgtgcttcttcctggccctctccatcctgaacgccatctgcctatgggaaacacacacggcttcctctctacactccacaccttccatactctgtgacccagtgaataggaaaaaagctgcttttcctcctttatactctcacaaaacttctcacctctgacaccagccctgtgggcttttccccccacaccaagcaattctccaattctccaattctctgcggacactgagtgtcatgcctgtcaactcagttctgacactgcctacccagagttagcacagaccccacgggttatgggcttcctcccacaagatgcttctactccagatgccagtcacaagtccaagttgtcacctgctgtctgactgtaaatcagggctcccgcgacctcgccttgaattcattcatttgcaagaatagttcatagaactcaggaaaacggtttacttcgtggcttacctgttcattaggaaagactgaaacccaggagcagctggacgggagagatgcatagcacgcggtgtggaggtggggtgttggagcttccacgccctctccaggtgtgccgctctcccagcgcctccgcatgtccggcagccacatcccggagtgcaaggactttgacggaggcctcatcacatgggcatgatctccagctcctcttcccttcccagaggatggggtggcgggggactgacggtttcaagcttctcagcataacctggtctttctggtgaccagccccgtccaggagcccattagagttgcttcattagaacaagacactcccatcacccaataaattccaagggagtaggagctgtttgttgggaaccggggtcaaagaccaaacactagaatgaaagatgctcctaaaacccctgtggctcaggaaatgacaagggttttaggagccttgtgattgtgccagagaccaaataattatttttatgatgtcacactgtcctagagtatgggtgacgtgagtgcctgtgggtgcttggaagagctggctggaactcacccatgttgaatgacagcatcatagaatgttgggattcgactcagggtcgggtggccttccccagagaaggtggccggcagggctgggtgggtcagggctgcctccatgccgtgtttggaatgctacagtgcacaggccaagcaggtgcttctactctaggactcttcagagcctttaatagactgaatttccgagagataaacacagcacaaagtctgtttcccaaattcatttgacctagaatccgtctttcctaggattcctcacagagtagaatgtgaggaacactaattaaaaggtgagaaaatggaagacccgggaagtgagcaggcttgcccaagcctccctccctgttaggggaggaggaagtcttcagacaggtgaaggtgtcttcactgattcctagacgggtgtccgtgcctctgcatcccctctgctgatgctgagagctggagatggtgcatcccgccagtggttgtataaggtctgaatgctagaatctttagggtttggtttggtttggtttggttcggttcggttcagttcggtttggagacagggtctcggtctgtcacccaggctagaatgcagtggcacaatcacagttcactgcagcctcggcctcccaggttgaagcaatccttccacctcagcctcccaagtagctgggaccacaggcatgcactgccacacccggtcaacttattttttatttttagtacaaacaaggtctcgctatgttgcctaggctgatcttgaactcctggcattaagcagttctcccgccttggcccccaaagtgctgggattatagataggcctgagccaccacaccgggctgcatcttcaccttttaatgtttttctaatgacggactatttgttccaacatgatacagatactagacagtgaggcttctttaaacactatttgttcctttccttacctctgtttccaagaaccaagaaaaaaacagtgtcttcatagcacataatagtgcctgaagttgcagaatacatttatttgtgtgtctttcatgttccccactagaaagggagcctggctctgtgacagcgccggtgtcatacaggtgtgcagcaggtggtcatgggacagaccgatagaaagacagacagacagacggaggggagggccactgcagcgtgctggggcttagagaggaaggggatggaagtggatagtgagtccctgtggggttttaaactggaaagggccttgctgcccctcgatattaaggggtgttcatccctttgagtgggacaaatggagagtgatggtcagaagcctcaccttccagtccctgctgtggccctgcctggaacaggctccggcctcctctgccacctgggaccatgtctcatttagtatccaaaatggttgtcctctcaccctgtcacagcctttaacttgtgtgtgtttgtacatatatgtgtgtgtttgtttgttaacatcatggtgtgttatttaaacactctctagctcagttttctcatctataaaatgagaataataatagccctcatggagctgttgtataaagggcttaaaataatgcttggcacatagcaccccattaaatttagctgtaatgtattcaaagaaattcatagatctattcctccagttttcagagggcttcatgagcacccatagatcaattagcattcacttaggaggctatacacgatatattttgcttacatatgcaatgtgttatttactacagttcacattcatcaatgctgtttgcaggccatacctgcatgagggcagagtcattccaaaatagcatgggtggaccagttgccaactgtctacctggtgtataaccaagcttgtgccacagtttttacagctcacattgaattatagaaaaatgaacaaggcagtctaacttgtatttggggctaaaatagttaatagttttattttagttactgaggtcctcaaagcacttctgcacatcactcagccaacttactgctcagttgtgaggttctcccacatctctgatgttataaatttgcccttaggcaaaaagtaattgtttcgttctcagttggctcaggggttctgaatctaagctccaccccgtgacccatttcctttttgagccctcatcgatgccccttctttcctttcacagcccggtgcatagcacgcctctgacttctggttttgtgttccaggaatgggccttgacgaaggagaagtcggtgaagcacatggatttgtgccttactgtggtggaccgggcaccgggctctcttataaagctgcagggctgccgagaaaatgacagcagacaggtacggcttgcaggcacccgtgggtgcccgtgattaacccagaccagggtagccacggcctgcgccctcttgctctgtgctgcctctcaaagcatccatctctgcgtgtacttatgtgttcttttgcatcactgtgaataatgtctagctgccctattagacttaagccacaaacctaatgttgcttatttctgattatattctcattctcttccctatgccgctgaaaatttaaagagaaattatctacttttgtttattcatcaaatacttttttctatttcaatttacaaaaattctaaatgattaatgttcacatggatggtactcgatacataatgcaagtgtgtgtgtctatgtgtgtatatatgtgagcatatatatacacacatatatacacaccacatatatatacatgctacatatatacatatatacatgccacatatatacatatatacacgccacatatatacacatatatacatgccacatatatacgtatatatatacacaccacatatatatacatgtatacacaccacatatatatacatatatatacacaccacatatacatatatacacaccacatatacatatacctgccacatatatacatatataaacaccacatatatatacatatgcatgccacatatatgcatatgtaaacaccgcatatatacatatatacacaccacatgtatacgtatatatagatgccacatttatacatatataaacgccacatatatatacacaccacatatgtatacatatatatacatgccacatatacatctataaacaccacatgtatacacgccacatatatacatatgtaaacaccacatatatacacaccacatatatatacacgccacatatatacatatatacaaacaccacatatatatacatatacacacacacaccacagatacatacatatatatacatgccacatagatatacatatataaacgccacatatatatacatataaacacaccatatatatacatatagatacatgctacatttatataaacaccacatatatatacgccacatagatatacaagcacaacatatatacatgccacatgtatacatatgtaaacaccacatatatatacacaccacatatacacaccacatatatatatacaaacaccacatatatatacatatatacatacaccacagatatatacatatatatacatgccacatatatatacaaatatacatgccacatatatacatgtatatacatgccacatagatatacatatataaatgccacagatatatacatatataaacaccacatatatacatagacaccacagatacatacatatatacatgccacatatatatacgtatatatacatgccacatatatatacgtatatatacatgccacatatatatacgtatatatacatgccacatatatatacgtatatacatgccacatatatatacgtatatatacatgccacatatatatacatatataaacacatatatacatatatagacaccacagatatatacatatatatacacaccacatatatatacatatatacacacacacacatatacacacagtttctttaaacatttcagaatagactttctacctgccttgtaagccggttttctctgacgtattcccttgtggcagcttgtggacacaccctttctcaaggcatggggtaacagttagtgtcaggaatagaaatgcaagcacaaaaggtcctccctgtatgcccatacttggagtgcctgcccctgttcttacagtcggtccttagagatagatgggatgtagggaaactgaggcacagaacctactggagccaagagcctaagccagcttctagtctaaccctgatttcacaacagaaaagtctcagaaagtcattgcctccaccctggagtcatctgggaagaccaaggccaggaccgagtccccggttctgaccccagttgtcagggagacgcctgcagagggccctctttcacctgtctgtctccaaacccctgcgccagctctgggtgctcctccttccctgctctgcagagtcccagcctgtcctggcagtgggagcccctctctagggttctgctcacaatccgcatctctaaatgtccatctgtgttgatgacttgataccaaaatgtgtaagggagtgcctgttaaacaagagaaggctagcaccgcttggacccaaaccacctagaaattgcctcactcattggcccctcgagaggaagctcctcgagggcaaggctggcatctgctgagccaagtactgggtgagtctcaaacacattcccctgggatgtaacggagcagagatgtctttggatgtaatggattgataaagtgatgactttagttgacacctttttaaaaaacaaatattacttcaatattgcttaatttcaagaattgacaggtgtttctgcttcagtcccagttttggggaaccataactgacacggcttaggacctttgtgaagcatgaaaagacctataaataataagtttttctggatgtatggcatgtataaatggggatctgttaggttttaaaccccaagactcaggctattagagaggatgtgggggctgtttcagtagagtctgactgccttgaaaatctgcgctccccacccccaaccacaatcccatcagacagacagatcagagcccacaaggccacctgtgcgagacggagctggggttttgttgttgtttttctaaggttcttgatttagctgatgctttgacacatgacaggcagtccctccagtggccagaatcagattccgttcattccgaattctttgttgagaagattcctggctgctcagagtaacagggcagcctcaatacatacacactttacatgacaatggggaaaaacagcatgaggggtgattgacagcaacgagggagctggaaatgaaagaggcaatgacaggcacttagcaaaagcctccccggctcctctgattgcactgtctttccctgctggcaagaactccaggtgagcaggtggacggaaataaggaaagcagggtacaagtgacaacatccttgtggtgtttcgcgcaggtcgggtccccagcactgggctcctctgcctgcaccggctcctccctgcctcactcactggcccctcaagaggaagctccttagcaaattttatcttggaactgaactggctttgccagttggaacatttggtttccaggcacgtccatgttttcatatgttgtgcatatttgcagagtcaaaggggaaagggaggcaggagtgagaaaatttaattctgcaatgtcaaaaggatttgcaaaaaatacttaggtgaaggagctttcgtgcacacagtataaaaaattaattagaaccacagacttcattatttgaaacgagctttggggaagaaaaaaatgttactttttttttttaagaacaaacattagagatttttaaagggggatttttctgtttttctttctttttttttttttttttaagagacaggatctcactctgttgcttaagactggagtgcaggggtgggtatgaccatagctcactgcagcctcgaactcctgtgcccaagcgatcctcccacctcagcctgcaaggagctaggacaacaggcatgcaccaccatgccctgctaattttttttaaaaaaaatgtttgtagagatgggttcttgctatgttgcccaggctggtcttgaactcctggcctcaagcgatcttcctgcctcggcctcccaaagtgctgggattagtgtcgtgagccgcctgcactcaggctgaaaggggtatttatgttacttgctaaacagggctcctcagatttccttcaggctgggttgtgcactttgattctggcttagttggtgggtaacgggtatgtgggttgagtttggttgttcgcttgatttgagtgttagtaaagaggcatcgtaccctgtactttacaagcggcatgttcagaactcagcaaacattggtccctgccatacagagcaccagggggctcaagggtagcagagacaagtttctcatatccaccaaggagcttgcacaccagtagagaacagactacatagaaataggcttctcaatgctatgttctgttcaaacaaccatctctcttcctgacatttggcctgacaccgttcctctggctcccccgagcagaaagccctaagtgggagcatggaggtgcccagaccaaggcctccaggcagggctgctttccaacagccaggggaggatctggccctgcattgtgtggatcccttcttggggtgaaccatcactggatcaagctttcatacgaaggcatgcaaattcccctacatcaaatcctgtgttaatgacgaaggggtgggtgcccagagctctggggctcagaggaggggacacccacagaaagtttggggcaggagacgttctgagttttgatccaaggcagagaatatgtttccttcctgggtcccagcagcacctgtggctggtttcctgtggggctgctgcaagctcctcggccgttcagatgagaggctgggaaaaacgtgtctatctgtgagtttttaatgcagccacaaggtcctgaattcacacgaatctgtttgtactcctttgcttgtgcccacactctaaggcactctcctgtgtcttgcagaaatgggaacagatcgagggcaactccaagctgaggcacgtgggcagcaacctgtgcctggacagtcgcacggccaagagcgggggcctaagcgtggaggtgtgtggcccggccctttcgcagcagtggaagttcacgctcaacctgcagcagtaggagggtccgggaggccctgccgtcctgtctcctgcaccattgggtggagtctggtgatcacattattgattatgtttcttaaactttccgcgaaactaatatacctcagtattccatcatggtctgaaagtcaaacttcggcaaggcacggacgactgtgcagacacagcagcggcaagaagcgagaactgccctccccctcctctcggtgcagcccagccgggcccccttccccaggccggagcgcccctcttccttccagctttcacttctgccggctccgcaactgagtgacacccagcgacaaccgactggggagtggtagaagcaactgaacggatgcgtgcgagctgaggacagggcgggaggagggggcacacatgccccaggggagcgaggagaactcttgaaatctccattttcaatcccttcgaaatcacgtatggtttccacaaagccgagtcgtgtcacgtggcaggtttacgtcaatagtccctctctctgctcctccattcgcaagtgtcttcctgggccagactcccctccacctcatgtacttgctatattgaggatgaagttttctatggtgggacactaaatataaagctatatagagaaagaatgtacggtcagttccctatggtttctgtagatcatcgtcatcttgtatattccccacaaagccgttcgcagcttccgggagaaggggccagagcccggtggggccagtttctcacagagggaggaggtggcctttgtcccctggagcccgatcagccagttggtgctactgctgtggccagctggggggcttcctccagaccaccggcctcggccccggcatccctgttgggcgtcagcctgagagtccctactgtgcgtcagaatccaccttgcgtgctgtgcgtatctgtgaacctggagcggttacttattttgacagatatcactttgggtctttttacattaaatttcttttctctaaggaatataagacataccccatagctctgtgtgagccagcaataccgctgccccctggcgacagggcagaccaatgatgccaggcagctgtcacacgctagtattggcttcattgtgatctgagccctgcacgctgggccttcagaattaatggccagcagtgtcagggatgagcccgtcagccagggcacaggcctggctcacagtcctgcacacctgctggcctggggagctccagccaggcagcgagtcctgccccgcccgcagctccctcccacaccccgcctggccaagatgactgcttcagggggctttggggaaagaattaggaagggtcagaaccaaacaatacctgctcatttacactgaggattcagggcgggagacaggagccttggggtcctgttaaaccacagacagttatgaactgaaagtcataacggggagaggtgcctggcttctacctgggtgctcaggaatgttcctcgtcacccctgccactctgtggtcggtgccctgcttcctcctccactcctggccgccttctccagcgccgcacacacagatgctcagtctcagagaggctggcacggcctggcagtctgagaaaagcgtcagttaggcacacctgcaggcccctcggtgggacagcggcggccttggagttaggagccaccctgggaggttgtgccggtgccatgctcctccctgtgtcttgtatgaaaggggccactgtgtgtcttcctccccggcgggagccccacatgtgtgcactgtaggacagcggccccgaggtggaagcctggctggagggctgccctataggtcttctcttcccgcctcccctgccatgcaaccagatgtgttgtgagtgggcagcgtgcccccacgctggagtaactccgcacgcttctgtctttcacggtgggcgctcggggggagcctgaggaaaacccccttaggtacctgtgcgaggctgtggagtgcaggccagagcagggtgtgcgtagcccccagcacccaggttcttctgtcagaccctgtgacctgcgagctgctactactgtaaggagggaaatggatgaatctggctcgttttaaaatcacgttttctgacgaatcctttgccccttcacctttaccccgcccgcacccctaggccctctcagccttcctatcatcccacgtgtctacccagacccttgtgcggcccatgccctgggggcggcgtcctgtccctgagctgggaggcggctttggatggtccgggcgtcaagagcaggggtgggccggggaggggtcctttgcggtgagctatgtttacatgacacagtgtgccaaagtgacttactgcggttgcgttagtttttaatcatcaggactatctcaccctcccactcctgtttttaaaactcagaattctttcctaagagcccttcgagcaaagcgtgccgaagttagttgtcttctctgtgctggtcctttcttatgtcctcataaaagctcagatgatggtatctgtgagtatgttttgcaaattcaaaatatagtttggtaatttttttttccagttgatttttaaaaagaactgctgtacagagcttgtactttgtccattttatagatggaaaccatccttgaaaattgtttaacttaaataaagagaagatactttctagataccgctctttgctggccagagtctgtcctggtgtgtgagggctgggtggggtgggtgtggggactgggattggggtcagccttctgcagctcctgctcagtggctgtttcttatcaccttttgcagatgcgcttttattgctgtgccctttggttggttattcttacttgtaataataatcattatcatttgtggagtgtttatgatgtgccaggcacccagccaagcccttaaatacatttgcattttacagccacaggggaagctggtgaaggaagttgctagcctgctcaaggtcacgtccttcctgtgtacctgcctggagccagcccttggcactcgcacccagaccctgtgctccaaaccaggggacaaatatttttacagtttttcaagtagttaagatttatagacttgtttaccagttacctggggctcttcggttccatccaggcgtctctgaggttcttcagatactatttgttttattttattttttttgagacggagtcacctaggctggagtgtggcggcgcaatctcgactcactgcaacctccgcctcagtgattccagcgattctcccgcttcagcctccaaggtagctgggattacaggcactcaccaccatacctggctaatgttttgaatttttagtagagatgaggtttcaccatattggccaggctggtcttgaactcctgacctcaagtgatccgccagcttcggcctcccaaagtgctgggattacaggcgtgagccactgcacctgaccttcggtaccttttaaattcctgcatttgagccaggccacagtagtgcgtgcctgtaatcccagctattcaggaggctgaggcaggaggatcgcttagcccaggagtttaagaccagcctgggcaacgaagtaagattcccatctcaacaacagaagcaaaagtacctacatttgaacagccccacaagggttcaaggaaacataaccttgaccaattatttaacaatttttttttcaagacagagtctcactttgtcgcccaggctggagcgcagtggtgcaatcttggctcactgcaacctctgtctcctgggttcaagtgattctcctgcctcagcctcccgagtagctgggattacaggcccccaccaccacacccggctacttttttgtatttttagtagagacgaggtctcaccatgttgcccaggctggtctcaaactcctgacctgaagtgatccacccgcctcggcctcccaaagtactgggattacaggcatgagccaccgcacctggcccaaattatttagcaattttgattgacattggggtgaagtaggaggttggccactggcaggactggcccaaatgagtgtctgaaaccttctagagaccacatgtaatccattttctttccctattatttgggacaccaaaaatttgctgccatctgagaagactaaaggaactctcagcatcgttttgtagcacccactggagccccttaggga
